United States Patent Application Publication US 2020/0163878 A1 - sequence listing, part 46

SEQ ID NO: 172226 - RNA, 1701 nt, Artificial Sequence; identical to SEQ ID NO: 169963
  derived and/or modified CDS sequence (opt4) from hemagglutinin__InfluenzaA__AHZ39889

SEQ ID NO: 172227 - RNA, 1701 nt, Artificial Sequence; identical to SEQ ID NO: 169944
  derived and/or modified CDS sequence (opt4) from hemagglutinin__InfluenzaA__AHZ39913

SEQ ID NO: 172228 - RNA, 1701 nt, Artificial Sequence
  derived and/or modified CDS sequence (opt4) from hemagglutinin__InfluenzaA__AHZ39925
augaagaccaucaucgcccugagcuacauccugugccugguguucgcccagaagcugcccggcaacgacaacagcaccgccacccugugccugggccaccacgccgugcccaacggcaccaucgugaagaccaucaccaacgacagaaucgaggugaccaacgccaccgagcuggugcagaacagcagcaucggcgagaucugcgacagcccccaccagauccuggacggcgagaacugcacccugaucgacgcccugcugggcgacccccagugcgacggcuuccagaacaagaagugggaccuguucguggagagaagcaaggccuacagcaacugcuaccccuacgacgugcccgacuacgccagccugagaagccugguggccagcagcggcacccuggaguucaacaacgagagcuucaacuggaccggcgugacccagaacggcaccagcagcgccugcaucagaagaagcaacagcagcuucuucagcagacugaacuggcugacccaccugaacuucaaguaccccgcccugaacgugaccaugcccaacaacgagcaguucgacaagcuguacaucuggggcgugcaccaccccggcaccgacaaggaccagaucuuccuguacgcccagagcagcggcagaaucaccgugagcaccaagagaagccagcaggccgugauccccaacaucggcagcagacccagaaucagagacauccccagcagaaucagcaucuacuggaccaucgugaagcccggcgacauccugcugaucaacagcaccggcaaccugaucgcccccagaggcuacuucaagaucagaagcggcaagagcagcaucaugagaagcgacgcccccaucggcaagugcaagagcgagugcaucacccccaacggcagcauccccaacgacaagcccuuccagaacgugaacagaaucaccuacggcgccugccccagauacgugaagcagagcacccugaagcuggccaccggcaugagaaacgugcccgagaagcagaccagaggcaucuucggcgccaucgccggcuucaucgagaacggcugggagggcaugguggacggcugguacggcuucagacaccagaacagcgagggcagaggccaggccgccgaccugaagagcacccaggccgccaucgaccagaucaacggcaagcugaacagacugaucggcaagaccaacgagaaguuccaccagaucgagaaggaguucagcgagguggagggcagaauccaggaccuggagaaguacguggaggacaccaagaucgaccuguggagcuacaacgccgagcugcugguggcccuggagaaccagcacaccaucgaccugaccgacagcgagaugaacaagcuguucgagaagaccaagaagcagcugagagagaacgccgaggacaugggcaacggcugcuucaagaucuaccacaagugcgacaacgccugcaucggcagcaucagaaacggcaccuacgaccacgacguguacagagacgaggcccugaacaacagauuccagaucaagggcguggagcugaagagcggcuacaaggacuggauccuguggaucagcuucgccaucagcugcuuccugcugugcguggcccugcugggcuucaucaugugggccugccagaagggcaacaucagaugcaacaucugcaucuga

SEQ ID NO: 172229 - RNA, 1701 nt, Artificial Sequence; identical to SEQ ID NO: 169943
  derived and/or modified CDS sequence (opt4) from hemagglutinin__InfluenzaA__AHZ39937

SEQ ID NO: 172230 - RNA, 1701 nt, Artificial Sequence; identical to SEQ ID NO: 169943
  derived and/or modified CDS sequence (opt4) from hemagglutinin__InfluenzaA__AHZ39949

SEQ ID NO: 172231 - RNA, 1701 nt, Artificial Sequence; identical to SEQ ID NO: 169943
  derived and/or modified CDS sequence (opt4) from hemagglutinin__InfluenzaA__AHZ39961

SEQ ID NO: 172232 - RNA, 1701 nt, Artificial Sequence; identical to SEQ ID NO: 169943
  derived and/or modified CDS sequence (opt4) from hemagglutinin__InfluenzaA__AHZ39973

SEQ ID NO: 172233 - RNA, 1701 nt, Artificial Sequence
  derived and/or modified CDS sequence (opt4) from hemagglutinin__InfluenzaA__AHZ39985
augaagaccaucaucgcccugagcuacauccugugccugguguucgcccagaagcugcccggcaacgacaacagcaccgccacccugugccugggccaccacgccgugcccaacggcaccaucgugaagaccaucaccaacgacagaaucgaggugaccaacgccaccgagcuggugcagaacagcagcaucggcgagaucugcgacagcccccaccagauccuggacggcgagaacugcacccugaucgacgcccugcugggcgacccccagugcgacggcuuccagaacaagaagugggaccuguucguggagagaagcaaggccuacagcaacugcuaccccuacgacgugcccgacuacgccagccugagaagccugguggccagcagcggcacccuggaguucaacaacgagagcuucaacuggaccggcgugacccagaacggcaccagcagcgccugcaucagaagaagcaacagcagcuucuucagcagacugaacuggcugacccaccugaacuucaaguaccccgcccugaacgugaccaugcccaacaacgagcaguucgacaagcuguacaucuggggcgugcaccaccccggcaccgacaaggaccagaucuuccuguacgcccagagcagcggcagaaucaccgugagcaccaagagaagccagcaggccgugauccccaacaucggcagcagacccagaaucagaaacauccccagcagaaucagcaucuacuggaccaucgugaagcccggcgacauccugcugaucaacagcaccggcaaccugaucgcccccagaggcuacuucaagaucagaagcggcaagagcagcaucaugagaagcgacgccagcaucggcaagugcaagagcgagugcaucacccccaacggcagcauccccaacgacaagcccuuccagaacgugaacagaaucaccuacggcgccugccccagauacgugaagcagagcacccugaagcuggccaccggcaugagaaacgugcccgagaagcagaccagaggcaucuucggcgccaucgccggcuucaucgagaacggcugggagggcaugguggacggcugguacggcuucagacaccagaacagcgagggcagaggccaggccgccgaccugaagagcacccaggccgccaucgaccagaucaacggcaagcugaacagacugaucggcaagaccaacgagaaguuccaccagaucgagaaggaguucagcgagguggagggcagaauccaggaccuggagaaguacguggaggacaccaagaucgaccuguggagcuacaacgccgagcugcugguggcccuggagaaccagcacaccaucgaccugaccgacagcgagaugaacaagcuguucgagaagaccaagaagcagcugagagagaacgccgaggacaugggcaacggcugcuucaagaucuaccacaagugcgacaacgccugcaucggcagcaucagaaacggcaccuacgaccacaacguguacagagacgaggcccugaacaacagauuccagaucaagggcguggagcugaagagcggcuacaaggacuggauccuguggaucagcuucgccaccagcugcuuccugcugugcguggcccugcugggcuucaucaugugggccugccagaagggcaacaucagaugcaacaucugcaucuga

SEQ ID NO: 172234 - RNA, 1701 nt, Artificial Sequence; identical to SEQ ID NO: 169943
  derived and/or modified CDS sequence (opt4) from hemagglutinin__InfluenzaA__AHZ39997

SEQ ID NO: 172235 - RNA, 1701 nt, Artificial Sequence
  derived and/or modified CDS sequence (opt4) from hemagglutinin__InfluenzaA__AHZ40009
augaagaccaucaucgcccugagcuacauccugugccugguguucgcccagaagcugcccggcaacgacaacagcaccgccacccugugccugggccaccacgccgugcccaacggcaccaucgugaagaccaucaccaacgacagaaucgaggugaccaacgccaccgagcuggugcagaucagcagcaucggcgagaucugcgacagcccccaccagauccuggacggcgagaacugcacccugaucgacgcccugcugggcgacccccagugcgacggcuuccagaacaagaagugggaccuguucguggagagaagcaaggccuacagcaacugcuaccccuacgacgugcccgacuacgccagccugagaagccugguggccagcagcggcacccuggaguucaacaacgagagcuucaacuggaccggcgugacccagaacggcaccagcagcgccugcaucagaaagagcaacagcagcuucuucagcagacugaacuggcugacccaccugaacuucaaguaccccgcccugaacgugaccaugcccaacaacgagcaguucgacaagcuguacaucuggggcgugcaccaccccggcaccgacaaggaccagaucuuccuguacgcccagagcagcggcagaaucaccgugagcaccaagagaagccagcaggccgugauccccaacaucggcagcagacccagaaucagaaacauccccagcagaaucagcaucuacuggaccaucgugaagcccggcgacauccugcugaucaacagcaccggcaaccugaucgcccccagaggcuacuucaagaucagaagcggcaagagcagcaucaugagaagcgacgcccccaucggcaagugcaagagcgagugcaucacccccaacggcagcauccccaacgacaagcccuuccagaacgugaacagaaucaccuacggcgccugccccagauacgugaagcagagcacccugaagcuggccaccggcaugagaaacgugcccgagaagcagaccagaggcaucuucggcgccaucgccggcuucaucgagaacggcugggagggcaugguggacggcugguacggcuucagacaccagaacagcgagggcagaggccaggccgccgaccugaagagcacccaggccgccaucgaccagaucaacggcaagcugaacagacugaucggcaagaccaacgagaaguuccaccagaucgagaaggaguucagcgagguggagggcagaauccaggaccuggagaaguacguggaggacaccaagaucgaccuguggagcuacaacgccgagcugcugguggcccuggagaaccagcacaccaucgaccugaccgacagcgagaugaacaagcuguucgagaagaccaagaagcagcugagagagaacgccgaggacaugggcaacggcugcuucaagaucuaccacaagugcgacaacgccugcaucggcagcaucagaaacggcaccuacgaccacgacguguacagagacgaggcccugaacaacagauuccagaucaagggcguggagcugaagagcggcuacaaggacuggauccuguggaucagcuucgccaucagcugcuuccugcugugcguggcccugcugggcuucaucaugugggccugccagaagggcaacaucagaugcaacaucugcaucuga

SEQ ID NO: 172236 - RNA, 1701 nt, Artificial Sequence; identical to SEQ ID NO: 169943
  derived and/or modified CDS sequence (opt4) from hemagglutinin__InfluenzaA__AHZ40021

SEQ ID NO: 172237 - RNA, 1701 nt, Artificial Sequence; identical to SEQ ID NO: 169918
  derived and/or modified CDS sequence (opt4) from hemagglutinin__InfluenzaA__AHZ40033

SEQ ID NO: 172238 - RNA, 1701 nt, Artificial Sequence; identical to SEQ ID NO: 169943
  derived and/or modified CDS sequence (opt4) from hemagglutinin__InfluenzaA__AHZ40045

SEQ ID NO: 172239 - RNA, 1701 nt, Artificial Sequence; identical to SEQ ID NO: 169943
  derived and/or modified CDS sequence (opt4) from hemagglutinin__InfluenzaA__AHZ40060

SEQ ID NO: 172240 - RNA, 1701 nt, Artificial Sequence; identical to SEQ ID NO: 169943
  derived and/or modified CDS sequence (opt4) from hemagglutinin__InfluenzaA__AHZ40072

SEQ ID NO: 172241 - RNA, 1701 nt, Artificial Sequence; identical to SEQ ID NO: 169943
  derived and/or modified CDS sequence (opt4) from hemagglutinin__InfluenzaA__AHZ40084

SEQ ID NO: 172242 - RNA, 1701 nt, Artificial Sequence; identical to SEQ ID NO: 169943
  derived and/or modified CDS sequence (opt4) from hemagglutinin__InfluenzaA__AHZ40096

SEQ ID NO: 172243 - RNA, 1701 nt, Artificial Sequence; identical to SEQ ID NO: 169944
  derived and/or modified CDS sequence (opt4) from hemagglutinin__InfluenzaA__AHZ40108

SEQ ID NO: 172244 - RNA, 1701 nt, Artificial Sequence; identical to SEQ ID NO: 170057
  derived and/or modified CDS sequence (opt4) from hemagglutinin__InfluenzaA__AHZ40120

SEQ ID NO: 172245 - RNA, 1701 nt, Artificial Sequence
  derived and/or modified CDS sequence (opt4) from hemagglutinin__InfluenzaA__AHZ40130
augaagaccaucaucgcccugagcuacauccugugccugguguucgcccagaagcugcccggcaacgacaacagcaccgccacccugugccugggccaccacgccgugcccaacggcaccaucgugaagaccaucaccaacgacagaaucgaggugaccaacgccaccgagcuggugcagaacagcagcaucggcgagaucugcgacagcccccaccagauccuggacggcgagaacugcacccugaucgacgcccugcugggcgacccccagugcgacggcuuccagaacaagaagugggaccuguucguggagagaagcaaggccuacagcaacugcuaccccuacgacgugcccgacuacgccagccugagaagccugguggccagcagcggcacccuggaguucaacaacgagagcuucaacuggaccggcgugacccagaacggcaccagcagcgccugcaucagaagaagcaacagcagcuucuucagcagacugaacuggcugacccaccugaacuucaaguaccccgcccugaacgugaccaugcccaacaacgagcaguucgacaagcuguacaucuggggcgugcaccaccccggcaccgacaaggaccagaucuuccuguacgcccagagcagcggcagaaucaccgugagcaccaagagaagccagcaggccgugauccccaacaucggcagcagacccagaaucagaaacauccccagcagaaucagcaucuacuggaccaucgugaagcccggcgacauccugcugaucaacagcaccggcaaccugaucgcccccagaggcuacuucaagaucagaagcggcaagagcagcaucaugagaagcgacgcccccaucggcaagugcaagagcgagugcaucacccccaacggcagcauccccaacgacaagcccuuccagaacgugaacagaaucaccuacggcgccugccccagauacgugaagcagagcacccugaagcuggccaccggcaugagaaacgugcccgagaagcagaccagaggcaucuucggcgccaucgccggcuucaucgagaacggcugggagggcaugguggacggcugguacggcuucagacaccagaacagcgagggcagaggccaggccgccgaccugaagagcacccaggccgccaucgaccagaucaacggcaagcugaacagacugaucggcaagaccaacgagaaguuccaccagaucgagaaggaguucagcgagguggagggcagaauccaggaccuggagaaguacguggaggacaccaagaucgaccuguggagcuacaacgccgagcugcugguggcccuggagaaccagcacaccaucgaccugaccgacagcgagaugaacaagcuguucgagaagaccaagaagcagcugagagagaacgccgaggacaugggcaacggcugcuucaagaucuaccacaagugcgacaacgccugcaucggcagcaucagaaacggcaccuacgaccacaacguguacagagacgaggcccugaacaacagauuccagaucaagggcguggagcugaagagcggcuacaagaacuggauccuguggaucagcuucgccaucagcugcuuccugcugugcguggcccugcugggcuucaucaugugggccugccagaagggcaacaucagaugcaacaucugcaucuga

SEQ ID NO: 172246 - RNA, 1701 nt, Artificial Sequence
  derived and/or modified CDS sequence (opt4) from hemagglutinin__InfluenzaA__AHZ40142
augaagaccaucaucgcccugagcuacauccugugccugguguucgcccagaagcugcccggcaacgacaacagcaccgccacccugugccugggccaccacgccgugcccaacggcaccaucgugaagaccaucaccaacgacagaaucgaggugaccaacgccaccgagcuggugcagaacagcagcaucggcgagaucugcgacagcccccaccagauccuggacggcgagaacugcacccugaucgacgcccugcugggcgacccccagugcgacggcuuccaggacaagaagugggaccuguucguggagagaagcaaggccuacagcaacugcuaccccuacgacgugcccgacuacgccagccugagaagccugguggccagcagcggcacccuggaguucaacaacgagaacuucaacuggaccggcgugacccagaacggcaccagcagcgccugcaucagaagaagcaacagcagcuucuucagcagacugaacuggcugacccaccugaacuucaaguaccccgcccugaacgugaccaugcccaacaacgagcaguucgacaagcuguacaucuggggcgugcaccaccccggcaccgacaaggaccagaucuuccuguacgcccagagcagcggcagaaucaccgugagcaccaagagaagccagcaggccgugauccccaacaucggcagcagacccagaaucagaaacauccccagcagaaucagcaucuacuggaccaucgugaagcccggcgacauccugcugaucaacagcaccggcaaccugaucgcccccagaggcuacuucaagaucagaagcggcaagagcagcaucaugagaagcgacgcccccaucggcaagugcaagagcgagugcaucacccccaacggcagcauccccaacgacagacccuuccagaacgugaacagaaucaccuacggcgccugccccagauacgugaagcagagcacccugaagcuggccaccggcaugagaaacgugcccgagaagcagaccagaggcaucuucggcgccaucgccggcuucaucgagaacggcugggagggcaugguggacggcugguacggcuucagacaccagaacagcgagggcagaggccaggccgccgaccugaagagcacccaggccgccaucgaccagaucaacggcaagcugaacagacugaucggcaagaccaacgagaaguuccaccagaucgagaaggaguucagcgagguggagggcagaauccaggaccuggagaaguacguggaggacaccaagaucgaccuguggagcuacaacgccgagcugcugguggcccuggagaaccagcacaccaucgaccugaccgacagcgagaugaacaagcuguucgagaagaccaagaagcagcugagagagaacgccgaggacaugggcaacggcugcuucaagaucuaccacaagugcgacaacgccugcaucggcagcaucagaaacggcaccuacgaccacgacguguacagagacgaggcccugaacaacagauuccagaucaagggcguggagcugaagagcggcuacaaggacuggauccuguggaucagcuucgccaucagcugcuuccugcugugcguggcccugcugggcuucaucaugugggccugccagaagggcaacaucagaugcaacaucugcaucuga

SEQ ID NO: 172247 - RNA, 1701 nt, Artificial Sequence
  derived and/or modified CDS sequence (opt4) from hemagglutinin__InfluenzaA__AHZ40154
augaagaccaucaucgcccugagcuacauccugugccugggcuucgcccaggagcugcccggcaacgacaacagcaccgccacccugugccugggccaccacgccgugcccaacggcaccaucgugaagaccaucaccaacgaccagaucgaggugaccaacgccaccgagcuggugcagagcagcagcaccggcgagaucugcaacagcccccaccagauccuggacggcgagaacugcacccugaucgacgcccugcugggcgacccccagugcgacggcuuccagaacaagaagugggaccuguucguggagagaagcaaggcccacagcaacugcuaccccuacgacgugcccgacuacgccagccugagaagccugguggccagcagcggcacccuggaguucaacaacgagagcuucaacuggaccggcgugacccagaacggcaccagcagcgccugcaucagaggcagcaacaacagcuucuucagcagacugaacuggcugacccaccugaacuucaaguaccccgcccugaacgugaccaugcccaacaacgagcaguucgacaagcuguacaucuggggcgugcaccaccccggcaccgacaaggaccagaucuuccuguacgcccaggccagcggcagaaucaccgugagcaccaagagaagccagcaggccgugauccccaacaucggcagcagacccagagugagaaacauccccagcagagugagcaucuacuggaccaucgugaagcccggcgacaugcugcugaucaacagcaccggcaaccugaucgcccccagaggcuacuucaagaucagaagcggcaagagcagcaucaugagaagcgacgcccccaucggcaagugcaacagcgccugcaucacccccaacggcagcauccccaacgacaagcccuuccagaacgugaacagaaucaccuacggcgccugccccagauacgugaagcagaacacccugaagcuggccaccggcaugagaaacgugcccgagaagcagaccagaggcaucuucggcgccaucgccggcuucaucgagaacggcugggagggcaugguggacggcugguacggcuucagacaccagaacagcgagggcagaggccaggccgccgaccugaagagcacccaggccgccaucgaccagaucaacggcaagcugaacagacugaucggcaagaccaacgagaaguuccaccagaucgagaaggaguucagcgagguggagggcagaauccaggaccuggagaaguacguggaggacaccaagaucgaccuguggagcuacaacgccgagcugcugguggcccuggagaaccagcacaccaucgaccugaccgacagcgagaugaacaagcuguucgagaagaccaagaagcagcugagagagaacgccgaggacaugggcaacggcugcuucaagaucuaccacaagugcaacaacgccugcaucggcagcaucagaaacggcaccuacgaccacgacguguacagagacgaggcccugaacaacagauuccagaucaagggcguggagcugaagagcggcuacaaggacuggauccuguggaucagcuucgccaucagcugcuuccugcugugcguggcccugcugggcuucaucaugugggccugccagaagggcaacaucagaugcaacaucugcaucuga

SEQ ID NO: 172248 - RNA, 1701 nt, Artificial Sequence
  derived and/or modified CDS sequence (opt4) from hemagglutinin__InfluenzaA__AHZ40166
augaaggccauccugguggugcugcuguacaccuucgccaccgccaacgccgacacccugugcaucggcuaccacgccaacaacagcaccgacaccguggacaccgugcuggagaagaacgugaccgugacccacagcgugaaccugcuggaggacaagcacaacggcaagcugugcaagcugagaggcguggccccccugcaccugggcaagugcaacaucgccggcuggauccugggcaaccccgagugcgagagccugagcaccgccagcagcuggagcuacaucguggagaccagcagcagcgacaacggcaccugcuaccccggcgacuucaucaacuacgaggagcugagagagcagcugagcagcgugagcagcuucgagagauucgagaucuuccccaagaccagcagcuggcccaaccacgacagcaacaagggcgugaccgccgccugcccccacgccggcgccaagagcuucuacaagaaccugaucuggcuggugaagaagggcaacagcuaccccaagcugagcaagagcuacaucaacgacaagggcaaggaggugcuggugcuguggggcauccaccaccccagcaccaccgccgaccagcagagccuguaccagaacgccgacgccuacguguucgugggcaccagcagauacagcaagaaguucaagcccgagaucgccaucagacccaaggugagagaccaggagggcagaaugaacuacuacuggacccugaucgagcccggcgacaagaucaccuucgaggccaccggcaaccugguggugcccagauacgccuucgccauggagagaaacgccggcagcggcaucaucaucagcgacacccccgugcacgacugcaacaccaccugccagacccccgagggcgccaucaacaccagccugcccuuccagaacauccaccccaucaccaucggcagaugccccaaguacgugaagagcaccaagcugagacuggccaccggccugagaaacgugcccagcauccagagcagaggccuguucggcgccaucgccggcuucaucgagggcggcuggaccggcaugguggacggcugguacggcuaccaccaccagaacgagcagggcagcggcuacgccgccgaccugaagagcacccagaacgccaucgacaagaucaccaacaaggugaacagcgugaucgagaagaugaacacccaguucaccgccgugggcaaggaguucaaccaccuggagaagagaaucgagaaccugaacaagaagguggacgacggcuuccuggacaucuggaccuacaacgccgagcugcuggugcugcuggagaacgagagaacccuggacuaccacgacagcaacgugaagaaccuguacgagaaggugagaaaccagcugaagaacaacgccaaggagaucggcaacggcugcuucgaguucuaccacaagugcgacaacaccugcauggagagcgugaagaacggcaccuacgacuaccccaaguacagcgaggaggccaagcugaacagagagaagaucgacggcgugaagcuggagagcaccagaaucuaccagauccuggccaucuacagcaccguggccagcagccuggugcugguggugagccugggcgccaucagcuucuggaugugcagcaacggcagccugcagugcagaaucugcaucuga

SEQ ID NO: 172249 - RNA, 1701 nt, Artificial Sequence; identical to SEQ ID NO: 169943
  derived and/or modified CDS sequence (opt4) from hemagglutinin__InfluenzaA__AHZ40177

SEQ ID NO: 172250 - RNA, 1701 nt, Artificial Sequence; identical to SEQ ID NO: 169943
  derived and/or modified CDS sequence (opt4) from hemagglutinin__InfluenzaA__AHZ40189

SEQ ID NO: 172251 - RNA, 1701 nt, Artificial Sequence; identical to SEQ ID NO: 169943
  derived and/or modified CDS sequence (opt4) from hemagglutinin__InfluenzaA__AHZ40201

SEQ ID NO: 172252 - RNA, 1701 nt, Artificial Sequence; identical to SEQ ID NO: 169928
  derived and/or modified CDS sequence (opt4) from hemagglutinin__InfluenzaA__AHZ40213

SEQ ID NO: 172253 - RNA, 1701 nt, Artificial Sequence; identical to SEQ ID NO: 169895
  derived and/or modified CDS sequence (opt4) from hemagglutinin__InfluenzaA__AHZ40225

SEQ ID NO: 172254 - RNA, 1701 nt, Artificial Sequence
  derived and/or modified CDS sequence (opt4) from hemagglutinin__InfluenzaA__AHZ40237
augaagaccaucaucgcccugagcuacauccugugccugguguucgcccagaagcugcccggcaacgacaacagcaccgccacccugugccugggccaccacgccgugcccaacggcaccaucgugaagaccaucaccaacgaccagaucgaggugaccaacgccaccgagcuggugcagaacagcagcaucggcgagaucugcgacagcccccaccagauccuggacggcgagaacugcacccugaucgacgcccugcugggcgacccccagugcgacggcuuccagaacaagaagugggaccuguucguggagagaagcaaggccuacagcaacugcuaccccuacgacgugcccgacuacgccagccugagaagccugguggccagcagcggcacccuggaguucaacaacgagagcuucaacugggccggcgugacccagaacggcaccagcagcgccugcaucagaggcagcaacagcagcuucuucagcagacugaacuggcugacccaccugaacuucaaguaccccgcccugaacgugaccaugcccaacaacgagcaguucgacaagcuguacaucuggggcgugcaccaccccggcaccgacaaggaccagaucuuccuguacgcccagagcagcggcagaaucaccgugagcaccaagagaagccagcaggccgugauccccaacaucggcagcagacccagaaucagaaacauccccagcagaaucagcaucuacuggaccaucgugaagcccggcgacauccugcugaucaacagcaccggcaaccugaucgcccccagaggcuacuucaagaucagaagcggcaagagcagcaucaugagaagcgacgcccccaucggcaagugcaagagcgagugcaucacccccaacggcagcauccccaccgacaagcccuuccagaacgugaacagaaucaccuacggcgccugccccagauacgugaagcagagcacccugaagcuggccaccggcaugagaaacgugcccgagaagcagaccagaggcaucuucggcgccaucgccggcuucaucgagaacggcugggagggcaugguggacggcugguacggcuucagacaccagaacagcgagggcagaggccaggccgccgaccugaagagcacccaggccgccaucgaccagaucaacggcaagcugaacagacugaucggcaagaccaacgagaaguuccaccagaucgagaaggaguucagcgagguggagggcagaauccaggaccuggagaaguacguggaggacaccaagaucgaccuguggagcuacaacgccgagcugcugguggcccuggagaaccagcacaccaucgaccugaccgacagcgagaugaacaagcuguucgagaagaccaagaagcagcugagagagaacgccgaggacaugggcaacggcugcuucaagaucuaccacaagugcgacaacgccugcaucggcagcaucagaaacggcaccuacgaccacgacguguacagagacgaggcccugaacaacagauuccagaucaagggcguggagcugaagagcggcuacaaggacuggauccuguggaucagcuucgccaucagcugcuuccugcugugcguggcccugcugggcuucaucaugugggccugccagaagggcaacaucagaugcaacaucugcaucuga

SEQ ID NO: 172255 - RNA, 1701 nt, Artificial Sequence; identical to SEQ ID NO: 169951
  derived and/or modified CDS sequence (opt4) from hemagglutinin__InfluenzaA__AHZ40249

SEQ ID NO: 172256 - RNA, 1701 nt, Artificial Sequence; identical to SEQ ID NO: 169918
  derived and/or modified CDS sequence (opt4) from hemagglutinin__InfluenzaA__AHZ40261

SEQ ID NO: 172257 - RNA, 1701 nt, Artificial Sequence; identical to SEQ ID NO: 170057
  derived and/or modified CDS sequence (opt4) from hemagglutinin__InfluenzaA__AHZ40273

SEQ ID NO: 172258 - RNA, 1701 nt, Artificial Sequence
  derived and/or modified CDS sequence (opt4) from hemagglutinin__InfluenzaA__AHZ40285
augaagaccaucaucgcccugagcuacauccugugccugguguucgcccagaagcugcccggcaacgacaacagcaccgccacccugugccugggccaccacgccgugcccaacggcaccaucgugaagaccaucaccaacgaccagaucgaggugaccaacgccaccgagcuggugcagagcagcagcaccggcgagaucugcgacagcccccaccagauccuggacggcgagaacugcacccugaucgacgcccugcugggcgacccccagugcgacggcuuccagaacaagaagugggaccuguucguggagagaagcaaggccuacagcaacugcuaccccuacgacgugcccgacuacgccagccugagaagccugguggccagcagcggcacccuggaguucaacaacgagagcuucaacuggaccggcgugacccagaacggcaccagcagcgccugcaucagaagaagcgacagcagcuucuucagcagacugaacuggcugacccaccugaacuucaaguaccccgcccugaacgugaccaugcccaacaacgagcaguucgacaagcuguacaucuggggcgugcaccaccccggcaccgacaaggaccagaucuuccuguacgcccaggccagcggcagaaucaccgugagcaccaagagaagccagcagagcgugauccccaacaucggcagcagacccagaaucagaaacauccccagcagaaucagcaucuacuggaccaucgugaagcccggcgacauccugcugaucaacagcaccggcaaccugaucgcccccagaggcuacuucaagauccagagcggcaagagcagcaucaugagaagcgacacccccaucggcaagugcaacagcgagugcaucacccccaacggcagcauccccaacgacaagcccuuccagaacgugaacagaaucaccuacggcgccugccccagauacgugaagcagaacacccugaagcuggccaccggcaugagaaacgugcccgagaagcagaccagaggcaucuucggcgccaucgccggcuucaucgagaacggcugggagggcaugguggacggcugguacggcuucagacaccagaacagcgagggcagaggccaggccgccgaccugaagagcacccaggccgccaucgaccagaucaacggcaagcugaacagacugaucggcaagaccaacgagaaguuccaccagaucgagaaggaguucagcgagguggagggcagaauccaggaccuggagaaguacguggaggacaccaagaucgaccuguggagcuacaacgccgagcugcugguggcccuggagaaccagcacaccaucgaccugaccgacagcgagaugaacaagcuguucgagaagaccaagaagcagcugagagagaacgccgaggacaugggcaacggcugcuucaagaucuaccacaagugcgacaacgccugcaucggcagcaucagaaacggcaccuacaaccacgacguguacagagacgaggcccugaacaacagauuccagaucaagggcguggagcugaagagcggcuacaaggacuggauccuguggaucagcuucgccaucagcugcuuccugcugugcguggcccugcugggcuucaucaugugggccugccagaagggcaacaucagaugcaacaucugcaucuga

SEQ ID NO: 172259 - RNA, 1701 nt, Artificial Sequence; identical to SEQ ID NO: 170054
  derived and/or modified CDS sequence (opt4) from hemagglutinin__InfluenzaA__AHZ40297

SEQ ID NO: 172260 - RNA, 1701 nt, Artificial Sequence
  derived and/or modified CDS sequence (opt4) from hemagglutinin__InfluenzaA__AHZ40309
augaagaccaucaucgcccugagcuacauccugugccugguguucgcccagaagcugcccggcaacgacaacagcaccgccacccugugccugggccaccacgccgugcccaacggcaccaucgugaagaccaucaccaacgacagaaucgaggugaccaacgccaccgagcuggugcagaacagcagcaucggcgagaucugcgacagcccccaccagauccuggacggcgagaacugcacccugaucgacgcccugcugggcgacccccagugcgacggcuuccagaacaagaagugggaccuguucguggagagaagcaaggccuacagcaacugcuaccccuacgacgugcccgacuacgccagccugagaagccugguggccagcagcggcacccuggaguucaacaacgagagcuucaacuggaccggcgugacccagaacggcaccagcagcgccugcaucagaagaagcaacaacagcuucuucagcagacugaacuggcugacccaccugaacuucaaguaccccgcccugaacgugaccaugcccaacaacgagcaguucgacaagcuguacaucuggggcgugcaccaccccggcaccgacaaggaccagaucuuccuguacgcccagagcagcggcagaaucaccgugagcaccaagagaagccagcaggccgugauccccaacaucggcagcagacccagaaucagaaacauccccagcagaaucagcaucuacuggaccaucgugaagcccggcgacauccugcugaucaacagcaccggcaaccugaucgcccccagaggcuacuucaagaucagaaacggcaagagcagcaucaugagaagcgacgcccccaucggcaagugcaagagcgagugcaucacccccaacggcagcauccccaacgacaagcccuuccagaacgugaacagaaucaccuacggcgccugccccagauacgugaagcagagcacccugaagcuggccaccggcaugagaaacgugcccgagaagcagaccagaggcaucuucggcgccaucgccggcuucaucgagaacggcugggagggcaugguggacggcugguacggcuucagacaccagaacagcgagggcagaggccaggccgccgaccugaagagcacccaggccgccaucgaccagaucaacggcaagcugaacagacugaucggcaagaccaacgagaaguuccaccagaucgagaaggaguucagcgagguggagggcagaauccaggaccuggagaaguacguggaggacaccaagaucgaccuguggagcuacaacgccgagcugcugguggcccuggagaaccagcacaccaucgaccugaccgacagcgagaugaacaagcuguucgagaagaccaagaagcagcugagagagaacgccgaggacaugggcaacggcugcuucaagaucuaccacaagugcgacaacgccugcaucggcagcaucagaaacggcaccuacgaccacgacguguacagagacgaggcccugaacaacagauuccagaucaagggcguggagcugaagagcggcuacaaggacuggauccuguggaucagcuucgccaucagcugcuuccugcugugcguggugcugcugggcuucaucaugugggccugccagaagggcaacaucagaugcaacaucugcaucuga

SEQ ID NO: 172261 - RNA, 1701 nt, Artificial Sequence; identical to SEQ ID NO: 169943
  derived and/or modified CDS sequence (opt4) from hemagglutinin__InfluenzaA__AHZ40321

SEQ ID NO: 172262 - RNA, 1701 nt, Artificial Sequence; identical to SEQ ID NO: 169943
  derived and/or modified CDS sequence (opt4) from hemagglutinin__InfluenzaA__AHZ40333

SEQ ID NO: 172263 - RNA, 1701 nt, Artificial Sequence
  derived and/or modified CDS sequence (opt4) from hemagglutinin__InfluenzaA__AHZ40345
augaagaccaucaucgcccugagcuacauccugugccugguguucgcccagaagcugcccggcaacgacaacagcaccgccacccugugccugggccaccacgccgugcccaacggcaccaucgugaagaccaucaccaacgacagaaucgaggugaccaacgccaccgagcuggugcagaacagcagcaucggcgagaucugcgacagcccccaccagauccuggacggcgagaacugcacccugaucgacgcccugcugggcgacccccagugcgacggcuuccagaacaagaagugggaccuguucguggagagaagcaaggccuacagcaacugcuaccccuacgacgugcccgacuacgccagccugagaagccugguggccagcagcggcacccuggaguucaacaacgagagcuucaacuggaccggcgugacccagaacggcaccagcagcgccugcaucagaagaagcaacagcagcuucuucagcagacugaacuggcugacccaccugaacuucaaguaccccgcccugaacgugaccaugcccaacaacgagcaguucgacaagcuguacaucuggggcgugcaccaccccggcaccgacaaggaccagaucuuccuguacgcccagagcagcggcagaaucaccgugagcaccaagagaagccagcaggccgugauccccaacaucggcagcagacccagaaucagaaacauccccagcagaaucagcaucuacuggaccaucgugaagcccggcgacauccugcugaucaacagcaccggcaaccugaucgcccccagaggcuacuucaagaucagaagcggcaagagcagcaucaugagaagcgacgcccccaucggcaagugcaagagcgagugcaucacccccaacggcagcauccccagcgacaagcccuuccagaacgugaacagaaucaccuacggcgccugccccagauacgugaagcagagcacccugaagcuggccaccggcaugagaaacgugcccgagaagcagaccagaggcaucuucggcgccaucgccggcuucaucgagaacggcugggagggcaugguggacggcugguacggcuucagacaccagaacagcgagggcagaggccaggccgccgaccugaagagcacccaggccgccaucgaccagaucaacggcaagcugaacagacugaucggcaagaccaacgagaaguuccaccagaucgagaaggaguucagcgagguggagggcagaauccaggaccuggagaaguacguggaggacaccaagaucgaccuguggagcuacaacgccgagcugcugguggcccuggagaaccagcacaccaucgaccugaccgacagcgagaugaacaagcuguucgagaagaccaagaagcagcugagagagaacgccgaggacaugggcaacggcugcuucaagaucuaccacaagugcgacaacgccugcaucggcagcaucagaaacggcaccuacgaccacgacguguacagagacgaggcccugaacaacagauuccagaucaagggcguggagcugaagagcggcuacaaggacuggauccuguggaucagcuucgccaucagcugcuuccugcugugcguggcccugcugggcuucaucaugugggccugccagaagggcaacaucagaugcaacaucugcaucuga

SEQ ID NO: 172264 - RNA, 1701 nt, Artificial Sequence; identical to SEQ ID NO: 169944
  derived and/or modified CDS sequence (opt4) from hemagglutinin__InfluenzaA__AHZ40357

SEQ ID NO: 172265 - RNA, 1701 nt, Artificial Sequence
  derived and/or modified CDS sequence (opt4) from hemagglutinin__InfluenzaA__AHZ40369
augaagaccaucaucgcccugagcuacauccugugccugguguucgcccagaagcugcccggcaacgacaacagcaccgccacccugugccugggccaccacgccgugcccaacggcaccaucgugaagaccaucaccaacgacagaaucgaggugaccaacgccaccgagcuggugcagaacagcagcaucggcgagaucugcgacagcccccaccagauccuggacggcgagaacugcacccugaucgacgcccugcugggcgacccccagugcgacggcuuccagaacaagaagugggaccuguucguggagagaagcaaggccuacagcaacugcuaccccuacgacgugcccgacuacgccagccugagaagccugguggccagcagcggcacccuggaguucaacaacgagagcuucaacuggaccggcgugacccagaacggcaccagcagcgccugcaucagaagaagcaacagcagcuucuucagcagacugaacuggcugacccaccugaacuucaaguaccccgcccugaacgugaccaugcccaacaacgagcaguucgacaagcuguacaucuggggcgugcaccaccccggcaccgacaaggaccagaucuuccuguacgcccagagcagcggcagaaucaccgugagcaccaagagaagccagcaggccgugauccccaacaucggcagcagacccagaaucagaaacauccccagcagaaucagcaucuacuggaccaucgugaagcccggcgacauccugcugaucaacagcaccggcaaccugaucgcccccagaggcuacuucaagaucagaagcggcagaagcagcaucaugagaagcgacgcccccaucggcaagugcaagagcgagugcaucacccccaacggcagcauccccaacgacaagcccuuccagaacgugaacagaaucaccuacggcgccugccccagauacgugaagcagagcacccugaagcuggccaccggcaugagaaacgugcccgagaagcagaccagaggcaucuucggcgccaucgccggcuucaucgagaacggcugggagggcaugguggacggcugguacggcuucagacaccagaacagcgagggcagaggccaggccgccgaccugaagagcacccaggccgccaucgaccagaucaacggcaagcugaacagacugaucggcaagaccaacgagaaguuccaccagaucgagaaggaguucagcgagguggagggcagaauccaggaccuggagaaguacguggaggacaccaagaucgaccuguggagcuacaacgccgagcugcugguggcccuggagaaccagcacaccaucgaccugaccgacagcgagaugaacaagcuguucgagaagaccaagaagcagcugagagagaacgccgaggacaugggcaacggcugcuucaagaucuaccacaagugcgacaacgccugcaucggcagcaucagaaacggcaccuacgaccacgacguguacagagacgaggcccugaacaacagauuccagaucaagggcguggagcugaagagcggcuacaaggacuggauccuguggaucagcuucgccaucagcugcuuccugcugugcguggcccugcugggcuucaucaugugggccugccagaagggcaacaucagaugcaacaucugcaucuga

SEQ ID NO: 172266 - RNA, 1701 nt, Artificial Sequence; identical to SEQ ID NO: 170054
  derived and/or modified CDS sequence (opt4) from hemagglutinin__InfluenzaA__AHZ40381

SEQ ID NO: 172267 - RNA, 1701 nt, Artificial Sequence; identical to SEQ ID NO: 169943
  derived and/or modified CDS sequence (opt4) from hemagglutinin__InfluenzaA__AHZ40393

SEQ ID NO: 172268 - RNA, 1701 nt, Artificial Sequence; identical to SEQ ID NO: 169943
  derived and/or modified CDS sequence (opt4) from hemagglutinin__InfluenzaA__AHZ40405

SEQ ID NO: 172269 - RNA, 1701 nt, Artificial Sequence; identical to SEQ ID NO: 169943
  derived and/or modified CDS sequence (opt4) from hemagglutinin__InfluenzaA__AHZ40417

SEQ ID NO: 172270 - RNA, 1701 nt, Artificial Sequence
  derived and/or modified CDS sequence (opt4) from hemagglutinin__InfluenzaA__AHZ40429
augaagaccaucaucgcccugagcuacauccugugccugguguucgcccaggagcugcccggcaacgacgacagcaccgccacccugugccugggccaccacgccgugcccaacggcaccaucgugaagaccaucaccaacgaccagaucgaggugaccaacgccaccgagcuggugcagagcagcagcaccggcgagaucugcaacagcccccaccagauccuggacggcgagaacugcacccugaucgacgcccugcugggcgacccccagugcgacggcuuccagaacaagaagugggaccuguucguggagagaagcaaggcccacagcaacugcuaccccuacgacgugcccgacuacgccagccugagaagccugguggccagcagcggcacccuggaguucaagaacgagagcuucaacuggaccggcgugacccagaacggcaccagcagcgccugcaucagaagaagcaacaacagcuucuucagcagacugaacuggcugacccaccugaacuucaaguaccccgcccugaacgugaccaugcccaacaacgagcaguucgacaagcuguacaucuggggcgugcaccaccccggcaccgacaaggaccagaucuuccuguacgcccaggccagcggcagaaucaccgugagcaccaagagaagccagcaggccgugauccccaacaucggcagcagacccagagugagaaacauccccagcagagugagcaucuacuggaccaucgugaagcccggcgacauccugcugaucaacagcaccggcaaccugaucgcccccagaggcuacuucaagaucagaagcggcaagagcagcaucaugagaagcgacgcccccaucggcaagugcaacagcgccugcaucacccccaacggcagcauccccaacgacaagcccuuccagaacgugaacagaaucaccuacggcgccugccccagauacgugaagcagaacacccugaagcuggccaccggcaugagaaacgugcccgagaagcagaccagaggcaucuucggcgccaucgccggcuucaucgagaacggcugggagggcaugguggacggcugguacggcuucagacaccagaacagcgagggcagaggccaggccgccgaccugaagagcacccaggccgccaucgaccagaucaacggcaagcugaacagacugaucggcaagaccaacgagaaguuccaccagaucgagaaggaguucagcgagguggagggcagaauccaggaccuggagaaguacguggaggacaccaagaucgaccuguggagcuacaacgccgagcugcugguggcccuggagaaccagcacaccaucgaccugaccgacagcgagaugaacaagcuguucgagaagaccaagaagcagcugagagagaacgccgaggacaugggcaacggcugcuucaagaucuaccacaagugcgacaacgccugcaucggcagcaucagaaacggcaccuacgaccacgacguguacagagacgaggcccugaacaacagauuccagaucaagggcguggagcugaagagcggcuacaaggacuggauccuguggaucagcuucgccaucagcugcuuccugcugugcguggcccugcugggcuucaucaugugggccugccagaagggcaacaucagaugcaacaucugcaucuga

SEQ ID NO: 172271 - RNA, 1701 nt, Artificial Sequence; identical to SEQ ID NO: 169943
  derived and/or modified CDS sequence (opt4) from hemagglutinin__InfluenzaA__AHZ40441

SEQ ID NO: 172272 - RNA, 1701 nt, Artificial Sequence; identical to SEQ ID NO: 170086
  derived and/or modified CDS sequence (opt4) from hemagglutinin__InfluenzaA__AHZ40453

SEQ ID NO: 172273 - RNA, 1701 nt, Artificial Sequence
  derived and/or modified CDS sequence (opt4) from hemagglutinin__InfluenzaA__AHZ40465
augaagaccaucaucgcccugagcuacauccugugccugguguucgcccagaagcugcccggcaacgacaacagcaccgccacccugugccugggccaccacgccgugcccaacggcaccaucgugaagaccaucaccaacgacagaaucgaggugaccaacgccaccgagcuggugcagaacagcagcaucggcgagaucugcgacagcccccaccagauccuggacggcgagaacugcacccugaucgacgcccugcugggcgacccccagugcgacggcuuccagaacaagaagugggaccuguucguggagagaagcaaggccuacagcaacugcuaccccuacgacaugcccgacuacgccagccugagaagccugguggccagcagcggcacccuggaguucaacaacgagagcuucaacuggaccggcgugacccagaacggcaccagcagcgccugcaucagaagaagcaacagcagcuucuucagcagacugaacuggcugacccaccugaacuucaaguaccccgcccugaacgugaccaugcccaacaacgagagauucgacaagcuguacaucuggggcgugcaccaccccggcaccgacaaggaccagaucuuccuguacgcccagagcagcggcagaaucaccgugagcaccaagagaagccagcaggccgugauccccaacaucggcagcagacccagaaucagaaacauccccagcagaaucagcaucuacuggaccaucgugaagcccggcgacauccugcugaucaacagcaccggcaaccugaucgcccccagaggcuacuucaagaucagaagcggcaagagcagcaucaugagaagcgacgcccccaucggcaagugcaagagcgagugcaucacccccaacggcagcauccccaacgacaagcccuuccagaacgugaacagaaucaccuacggcgccugccccagauacgugaagcagagcacccugaagcuggccaccggcaugagaaacgugcccgagaagcagaccagaggcaucuucggcgccaucgccggcuucaucgagaacggcugggagggcaugguggacggcugguacggcuucagacaccagaacagcgagggcagaggccaggccgccgaccugaagagcacccaggccgccaucgaccagaucaacggcaagcugaacagacugaucggcaagaccaacgagaaguuccaccagaucgagaaggaguucagcgagguggagggcagaauccaggaccuggagaaguacguggaggacaccaagaucgaccuguggagcuacaacgccgagcugcugguggcccuggagaaccagcacaccaucgaccugaccgacagcgagaugaacaagcuguucgagaagaccaagaagcagcugagagagaacgccgaggacaugggcaacggcugcuucaagaucuaccacaagugcgacaacgccugcaucggcagcaucagaaacggcaccuacgaccacaacguguacagagacgaggcccugaacaacagauuccagaucaagggcguggagcugaagagcggcuacaaggacuggauccuguggaucagcuucgccaucagcugcuuccugcugugcguggcccugcugggcuucaucaugugggccugccagaagggcaacaucagaugcaacaucugcaucuga

SEQ ID NO: 172274 - RNA, 1701 nt, Artificial Sequence; identical to SEQ ID NO: 169944
  derived and/or modified CDS sequence (opt4) from hemagglutinin__InfluenzaA__AHZ40477

SEQ ID NO: 172275 - RNA, 1701 nt, Artificial Sequence; identical to SEQ ID NO: 170120
  derived and/or modified CDS sequence (opt4) from hemagglutinin__InfluenzaA__AHZ40489

SEQ ID NO: 172276 - RNA, 1701 nt, Artificial Sequence; identical to SEQ ID NO: 169943
  derived and/or modified CDS sequence (opt4) from hemagglutinin__InfluenzaA__AHZ40500

SEQ ID NO: 172277 - RNA, 1701 nt, Artificial Sequence; identical to SEQ ID NO: 169943
  derived and/or modified CDS sequence (opt4) from hemagglutinin__InfluenzaA__AHZ40512

SEQ ID NO: 172278 - RNA, 1701 nt, Artificial Sequence
  derived and/or modified CDS sequence (opt4) from hemagglutinin__InfluenzaA__AHZ40524
augaagaccaucaucgcccugagcuacauccugugccugguguucgcccagaagcugcccggcaacgacaacagcaccgccacccugugccugggccaccacgccgugcccaacggcaccaucgugaagaccaucaccaacgacagaaucgaggugaccaacgccaccgagcuggugcagaacagcagcaucggcgagaucugcgacagcccccaccagauccuggacggcgagaacugcacccugaucgacgcccugcugggcgacccccagugcgacggcuuccagaacaagaagugggaccuguucguggagagaagcaaggccuacagcaacugcuaccccuacgacgugcccgacuacgccagccugagaagccugguggccagcagcggcacccuggaguucaacaacgagagcuucaacugggccggcgugacccagaacggcaccagcagcgccugcaucagaggcagcaacagcagcuucuucagcagacugaacuggcugacccaccugaacuucaaguaccccgcccugaacgugaccaugcccaacaacgagcaguucgacaagcuguacaucuggggcgugcaccaccccggcaccgacaaggaccagaucuuccuguacgcccagagcagcggcagaaucaccgugagcaccaagagaagccagcaggccgugauccccaacaucggcagcagacccagaaucagaaacauccccagcagaaucagcaucuacuggaccaucgugaagcccggcgacauccugcugaucaacagcaccggcaaccugaucgcccccagaggcuacuucaagaucagaagcggcaagagcagcaucaugagaagcgacgcccccaucggcaagugcaagagcgagugcaucacccccaacggcagcauccccaacgacaagcccuuccagaacgugaacagaaucaccuacggcgccugccccagauacgugaagcagagcacccugaagcuggccaccggcaugagaaacgugcccgagagacagaccagaggcaucuucggcgccaucgccggcuucaucgagaacggcugggagggcaugguggacggcugguacggcuucagacaccagaacagcgagggcagaggccaggccgccgaccugaagagcacccaggccgccaucgaccagaucaacggcaagcugaacagacugaucggcaagaccaacgagaaguuccaccagaucgagaaggaguucagcgagguggagggcagaauccaggaccuggagaaguacguggaggacaccaagaucgaccuguggagcuacaacgccgagcugcugguggcccuggagaaccagcacaccaucgaccugaccgacagcgagaugaacaagcuguucgagaagaccaagaagcagcugagagagaacgccgaggacaugggcaacggcugcuucaagaucuaccacaagugcgacaacgccugcaucggcagcaucagaaacggcaccuacgaccacgacguguacagagacgaggcccugaacaacagauuccagaucaagggcguggagcugaagagcggcuacaaggacuggauccuguggaucagcuucgccaucagcugcuuccugcugugcguggcccugcugggcuucaucaugugggccugccagaagggcaacaucagaugcaacaucugcaucuga

SEQ ID NO: 172279 - RNA, 1701 nt, Artificial Sequence; identical to SEQ ID NO: 171830
  derived and/or modified CDS sequence (opt4) from hemagglutinin__InfluenzaA__AHZ40536

SEQ ID NO: 172280 - RNA, 1701 nt, Artificial Sequence; identical to SEQ ID NO: 169943
  derived and/or modified CDS sequence (opt4) from hemagglutinin__InfluenzaA__AHZ40548

SEQ ID NO: 172281 - RNA, 1701 nt, Artificial Sequence; identical to SEQ ID NO: 169918
  derived and/or modified CDS sequence (opt4) from hemagglutinin__InfluenzaA__AHZ40572

SEQ ID NO: 172282 - RNA, 1701 nt, Artificial Sequence; identical to SEQ ID NO: 169918
  derived and/or modified CDS sequence (opt4) from hemagglutinin__InfluenzaA__AHZ40583

SEQ ID NO: 172283 - RNA, 1701 nt, Artificial Sequence
  derived and/or modified CDS sequence (opt4) from hemagglutinin__InfluenzaA__AHZ40595
augaaggccauccugguggugaugcuguacaccuucgccaccgccaacgccgacacccugugcaucggcuaccacgccaacaacagcaccgacaccguggacaccgugcuggagaagaacgugaccgugacccacagcgugaaccugcuggaggacaagcacgacggcaagcugugcaagcugagaggcguggccccccugcaccugggcaagugcaacaucgccggcuggauccugggcaaccccgagugcgagagccugagcaccgccagcagcuggagcuacaucguggagaccagcggcagcgacaacggcaccugcuaccccggcgacuucaucgacuacgaggagcugagagagcagcugagcagcgugagcagcuucgagagauucgagaucuuccccaagaccagcagcuggcccaaccacgacagcaacaagggcgugaccgccgccugcccccacgccggcgccaagggcuucuacaagaaccugaucuggcuggugaagaagggcaacagcuaccccaagcugagcaucagcuacaucaacgacaagggcaaggaggugcuggugcuguggggcauccaccaccccagcaccaccgccgaccagcagagccuguaccagaacgccgacaccuacguguucgugggcaccagcagauacagcaagaaguucaagcccgagaucgccaucagacccaaggugagagaccaggagggcagaaugaacuacuacuggacccugguggagcccggcgacaagaucaccuucgaggccaccggcaaccugguggugcccagauacgccuucgccaugaagagaaacgccggcagcggcaucaucaucagcgacacccccgugcacgacugcaacaccaccugccagacccccaagggcgccaucaacaccagccugcccuuccagaacauccaccccaucaccaucggcaagugccccaaguacgugaagagcaccaagcugagacuggccaccggccugagaaacgugcccagcauccagagcagaggccuguucggcgccaucgccggcuucaucgagggcggcuggaccggcaugguggacggcugguacggcuaccaccaccagaacgagcagggcagcggcuacgccgccgaccugaagagcacccagaacgccaucgacaagaucaccaacaaggugaacagcgugaucgagaagaugaacacccaguucaccgccgugggcaaggaguucaaccaccuggagaagagaaucgagaaccugaacaagaagguggacgacggcuuccuggacaucuggaccuacaacgccgagcugcuggugcugcuggagaacgagagaacccuggacuaccacgacagcaacgugaagaaccuguacgagaaggugagaaaccagcugaagaacaacgccaaggagaucggcaacggcugcuucgaguucuaccacaagugcgacaacaccugcauggagagcgugaagaacggcaccuacgacuaccccaaguacagcgaggaggccaagcugaacagagagaagaucgacggcgugaagcuggagagcaccagaaucuaccagauccuggccaucuacagcaccgccgccagcagccuggugcugguggugagccugggcgccaucagcuucuggaugugcagcaacggcagccugcagugcagaaucugcaucuga

SEQ ID NO: 172284 - RNA, 1701 nt, Artificial Sequence
  derived and/or modified CDS sequence (opt4) from hemagglutinin__InfluenzaA__AHZ40606
augaagaccaucaucgcccugagcuacauccugugccugguguucgcccagaagcugcccggcaacgacaacagcaccgccacccugugccugggccaccacgccgugcccaacggcaccaucgugaagaccaucaccaacgacagaaucgaggugaccaacgccaccgagcuggugcagaacagcagcaucggcgagaucugcgacagcccccaccagauccuggacggcgagaacugcacccugaucgacgcccugcugggcgacccccagugcgacggcuuccagaacaagaagugggaccuguucguggagagaagcaaggccuacagcaacugcuaccccuacgacgugcccgacuacgccagccugagaagccugguggccagcagcggcacccuggaguucaacaacgagagcuucaacuggaccggcgugacccagaacggcaccagcagcgccugcaucagaagaagcaacagcagcuucuucagcagacugaacuggcugacccaccugaacuucaaguaccccgcccugaacgugaccaugcccaacaacgagcaguucgacaagcuguacaucuggggcgugcaccaccccggcaccgacaaggaccagaucuuccuguacgcccagagcagcggcagaaucaccgugagcaccaagagaagccagcaggccgugauccccaacaucggcagcagacccagaaucagaaacauccccagcagaaucagcaucuacuggaccaucgugaagcccggcgacauccugcugaucaacagcaccggcaaccugaucgcccccagaggcuacuucaagaucagaagcggcaagagcagcaucaugagaagcgacgcccccaucggcaagugcaagagcgagugcaucacccccaacggcagcauccccaacgacaagcccuuccagaacgugaacagaaucaccuacggcgccugccccagauacgugaagcagagcacccugaagcuggccaccggcaugagaaacgugcccgagaagcagaccagaggcaucuucggcgccaucgccggcuucaucgagaacggcugggagggcaugauggacggcugguacggcuucagacaccagaacagcgagggcagaggccaggccgccgaccugaagagcacccaggccgccaucgaccagaucaacggcaagcugaacagacugaucggcaagaccaacgagaaguuccaccagaucgagaaggaguucagcgagguggagggcagaauccaggaccuggagaaguacguggaggacaccaagaucgaccuguggagcuacaacgccgagcugcugguggcccuggagaaccagcacaccaucgaccugaccgacagcgagaugaacaagcuguucgagaagaccaagaagcagcugagagagaacgccgaggacaugggcaacggcugcuucaagaucuaccacaagugcgacaacgccugcaucggcagcaucagaaacggcaccuacgaccacgacguguacagagacgaggcccugaacaacagauuccagaucaagggcguggagcugaagagcggcuacaaggacuggauccuguggaucagcuucgccaucagcugcuuccugcugugcguggcccugcugggcuucaucaugugggccugccagaagggcaacaucagaugcaacaucugcaucuga

SEQ ID NO: 172285 - RNA, 1701 nt, Artificial Sequence; identical to SEQ ID NO: 169943
  derived and/or modified CDS sequence (opt4) from hemagglutinin__InfluenzaA__AHZ40618

SEQ ID NO: 172286 - RNA, 1701 nt, Artificial Sequence; identical to SEQ ID NO: 169982
  derived and/or modified CDS sequence (opt4) from hemagglutinin__InfluenzaA__AHZ40626

SEQ ID NO: 172287 - RNA, 1701 nt, Artificial Sequence; identical to SEQ ID NO: 169943
  derived and/or modified CDS sequence (opt4) from hemagglutinin__InfluenzaA__AHZ40638

SEQ ID NO: 172288 - RNA, 1701 nt, Artificial Sequence; identical to SEQ ID NO: 169918
  derived and/or modified CDS sequence (opt4) from hemagglutinin__InfluenzaA__AHZ40650

SEQ ID NO: 172289 - RNA, 1701 nt, Artificial Sequence
  derived and/or modified CDS sequence (opt4) from hemagglutinin__InfluenzaA__AHZ40662
augaagaccaucaucgcccugagcuacauccugugccugguguucgcccaggagcugcccggcaacgacgacagcaccgccacccugugccugggccaccacgccgugcccaacggcaccaucgugaagaccaucaccaacgacagaaucgaggugaccaacgccaccgagcuggugcagagcagcagcaccggcgagaucugcaacagcccccaccagauccuggacggcgagaacugcacccugaucgacgcccugcugggcgacccccagugcgacggcuuccagaacaagaagugggaccuguucguggagagaagcaaggcccacagcaacugcuaccccuacgacgugcccgacuacgccagccugagaagccugguggccagcagcggcacccuggaguucaacaacgagagcuucaacuggaccggcgugacccagaacggcaccagcagcgccugcaucagaagaagcaacaacagcuucuucagcagacugaacuggcugacccaccugaacuucaaguaccccgcccugaacgugaccauccccaacaacgagcaguucgacaagcuguacaucuggggcgugcaccaccccggcaccgacaaggaccagaucuuccuguacgcccaggccagcggcagaaucaccgugagcaccaagagaagccagcagaccgugauccccaacaucggcagcagacccagagugagaaacauccccagcagagugagcaucuacuggaccaucgugaagcccggcgacauccugcugaucaacagcaccggcaaccugaucgcccccagaggcuacuucaagaucagaagcggcaagagcagcaucaugagaagcgacgcccccaucggcaagugcaacagcgccugcaucacccccaacggcagcauccccaacgacaagcccuuccagaacgugaacagaaucaccuacggcgccugccccagauacgugaagcagaacacccugaagcuggccaccggcaugagaaacgugcccgagaagcagaccagaggcaucuucggcgccaucgccggcuucaucgagaacggcugggagggcaugguggacggcugguacggcuucagacaccagaacagcgagggcagaggccaggccgccgaccugaagagcacccaggccgccaucgaccagaucaacggcaagcugaacagacugaucggcaagaccaacgagaaguuccaccagaucgagaaggaguucagcgagguggagggcagaauccaggaccuggagaaguacguggaggacaccaagaucgaccuguggagcuacaacgccgagcugcugguggcccuggagaaccagcacaccaucgaccugaccgacagcgagaugaacaagcuguucgagaagaccaagaagcagcugagagagaacgccgaggacaugggcaacggcugcuucaagaucuaccacaagugcgacaacgccugcaucggcagcaucagaaacggcaccuacgaccacgacguguacagagacgaggcccugaacaacagauuccagaucaagggcguggagcugaagagcggcuacaaggacuggauccuguggaucagcuucgccaucagcugcuuccugcugugcguggcccugcugggcuucaucaugugggccugccagaagggcaacaucagaugcaacaucugcaucuga

SEQ ID NO: 172290 - RNA, 1701 nt, Artificial Sequence; identical to SEQ ID NO: 169963
  derived and/or modified CDS sequence (opt4) from hemagglutinin__InfluenzaA__AHZ40674

SEQ ID NO: 172291 - RNA, 1701 nt, Artificial Sequence; identical to SEQ ID NO: 169943
  derived and/or modified CDS sequence (opt4) from hemagglutinin__InfluenzaA__AHZ40686

SEQ ID NO: 172292 - RNA, 1701 nt, Artificial Sequence; identical to SEQ ID NO: 169928
  derived and/or modified CDS sequence (opt4) from hemagglutinin__InfluenzaA__AHZ40698

SEQ ID NO: 172293 - RNA, 1701 nt, Artificial Sequence; identical to SEQ ID NO: 169928
  derived and/or modified CDS sequence (opt4) from hemagglutinin__InfluenzaA__AHZ40710

SEQ ID NO: 172294 - RNA, 1701 nt, Artificial Sequence; identical to SEQ ID NO: 170054
  derived and/or modified CDS sequence (opt4) from hemagglutinin__InfluenzaA__AHZ40722

SEQ ID NO: 172295 - RNA, 1701 nt, Artificial Sequence; identical to SEQ ID NO: 169951
  derived and/or modified CDS sequence (opt4) from hemagglutinin__InfluenzaA__AHZ40734

SEQ ID NO: 172296 - RNA, 1701 nt, Artificial Sequence; identical to SEQ ID NO: 170054
  derived and/or modified CDS sequence (opt4) from hemagglutinin__InfluenzaA__AHZ40746

SEQ ID NO: 172297 - RNA, 1701 nt, Artificial Sequence; identical to SEQ ID NO: 172247
  derived and/or modified CDS sequence (opt4) from hemagglutinin__InfluenzaA__AHZ40758

SEQ ID NO: 172298 - RNA, 1701 nt, Artificial Sequence; identical to SEQ ID NO: 162727
  derived and/or modified CDS sequence (opt4) from hemagglutinin__InfluenzaA__AHZ40782

SEQ ID NO: 172299 - RNA, 1701 nt, Artificial Sequence; identical to SEQ ID NO: 162727
  derived and/or modified CDS sequence (opt4) from hemagglutinin__InfluenzaA__AHZ40793

SEQ ID NO: 172300 - RNA, 1701 nt, Artificial Sequence; identical to SEQ ID NO: 162727
  derived and/or modified CDS sequence (opt4) from hemagglutinin__InfluenzaA__AHZ40804

SEQ ID NO: 172301 - RNA, 1701 nt, Artificial Sequence
  derived and/or modified CDS sequence (opt4) from hemagglutinin__InfluenzaA__AHZ40815
augaaggccauccugguggugcugcuguacaccuucgccaccgccaacgccgacacccugugcaucggcuaccacgccaacaacagcaccgacaccguggacaccgugcuggagaagaacgugaccgugacccacagcgugaaccugcuggaggacaagcacaacggcaagcugugcaagcugagaggcguggccccccugcaccugggcaagugcaacaucgccggcuggauccugggcaaccccgagugcgagagccugagcaccgccagcagcuggagcuacaucguggagacccccagcagcgacaacggcaccugcuaccccggcgacuucaucgacuacgaggagcugagagagcagcugagcagcgugagcagcuucgagagauucgagaucuuccccaagaccagcagcuggcccaaccacgacagcaacaagggcgugaccgccgccugcccccacgccggcgccaagagcuucuacaagaaccugaucuggcuggugaagaagggcaacagcuaccccaagcugagcaagagcuacaucaacgacaagggcaaggaggugcuggugcuguggggcauccaccaccccagcaccagcgccgaccagcagagccuguaccagaacgccgacgccuacguguucgugggcagcagcagauacagcaagaaguucaagcccgagaucgccaucagacccaaggugagagacagagagggcagaaugaacuacuacuggacccugguggagcccggcgacaagaucaccuucgaggccaccggcaaccugguggugcccagauacgccuucgccauggagagaaacgccggcagcggcaucaucaucagcgacacccccgugcacgacugcaacaccaccugccagacccccaagggcgccaucaacaccagccugcccuuccagaacauccaccccaucaccaucggcaagugccccaaguacgugaagagcaccaagcugagacuggccaccggccugagaaacauccccagcauccagagcagaggccuguucggcgccaucgccggcuucaucgagggcggcuggaccggcaugguggacggcugguacggcuaccaccaccagaacgagcagggcagcggcuacgccgccgaccugaagagcacccagaacgccaucgacgagaucaccaacaaggugaacagcgugaucgagaagaugaacacccaguucaccgccgugggcaaggaguucaaccaccuggagaagagaaucgagaaccugaacaagaagguggacgacggcuuccuggacaucuggaccuacaacgccgagcugcuggugcugcuggagaacgagagaacccuggacuaccacgacagcaacgugaagaaccuguacgagaaggugagaagccagcugaagaacaacgccaaggagaucggcaacggcugcuucgaguucuaccacaagugcgacaacaccugcauggagagcgugaagaacggcaccuacgacuaccccaaguacagcgaggaggccaagcugaacagagaggagaucgacggcgugaagcuggagagcaccagaaucuaccagauccuggccaucuacagcaccguggccagcagccuggugcugguggugagccugggcgccaucagcuucuggaugugcagcaacggcagccugcagugcagaaucugcaucuga

SEQ ID NO: 172302 - RNA, 1701 nt, Artificial Sequence
  derived and/or modified CDS sequence (opt4) from hemagglutinin__InfluenzaA__AHZ40826
augaaggccauccugguggugcugcuguacaccuucgccaccgccaacgccgacacccugugcaucggcuaccacgccaacaacagcaccgacaccguggacaccgugcuggagaagaacgugaccgugacccacagcgugaaccugcuggaggacaagcacaacggcaagcugugcaagcugagaggcguggccccccugcaccugggcaagugcaacaucgccggcuggauccugggcaaccccgagugcgagagccugagcaccgccagcagcuggagcuacaucguggagacccccagcagcgacaacggcaccugcuaccccggcgacuucaucgacuacgaggagcugagagagcagcugagcagcgugagcagcuucgagagauucgagaucuuccccaagaccagcagcuggcccaaccacgacagcaacaagggcgugaccgccgccugcccccacgccggcgccaagagcuucuacaagaaccugaucuggcuggugaagaagggcaacagcuaccccaagcugagcaagagcuacaucaacgacaagggcaaggaggugcuggugcuguggggcauccaccaccccagcaccagcgccgaccagcagagcaucuaccagaacgccgacgccuacguguucgugggcagcagcagauacagcaagaaguucaagcccgagaucgccaucagacccaaggugagagaccaggagggcagaaugaacuacuacuggacccugguggagcccggcgacaagaucaccuucgaggccaccggcaaccugguggugcccagauacgccuucgccauggagagaaacgccggcagcggcaucaucaucagcgacacccccgugcacgacugcaacaccaccugccagacccccaagggcgccaucaacaccagccugcccuuccagaacauccaccccaucaccaucggcaagugccccaaguacgugaagagcaccaagcugagacuggccaccggccugagaaacauccccagcauccagagcagaggccuguucggcgccaucgccggcuucaucgagggcggcuggaccggcaugguggacggcugguacggcuaccaccaccagaacgagcagggcagcggcuacgccgccgaccugaagagcacccagaacgccaucgacgagaucaccaacaaggugaacagcgugaucgagaagaugaacacccaguucaccgccgugggcaaggaguucaaccaccuggagaagagaaucgagaaccugaacaagaagguggacgacggcuuccuggacaucuggaccuacaacgccgagcugcuggugcugcuggagaacgagagaacccuggacuaccacgacagcaacgugaagaaccuguacgagaaggugagaagccagcugaagaacaacgccaaggagaucggcaacggcugcuucgaguucuaccacaagugcgacaacaccugcauggagagcgugaagaacggcaccuacgacuaccccaaguacagcgaggaggccaagcugaacagagaggagaucgacggcgugaagcuggagagcaccagaaucuaccagauccuggccaucuacagcaccguggccagcagccuggugcugguggugagccugggcgccaucagcuucuggaugugcagcaacggcagccugcagugcagaaucugcaucuga

SEQ ID NO: 172303 - RNA, 1701 nt, Artificial Sequence
  derived and/or modified CDS sequence (opt4) from hemagglutinin__InfluenzaA__AHZ40848
augaaggccauccugguggugcugcuguacaccuucgccaccgccaacgccgacacccugugcaucggcuaccacgccaacaacagcaccgacaccguggacaccgugcuggagaagaacgugaccgugacccacagcgugaaccugcuggaggacaagcacaacggcaagcugugcaagcugagaggcguggccccccugcaccugggcaagugcaacaucgccggcuggauccugggcaaccccgagugcgagagccugagcaccgccagcagcuggagcuacaucguggagacccccagcagcgacaacggcaccugcuaccccggcgacuucaucgacuacgaggagcugagagagcagcugagcagcgugagcagcuucgagagauucgagaucuuccccaagaccagcagcuggcccaaccacgacagcaacaagggcgugaccgccgccugcccccacgccggcgccaagagcuucuacaagaaccugaucuggcuggugaaggagggcaacagcuaccccaagcugagcaagagcuacaucaacgacaagggcaaggaggugcuggugcuguggggcauccaccaccccagcaccagcgccgagcagcagagccuguaccagaacgccgacgccuacguguucgugggcagcagcagauacagcaagaaguucaagcccgagaucgccgccagacccaaggugagaggccaggccggcagaaugaacuacuacuggacccugguggagcccggcgacaagaucaccuucgaggccaccggcaaccugguggugcccagauacgccuucgccauggagagaaacgccggcagcggcaucaucaucagcgacacccccgugcacgacugcaacaccaccugccagacccccaagggcgccaucaacaccagccugcccuuccagaacauccaccccaucaccaucggcaagugccccaaguacgugaagagcaccaagcugagacuggccaccggccugagaaacauccccagcauccagagcagaggccuguucggcgccaucgccggcuucaucgagggcggcuggaccggcaugguggacggcugguacggcuaccaccaccagaacgagcagggcagcggcuacgccgccgaccugaagagcacccagaacgccaucgacgagaucaccaacaaggugaacagcgugaucgagaagaugaacacccaguucaccgccgugggcaaggaguucaaccaccuggagaagagaaucgagaaccugaacaagaagguggacgacggcuuccuggacaucuggaccuacaacgccgagcugcuggugcugcuggagaacgagagaacccuggacuaccacgacagcaacgugaagaaccuguacgagaaggugagaagccagcugaagaacaacgccaaggagaucggcaacggcugcuucgaguucuaccacaagugcgacaacaccugcauggagagcgugaagaacggcaccuacgacuaccccaaguacagcgaggaggccaagcugaacagagaggagaucgacggcgugaagcuggagagcaccagaaucuaccagauccuggccaucuacagcaccguggccagcagccuggugcugguggugagccugggcgccaucagcuucuggaugugcagcaacggcagccugcagugcagaaucugcaucuga

SEQ ID NO: 172304 - RNA, 1701 nt, Artificial Sequence
  derived and/or modified CDS sequence (opt4) from hemagglutinin__InfluenzaA__AHZ40881
augaaggccauccugguggugcugcuguacaccuucgccaccgccaacgccgacacccugugcaucggcuaccacgccaacaacagcaccgacaccguggacaccgugcuggagaagaacgugaccgugacccacagcgugaaccugcuggaggacaagcacaacggcaagcugugcaagcugagaggcguggccccccugcaccugggcaagugcaacaucgccggcuggauccugggcaaccccgagugcgagagccugagcaccgccagcagcuggagcuacaucguggagacccccagcagcgacaacggcaccugcuaccccggcgacuucaucgacuacgaggagcugagagagcagcugagcagcgugagcagcuucgagagauucgagaucuuccccaagaccagcagcuggcccaaccacgacagcaacaagggcgugaccgccgccugcccccacgccggcgccaagagcuucuacaagaaccugaucuggcuggugaagaagggcaacagcuaccccaagcugagcaagagcuacaucaacgacaagggcaaggaggugcuggugcuguggggcauccaccaccccagcaccagcgccgagcagcagagccuguaccagaacgccgacgccuacguguucgugggcagcagcagauacagcaagaaguucaagcccgagaucgccgccagacccaaggugagaggccaggccggcagaaugaacuacuacuggacccugguggagcccggcgacaagaucaccuucgaggccaccggcaaccugguggugcccagauacgccuucgccauggagagaaacgccggcagcggcaucaucaucagcgacacccccgugcacgacugcaacaccaccugccagacccccaagggcgccaucaacaccagccugcccuuccagaacauccaccccaucaccaucggcaagugccccaaguacgugaagagcaccaagcugagacuggccaccggccugagaaacauccccagcauccagagcagaggccuguucggcgccaucgccggcuucaucgagggcggcuggaccggcaugguggacggcugguacggcuaccaccaccagaacgagcagggcagcggcuacgccgccgaccugaagagcacccagaacgccaucgacgagaucaccaacaaggugaacagcgugaucgagaagaugaacacccaguucaccgccgugggcaaggaguucaaccaccuggagaagagaaucgagaaccugaacaagaagguggacgacggcuuccuggacaucuggaccuacaacgccgagcugcuggugcugcuggagaacgagagaacccuggacuaccacgacagcaacgugaagaaccuguacgagaaggugagaagccagcugaagaacaacgccaaggagaucggcaacggcugcuucgaguucuaccacaagugcgacaacaccugcauggagagcgugaagaacggcaccuacgacuaccccaaguacagcgaggaggccaagcugaacagagaggagaucgacggcgugaagcuggagagcaccagaaucuaccagauccuggccaucuacagcaccguggccagcagccuggugcugguggugagccugggcgccaucagcuucuggaugugcagcaacggcagccugcagugcagaaucugcaucuga

SEQ ID NO: 172305 - RNA, 1701 nt, Artificial Sequence; identical to SEQ ID NO: 172304
  derived and/or modified CDS sequence (opt4) from hemagglutinin__InfluenzaA__AHZ40892

SEQ ID NO: 172306 - RNA, 1701 nt, Artificial Sequence; identical to SEQ ID NO: 172303
  derived and/or modified CDS sequence (opt4) from hemagglutinin__InfluenzaA__AHZ40914

SEQ ID NO: 172307 - RNA, 1701 nt, Artificial Sequence; identical to SEQ ID NO: 172304
  derived and/or modified CDS sequence (opt4) from hemagglutinin__InfluenzaA__AHZ40925

SEQ ID NO: 172308 - RNA, 1701 nt, Artificial Sequence
  derived and/or modified CDS sequence (opt4) from hemagglutinin__InfluenzaA__AHZ40936
augaaggccauccugguggugcugcuguacaccuucgccaccgccaacgccgacacccugugcaucggcuaccacgccaacaacagcaccgacaccguggacaccgugcuggagaagaacgugaccgugacccacagcgugaaccugcuggaggacaagcacaacggcaagcugugcaagcugagaggcguggccccccugcaccugggcaagugcaacaucgccggcuggauccugggcaaccccgagugcgagagccugagcaccgccagcagcuggagcuacaucguggagacccccagcagcgacaacggcaccugcuaccccggcgacuucaucgacuacgaggagcugagagagcagcugagcagcgugagcagcuucgagagauucgagaucuuccccaagaccagcagcuggcccaaccacgacagcaacaagggcgugaccgccgccugcccccacgccggcgccaagagcuucuacaagaaccugaucuggcuggugaagaagggcaacagcuaccccaagcugagcaagagcuacaucaacgacaagggcaaggaggugcuggugcuguggggcauccaccaccccagcaccagcgccgagcagcagagccuguaccagaacgccgacgccuacguguucgugggcagcagcagauacagcaagaaguucaagcccgagaucgccgccagacccaaggugagagaccaggccggcagaaugaacuacuacuggacccugguggagcccggcgacaagaucaccuucgaggccaccggcaaccugguggugcccagauacgccuucgccauggagagaaacgccggcagcggcaucaucaucagcgacacccccgugcacgacugcaacaccaccugccagacccccaagggcgccaucaacaccagccugcccuuccagaacauccaccccaucaccaucggcaagugccccaaguacgugaagagcaccaagcugagacuggccaccggccugagaaacauccccagcauccagagcagaggccuguucggcgccaucgccggcuucaucgagggcggcuggaccggcaugguggacggcugguacggcuaccaccaccagaacgagcagggcagcggcuacgccgccgaccugaagagcacccagaacgccaucgacgagaucaccaacaaggugaacagcgugaucgagaagaugaacacccaguucaccgccgugggcaaggaguucaaccaccuggagaagagaaucgagaaccugaacaagaagguggacgacggcuuccuggacaucuggaccuacaacgccgagcugcuggugcugcuggagaacgagagaacccuggacuaccacgacagcaacgugaagaaccuguacgagaaggugagaagccagcugaagaacaacgccaaggagaucggcaacggcugcuucgaguucuaccacaagugcgacaacaccugcauggagagcgugaagaacggcaccuacgacuaccccaaguacagcgaggaggccaagcugaacagagaggagaucgacggcgugaagcuggagagcaccagaaucuaccagauccuggccaucuacagcaccguggccagcagccuggugcugguggugagccugggcgccaucagcuucuggaugugcagcaacggcagccugcagugcagaaucugcaucuga

SEQ ID NO: 172309 - RNA, 1701 nt, Artificial Sequence; identical to SEQ ID NO: 172303
  derived and/or modified CDS sequence (opt4) from hemagglutinin__InfluenzaA__AHZ40947

SEQ ID NO: 172310 - RNA, 1701 nt, Artificial Sequence; identical to SEQ ID NO: 172304
  derived and/or modified CDS sequence (opt4) from hemagglutinin__InfluenzaA__AHZ40958

SEQ ID NO: 172311 - RNA, 1701 nt, Artificial Sequence; identical to SEQ ID NO: 172308
  derived and/or modified CDS sequence (opt4) from hemagglutinin__InfluenzaA__AHZ40969

SEQ ID NO: 172312 - RNA, 1701 nt, Artificial Sequence; identical to SEQ ID NO: 172308
  derived and/or modified CDS sequence (opt4) from hemagglutinin__InfluenzaA__AHZ40980

SEQ ID NO: 172313 - RNA, 1701 nt, Artificial Sequence; identical to SEQ ID NO: 172308
  derived and/or modified CDS sequence (opt4) from hemagglutinin__InfluenzaA__AHZ40991

SEQ ID NO: 172314 - RNA, 1701 nt, Artificial Sequence; identical to SEQ ID NO: 172308
  derived and/or modified CDS sequence (opt4) from hemagglutinin__InfluenzaA__AHZ41002

SEQ ID NO: 172315 - RNA, 1701 nt, Artificial Sequence; identical to SEQ ID NO: 172308
  derived and/or modified CDS sequence (opt4) from hemagglutinin__InfluenzaA__AHZ41013

SEQ ID NO: 172316 - RNA, 1701 nt, Artificial Sequence; identical to SEQ ID NO: 172304
  derived and/or modified CDS sequence (opt4) from hemagglutinin__InfluenzaA__AHZ41024

SEQ ID NO: 172317 - RNA, 1701 nt, Artificial Sequence; identical to SEQ ID NO: 172304
  derived and/or modified CDS sequence (opt4) from hemagglutinin__InfluenzaA__AHZ41035

SEQ ID NO: 172318 - RNA, 1701 nt, Artificial Sequence; identical to SEQ ID NO: 172304
  derived and/or modified CDS sequence (opt4) from hemagglutinin__InfluenzaA__AHZ41046

SEQ ID NO: 172319 - RNA, 1701 nt, Artificial Sequence; identical to SEQ ID NO: 172304
  derived and/or modified CDS sequence (opt4) from hemagglutinin__InfluenzaA__AHZ41057

SEQ ID NO: 172320 - RNA, 1701 nt, Artificial Sequence; identical to SEQ ID NO: 172304
  derived and/or modified CDS sequence (opt4) from hemagglutinin__InfluenzaA__AHZ41068

SEQ ID NO: 172321 - RNA, 1701 nt, Artificial Sequence; identical to SEQ ID NO: 172308
  derived and/or modified CDS sequence (opt4) from hemagglutinin__InfluenzaA__AHZ41079

SEQ ID NO: 172322 - RNA, 1701 nt, Artificial Sequence; identical to SEQ ID NO: 172304
  derived and/or modified CDS sequence (opt4) from hemagglutinin__InfluenzaA__AHZ41090

SEQ ID NO: 172323 - RNA, 1701 nt, Artificial Sequence; identical to SEQ ID NO: 172308
  derived and/or modified CDS sequence (opt4) from hemagglutinin__InfluenzaA__AHZ41101

SEQ ID NO: 172324 - RNA, 1701 nt, Artificial Sequence; identical to SEQ ID NO: 172304
  derived and/or modified CDS sequence (opt4) from hemagglutinin__InfluenzaA__AHZ41112

SEQ ID NO: 172325 - RNA, 1701 nt, Artificial Sequence; identical to SEQ ID NO: 172304
  derived and/or modified CDS sequence (opt4) from hemagglutinin__InfluenzaA__AHZ41123

SEQ ID NO: 172326 - RNA, 1701 nt, Artificial Sequence; identical to SEQ ID NO: 172304
  derived and/or modified CDS sequence (opt4) from hemagglutinin__InfluenzaA__AHZ41134

SEQ ID NO: 172327 - RNA, 1701 nt, Artificial Sequence; identical to SEQ ID NO: 172304
  derived and/or modified CDS sequence (opt4) from hemagglutinin__InfluenzaA__AHZ41145

SEQ ID NO: 172328 - RNA, 1701 nt, Artificial Sequence; identical to SEQ ID NO: 172304
  derived and/or modified CDS sequence (opt4) from hemagglutinin__InfluenzaA__AHZ41156

SEQ ID NO: 172329 - RNA, 1701 nt, Artificial Sequence; identical to SEQ ID NO: 172304
  derived and/or modified CDS sequence (opt4) from hemagglutinin__InfluenzaA__AHZ41167

SEQ ID NO: 172330 - RNA, 1701 nt, Artificial Sequence; identical to SEQ ID NO: 172304
  derived and/or modified CDS sequence (opt4) from hemagglutinin__InfluenzaA__AHZ41178

SEQ ID NO: 172331 - RNA, 1701 nt, Artificial Sequence; identical to SEQ ID NO: 172304
  derived and/or modified CDS sequence (opt4) from hemagglutinin__InfluenzaA__AHZ41189

SEQ ID NO: 172332 - RNA, 1701 nt, Artificial Sequence; identical to SEQ ID NO: 172303
  derived and/or modified CDS sequence (opt4) from hemagglutinin__InfluenzaA__AHZ41246

SEQ ID NO: 172333 - RNA, 1701 nt, Artificial Sequence; identical to SEQ ID NO: 172308
  derived and/or modified CDS sequence (opt4) from hemagglutinin__InfluenzaA__AHZ41263

SEQ ID NO: 172334 - RNA, 1701 nt, Artificial Sequence; identical to SEQ ID NO: 172304
  derived and/or modified CDS sequence (opt4) from hemagglutinin__InfluenzaA__AHZ41281

SEQ ID NO: 172335 - RNA, 1701 nt, Artificial Sequence; identical to SEQ ID NO: 172304
  derived and/or modified CDS sequence (opt4) from hemagglutinin__InfluenzaA__AHZ41292

SEQ ID NO: 172336 - RNA, 1701 nt, Artificial Sequence; identical to SEQ ID NO: 172303
  derived and/or modified CDS sequence (opt4) from hemagglutinin__InfluenzaA__AHZ41303

SEQ ID NO: 172337 - RNA, 1701 nt, Artificial Sequence; identical to SEQ ID NO: 172303
  derived and/or modified CDS sequence (opt4) from hemagglutinin__InfluenzaA__AHZ41314

SEQ ID NO: 172338 - RNA, 1701 nt, Artificial Sequence; identical to SEQ ID NO: 172303
  derived and/or modified CDS sequence (opt4) from hemagglutinin__InfluenzaA__AHZ41325

SEQ ID NO: 172339 - RNA, 1701 nt, Artificial Sequence; identical to SEQ ID NO: 172303
  derived and/or modified CDS sequence (opt4) from hemagglutinin__InfluenzaA__AHZ41336

SEQ ID NO: 172340 - RNA, 1701 nt, Artificial Sequence; identical to SEQ ID NO: 172303
  derived and/or modified CDS sequence (opt4) from hemagglutinin__InfluenzaA__AHZ41347

SEQ ID NO: 172341 - RNA, 1701 nt, Artificial Sequence; identical to SEQ ID NO: 172304
  derived and/or modified CDS sequence (opt4) from hemagglutinin__InfluenzaA__AHZ41358

SEQ ID NO: 172342 - RNA, 1701 nt, Artificial Sequence; identical to SEQ ID NO: 172304
  derived and/or modified CDS sequence (opt4) from hemagglutinin__InfluenzaA__AHZ41366

SEQ ID NO: 172343 - RNA, 1701 nt, Artificial Sequence; identical to SEQ ID NO: 172308
  derived and/or modified CDS sequence (opt4) from hemagglutinin__InfluenzaA__AHZ41377

SEQ ID NO: 172344 - RNA, 1701 nt, Artificial Sequence; identical to SEQ ID NO: 172304
  derived and/or modified CDS sequence (opt4) from hemagglutinin__InfluenzaA__AHZ41388

SEQ ID NO: 172345 - RNA, 1701 nt, Artificial Sequence; identical to SEQ ID NO: 172308
  derived and/or modified CDS sequence (opt4) from hemagglutinin__InfluenzaA__AHZ41410

SEQ ID NO: 172346 - RNA, 1701 nt, Artificial Sequence; identical to SEQ ID NO: 172304
  derived and/or modified CDS sequence (opt4) from hemagglutinin__InfluenzaA__AHZ41432

SEQ ID NO: 172347 - RNA, 1701 nt, Artificial Sequence
  derived and/or modified CDS sequence (opt4) from hemagglutinin__InfluenzaA__AHZ41441
augaaggccauccugguggugcugcuguacaccuucgccaccgccaacgccgacacccugugcaucggcuaccacgccaacaacagcaccgacaccguggacaccgugcuggagaagaacgugaccgugacccacagcgugaaccugcuggaggacaagcacaacggcaagcugugcaagcugagaggcguggccccccugcaccugggcaagugcaacaucgccggcuggauccugggcaaccccgagugcgagagccugagcaccgccagcagcuggagcuacaucguggagacccccagcagcgacaacggcaccugcuaccccggcgacuucaucgacuacgaggagcugagagagcagcugagcagcgugagcagcuucgagagauucgagaucuuccccaagaccagcagcuggcccaaccacgacagcaacaagggcgugaccgccgccugcccccacgccggcgccaagagcuucuacaagaaccugaucuggcuggugaaggagggcaacagcuaccccaagcugagcaagagcuacaucaacgacaagggcaaggaggugcuggugcuguggggcauccaccaccccagcaccagcgccgagcagcagagccuguaccagaacgccgacgccuacguguucgugggcagcagcagauacagcaagaaguucaagcccgagaucgccgccagacccaaggugagagaccaggccggcagaaugaacuacuacuggacccugguggagcccggcgacaagaucaccuucgaggccaccggcaaccugguggugcccagauacgccuucgccauggagagaaacgccggcagcggcaucaucaucagcgacacccccgugcacgacugcaacaccaccugccagacccccaagggcgccaucaacaccagccugcccuuccagaacauccaccccaucaccaucggcaagugccccaaguacgugaagagcaccaagcugagacuggccaccggccugagaaacauccccagcauccagagcagaggccuguucggcgccaucgccggcuucaucgagggcggcuggaccggcaugguggacggcugguacggcuaccaccaccagaacgagcagggcagcggcuacgccgccgaccugaagagcacccagaacgccaucgacgagaucaccaacaaggugaacagcgugaucgagaagaugaacacccaguucaccgccgugggcaaggaguucaaccaccuggagaagagaaucgagaaccugaacaagaagguggacgacggcuuccuggacaucuggaccuacaacgccgagcugcuggugcugcuggagaacgagagaacccuggacuaccacgacagcaacgugaagaaccuguacgagaaggugagaagccagcugaagaacaacgccaaggagaucggcaacggcugcuucgaguucuaccacaagugcgacaacaccugcauggagagcgugaagaacggcaccuacgacuaccccaaguacagcgaggaggccaagcugaacagagaggagaucgacggcgugaagcuggagagcaccagaaucuaccagauccuggccaucuacagcaccguggccagcagccuggugcugguggugagccugggcgccaucagcuucuggaugugcagcaacggcagccugcagugcagaaucugcaucuga

SEQ ID NO: 172348 - RNA, 1701 nt, Artificial Sequence; identical to SEQ ID NO: 172303
  derived and/or modified CDS sequence (opt4) from hemagglutinin__InfluenzaA__AHZ41452

SEQ ID NO: 172349 - RNA, 1701 nt, Artificial Sequence
  derived and/or modified CDS sequence (opt4) from hemagglutinin__InfluenzaA__AHZ41463
augaaggccauccugguggugcugcuguacaccuucgccaccgccaacgccgacacccugugcaucggcuaccacgccaacaacagcaccgacaccguguacaccgugcuggagaagaacgugaccgugacccacagcgugaaccugcuggaggacaagcacaacggcaagcugugcaagcugagaggcguggccccccugcaccugggcaagugcaacaucgccggcuggauccugggcaaccccgagugcgagagccugagcaccgccagcagcuggagcuacaucguggagacccccagcagcgacaacggcaccugcuaccccggcgacuucaucgacuacgaggagcugagagagcagcugagcagcgugagcagcuucgagagauucgagaucuuccccaagaccagcagcuggcccaaccacgacagcaacaagggcgugaccgccgccugcccccacgccggcgccaagagcuucuacaagaaccugaucuggcuggugaagaagggcaacagcuaccccaagcugagcaagagcuacaucaacgacaagggcaaggaggugcuggugcuguggggcauccaccaccccagcaccagcgccgagcagcagagccuguaccagaacgccgacgccuacguguucgugggcagcagcagauacagcaagaaguucaagcccgagaucgccgccagacccaaggugagaggccaggccggcagaaugaacuacuacuggacccugguggagcccggcgacaagaucaccuucgaggccaccggcaaccugguggugcccagauacgccuucgccauggagagaaacgccggcagcggcaucaucaucagcgacacccccgugcacgacugcaacaccaccugccagacccccaagggcgccaucaacaccagccugcccuuccagaacauccaccccaucaccaucggcaagugccccaaguacgugaagagcaccaagcugagacuggccaccggccugagaaacauccccagcauccagagcagaggccuguucggcgccaucgccggcuucaucgagggcggcuggaccggcaugguggacggcugguacggcuaccaccaccagaacgagcagggcagcggcuacgccgccgaccugaagagcacccagaacgccaucgacgagaucaccaacaaggugaacagcgugaucgagaagaugaacacccaguucaccgccgugggcaaggaguucaaccaccuggagaagagaaucgagaaccugaacaagaagguggacgacggcuuccuggacaucuggaccuacaacgccgagcugcuggugcugcuggagaacgagagaacccuggacuaccacgacagcaacgugaagaaccuguacgagaaggugagaagccagcugaagaacaacgccaaggagaucggcaacggcugcuucgaguucuaccacaagugcgacaacaccugcauggagagcgugaagaacggcaccuacgacuaccccaaguacagcgaggaggccaagcugaacagagaggagaucgacggcgugaagcuggagagcaccagaaucuaccagauccuggccaucuacagcaccguggccagcagccuggugcugguggugagccugggcgccaucagcuucuggaugugcagcaacggcagccugcagugcagaaucugcaucuga

SEQ ID NO: 172350 - RNA, 1701 nt, Artificial Sequence; identical to SEQ ID NO: 172303
  derived and/or modified CDS sequence (opt4) from hemagglutinin__InfluenzaA__AHZ41473

SEQ ID NO: 172351 - RNA, 1701 nt, Artificial Sequence; identical to SEQ ID NO: 172303
  derived and/or modified CDS sequence (opt4) from hemagglutinin__InfluenzaA__AHZ41484

SEQ ID NO: 172352 - RNA, 1701 nt, Artificial Sequence; identical to SEQ ID NO: 172308
  derived and/or modified CDS sequence (opt4) from hemagglutinin__InfluenzaA__AHZ41495

SEQ ID NO: 172353 - RNA, 1701 nt, Artificial Sequence; identical to SEQ ID NO: 172303
  derived and/or modified CDS sequence (opt4) from hemagglutinin__InfluenzaA__AHZ41506

SEQ ID NO: 172354 - RNA, 1701 nt, Artificial Sequence
  derived and/or modified CDS sequence (opt4) from hemagglutinin__InfluenzaA__AHZ41517
augaaggccauccugguggugcugcuguacaccuucgccaccgccaacgccgacacccugugcaucggcuaccacgccaacaacagcaccgacaccguggacaccgugcuggagaagaacgugaccgugacccacagcgugaaccugcuggaggacaagcacaacggcaagcugugcaagcugagaggcguggccccccugcaccugggcaagugcaacaucgccggcuggauccugggcaaccccgagugcgagagccugagcaccgccagcagcuggagcuacaucguggagacccccagcagcgacaacggcaccugcuaccccggcgacuucaucgacuacgaggagcugagagagcagcugagcagcgugagcagcuucgagagauucgagaucuuccccaagaccagcagcuggcccaaccacgacagcaacaagggcgugaccgccgccugcccccacgccggcgccaagagcuucuacaagaaccugaucuggcuggugaagaagggcaacagcuaccccaagcugagcgagagcuacaucaacgacaagggcaaggaggugcuggugcuguggggcauccaccaccccagcaccagcgccgagcagcagagccuguaccagaacgccgacgccuacguguucgugggcagcagcagauacagcaagaaguucaagcccgagaucgccgccagacccaaggugagaggccaggccggcagaaugaacuacuacuggacccugguggagcccggcgacaagaucaccuucgaggccaccggcaaccugguggugcccagauacgccuucgccauggagagaaacgccggcagcggcaucaucaucagcgacacccccgugcacgacugcaacaccaccugccagacccccaagggcgccaucaacaccagccugcccuuccagaacauccaccccaucaccaucggcaagugccccaaguacgugaagagcaccaagcugagacuggccaccggccugagaaacauccccagcauccagagcagaggccuguucggcgccaucgccggcuucaucgagggcggcuggaccggcaugguggacggcugguacggcuaccaccaccagaacgagcagggcagcggcuacgccgccgaccugaagagcacccagaacgccaucgacgagaucaccaacaaggugaacagcgugaucgagaagaugaacacccaguucaccgccgugggcaaggaguucaaccaccuggagaagagaaucgagaaccugaacaagaagguggacgacggcuuccuggacaucuggaccuacaacgccgagcugcuggugcugcuggagaacgagagaacccuggacuaccacgacagcaacgugaagaaccuguacgagaaggugagaagccagcugaagaacaacgccaaggagaucggcaacggcugcuucgaguucuaccacaagugcgacaacaccugcauggagagcgugaagaacggcaccuacgacuaccccaaguacagcgaggaggccaagcugaacagagaggagaucgacggcgugaagcuggagagcaccagaaucuaccagauccuggccaucuacagcaccguggccagcagccuggugcugguggugagccugggcgccaucagcuucuggaugugcagcaacggcagccugcagugcagaaucugcaucuga

SEQ ID NO: 172355 - RNA, 1701 nt, Artificial Sequence
  derived and/or modified CDS sequence (opt4) from hemagglutinin__InfluenzaA__AHZ41528
augaaggccauccugguggugcugcuguacaccuucgccaccgccaacgccgacacccugugcaucggcuaccacgccaacaacagcaccgacaccguggacaccgugcuggagaagaacgugaccgugacccacagcgugaaccugcuggaggacaagcacaacggcaagcugugcaagcugagaggcguggccccccugcaccugggcaagugcaacaucgccggcuggauccugggcaaccccgagugcgagagccugagcaccgccagcagcuggagcuacaucguggagacccccagcagcgacaacggcaccugcuaccccggcgacuucaucgacuacgaggagcugagagagcagcugagcagcgugagcagcuucgagagauucgagaucuuccccaagaccagcagcuggcccaaccacgacagcaacaagggcgugaccgccgccugcccccacgccggcgccaagagcuucuacaagaaccugaucuggcuggugaagaagggcaacagcuaccccaagcugagcgagagcuacaucaacgacaagggcaaggaggugcuggugcuguggggcauccaccaccccagcaccagcgccgaccagcagagccuguaccagaacgccgacgccuacguguucgugggcagcagcagauacagcaagaaguucaagcccgagaucgccgccagacccaaggugagaggccaggccggcagaaugaacuacuacuggacccugguggagcccggcgacaagaucaccuucgaggccaccggcaaccugguggugcccagauacgccuucgccauggagagaaacgccggcagcggcaucaucaucagcgacacccccgugcacgacugcaacaccaccugccagacccccaagggcgccaucaacaccagccugcccuuccagaacauccaccccaucaccaucggcaagugccccaaguacgugaagagcaccaagcugagacuggccaccggccugagaaacauccccagcauccagagcagaggccuguucggcgccaucgccggcuucaucgagggcggcuggaccggcaugguggacggcugguacggcuaccaccaccagaacgagcagggcagcggcuacgccgccgaccugaagagcacccagaacgccaucgacgagaucaccaacaaggugaacagcgugaucgagaagaugaacacccaguucaccgccgugggcaaggaguucaaccaccuggagaagagaaucgagaaccugaacaagaagguggacgacggcuuccuggacaucuggaccuacaacgccgagcugcuggugcugcuggagaacgagagaacccuggacuaccacgacagcaacgugaagaaccuguacgagaaggugagaagccagcugaagaacaacgccaaggagaucggcaacggcugcuucgaguucuaccacaagugcgacaacaccugcauggagagcgugaagaacggcaccuacgacuaccccaaguacagcgaggaggccaagcugaacagagaggagaucgacggcgugaagcuggagagcaccagaaucuaccagauccuggccaucuacagcaccguggccagcagccuggugcugguggugagccugggcgccaucagcuucuggaugugcagcaacggcagccugcagugcagaaucugcaucuga

SEQ ID NO: 172356 - RNA, 1701 nt, Artificial Sequence; identical to SEQ ID NO: 172308
  derived and/or modified CDS sequence (opt4) from hemagglutinin__InfluenzaA__AHZ41539

SEQ ID NO: 172357 - RNA, 1701 nt, Artificial Sequence; identical to SEQ ID NO: 172303
  derived and/or modified CDS sequence (opt4) from hemagglutinin__InfluenzaA__AHZ41550

SEQ ID NO: 172358 - RNA, 1701 nt, Artificial Sequence; identical to SEQ ID NO: 172304
  derived and/or modified CDS sequence (opt4) from hemagglutinin__InfluenzaA__AHZ41561

SEQ ID NO: 172359 - RNA, 1701 nt, Artificial Sequence
  derived and/or modified CDS sequence (opt4) from hemagglutinin__InfluenzaA__AHZ41572
augaaggccauccugguggugcugcuguacaccuucgccaccgccaacgccgacacccugugcaucggcuaccacgccaacaacagcaccgacaccguggacaccgugcuggagaagaacgugaccgugacccacagcgugaaccugcuggaggacaagcacaacggcaagcugugcaagcugagaggcguggccccccugcaccugggcaagugcaacaucgccggcuggauccugggcaaccccgagugcgagagccugagcaccgccagcagcuggagcuacaucguggagacccccagcagcgacaacggcaccugcuaccccggcgacuucaucgacuacgaggagcugagagagcagcugagcagcgugagcagcuucgagagauucgagaucuuccccaagaccagcagcuggcccaaccacgacagcaacaagggcgugaccgccgccugcccccacgccggcgccaagagcuucuacaagaaccugaucuggcuggugaagaagggcaacagcuaccccaagcugagcaagagcuacaucaacgacaagggcaaggaggugcuggugcuguggggcauccaccaccccagcaccagcgccgagcagcagagccuguaccagaacgccgacgccuacguguucgugggcagcagcagauacagcaagaaguucaagcccgagaucgccgccagacccaaggugagaggccaggccggcagaaugaacuacuacuggacccugguggagcccggcgacgagaucaccuucgaggccaccggcaaccugguggugcccagauacgccuucgccauggagagaaacgccggcagcggcaucaucaucagcgacacccccgugcacgacugcaacaccaccugccagacccccaagggcgccaucaacaccagccugcccuuccagaacauccaccccaucaccaucggcaagugccccaaguacgugaagagcaccaagcugagacuggccaccggccugagaaacauccccagcauccagagcagaggccuguucggcgccaucgccggcuucaucgagggcggcuggaccggcaugguggacggcugguacggcuaccaccaccagaacgagcagggcagcggcuacgccgccgaccugaagagcacccagaacgccaucgacgagaucaccaacaaggugaacagcgugaucgagaagaugaacacccaguucaccgccgugggcaaggaguucaaccaccuggagaagagaaucgagaaccugaacaagaagguggacgacggcuuccuggacaucuggaccuacaacgccgagcugcuggugcugcuggagaacgagagaacccuggacuaccacgacagcaacgugaagaaccuguacgagaaggugagaagccagcugaagaacaacgccaaggagaucggcaacggcugcuucgaguucuaccacaagugcgacaacaccugcauggagagcgugaagaacggcaccuacgacuaccccaaguacagcgaggaggccaagcugaacagagaggagaucgacggcgugaagcuggagagcaccagaaucuaccagauccuggccaucuacagcaccguggccagcagccuggugcugguggugagccugggcgccaucagcuucuggaugugcagcaacggcagccugcagugcagaaucugcaucuga

SEQ ID NO: 172360 - RNA, 1701 nt, Artificial Sequence; identical to SEQ ID NO: 172308
  derived and/or modified CDS sequence (opt4) from hemagglutinin__InfluenzaA__AHZ41583

SEQ ID NO: 172361 - RNA, 1701 nt, Artificial Sequence; identical to SEQ ID NO: 172303
  derived and/or modified CDS sequence (opt4) from hemagglutinin__InfluenzaA__AHZ41594

SEQ ID NO: 172362 - RNA, 1701 nt, Artificial Sequence
  derived and/or modified CDS sequence (opt4) from hemagglutinin__InfluenzaA__AHZ41605
augaaggccauccugguggugcugcuguacaccuucgccaccgccaacgccgacacccugugcaucggcuaccacgccaacaacagcaccgacaccguggacaccgugcuggagaagaacgugaccgugacccacagcgugaaccugcuggaggacaagcacaacggcaagcugugcaagcugagaggcguggccccccugcaccugggcaagugcaacaucgccggcuggauccugggcaaccccgagugcgagagccugagcaccgccagcagcuggagcuacaucguggagacccccagcagcgacaacggcaccugcuaccccggcgacuucaucgacuacgaggagcugagagagcagcugagcagcgugagcagcuucgagagauucgagaucuuccccaacaccagcagcuggcccaaccacgacagcaacaagggcgugaccgccgccugcccccacgccggcgccaagagcuucuacaagaaccugaucuggcuggugaagaagggcaacagcuaccccaagcugagcaagagcuacaucaacgacaagggcaaggaggugcuggugcuguggggcauccaccaccccagcaccagcgccgagcagcagagccuguaccagaacgccgacgccuacguguucgugggcagcagcagauacagcaagaaguucaagcccgagaucgccgccagacccaaggugaugggccaggccggcagaaugaacuacuacuggacccugguggagcccggcgacaagaucaccuucgaggccaccggcaaccugguggugcccagauacgccuucgccauggagagaaacgccggcagcggcaucaucaucagcgacacccccgugcacgacugcaacaccaccugccagacccccaagggcgccaucaacaccagccugcccuuccagaacauccaccccaucaccaucggcaagugccccaaguacgugaagagcaccaagcugagacuggccaccggccugagaaacauccccagcauccagagcagaggccuguucggcgccaucgccggcuucaucgagggcggcuggaccggcaugguggacggcugguacggcuaccaccaccagaacgagcagggcagcggcuacgccgccgaccugaagagcacccagaacgccaucgacgagaucaccaacaaggugaacagcgugaucgagaagaugaacacccaguucaccgccgugggcaaggaguucaaccaccuggagaagagaaucgagaaccugaacaagaagguggacgacggcuuccuggacaucuggaccuacaacgccgagcugcuggugcugcuggagaacgagagaacccuggacuaccacgacagcaacgugaagaaccuguacgagaaggugagaagccagcugaagaacaacgccaaggagaucggcaacggcugcuucgaguucuaccacaagugcgacaacaccugcauggagagcgugaagaacggcaccuacgacuaccccaaguacagcgaggaggccaagcugaacagagaggagaucgacggcgugaagcuggagagcaccagaaucuaccagauccuggccaucuacagcaccguggccagcagccuggugcugguggugagccugggcgccaucagcuucuggaugugcagcaacggcagccugcagugcagaaucugcaucuga

SEQ ID NO: 172363 - RNA, 1701 nt, Artificial Sequence; identical to SEQ ID NO: 172303
  derived and/or modified CDS sequence (opt4) from hemagglutinin__InfluenzaA__AHZ41616

SEQ ID NO: 172364 - RNA, 1701 nt, Artificial Sequence; identical to SEQ ID NO: 172308
  derived and/or modified CDS sequence (opt4) from hemagglutinin__InfluenzaA__AHZ41627

SEQ ID NO: 172365 - RNA, 1701 nt, Artificial Sequence; identical to SEQ ID NO: 172308
  derived and/or modified CDS sequence (opt4) from hemagglutinin__InfluenzaA__AHZ41638

SEQ ID NO: 172366 - RNA, 1701 nt, Artificial Sequence; identical to SEQ ID NO: 172304
  derived and/or modified CDS sequence (opt4) from hemagglutinin__InfluenzaA__AHZ41649

SEQ ID NO: 172367 - RNA, 1701 nt, Artificial Sequence; identical to SEQ ID NO: 172304
  derived and/or modified CDS sequence (opt4) from hemagglutinin__InfluenzaA__AHZ41660

SEQ ID NO: 172368 - RNA, 1701 nt, Artificial Sequence; identical to SEQ ID NO: 172308
  derived and/or modified CDS sequence (opt4) from hemagglutinin__InfluenzaA__AHZ41671

SEQ ID NO: 172369 - RNA, 1701 nt, Artificial Sequence; identical to SEQ ID NO: 172308
  derived and/or modified CDS sequence (opt4) from hemagglutinin__InfluenzaA__AHZ41682

SEQ ID NO: 172370 - RNA, 1701 nt, Artificial Sequence; identical to SEQ ID NO: 172308
  derived and/or modified CDS sequence (opt4) from hemagglutinin__InfluenzaA__AHZ41693

SEQ ID NO: 172371 - RNA, 1701 nt, Artificial Sequence; identical to SEQ ID NO: 172308
  derived and/or modified CDS sequence (opt4) from hemagglutinin__InfluenzaA__AHZ41704

SEQ ID NO: 172372 - RNA, 1701 nt, Artificial Sequence; identical to SEQ ID NO: 172308
  derived and/or modified CDS sequence (opt4) from hemagglutinin__InfluenzaA__AHZ41715

SEQ ID NO: 172373 - RNA, 1701 nt, Artificial Sequence; identical to SEQ ID NO: 172308
  derived and/or modified CDS sequence (opt4) from hemagglutinin__InfluenzaA__AHZ41726

SEQ ID NO: 172374 - RNA, 1701 nt, Artificial Sequence; identical to SEQ ID NO: 172308
  derived and/or modified CDS sequence (opt4) from hemagglutinin__InfluenzaA__AHZ41737

SEQ ID NO: 172375 - RNA, 1701 nt, Artificial Sequence; identical to SEQ ID NO: 172308
  derived and/or modified CDS sequence (opt4) from hemagglutinin__InfluenzaA__AHZ41748

SEQ ID NO: 172376 - RNA, 1701 nt, Artificial Sequence; identical to SEQ ID NO: 172308
  derived and/or modified CDS sequence (opt4) from hemagglutinin__InfluenzaA__AHZ41759

SEQ ID NO: 172377 - RNA, 1701 nt, Artificial Sequence; identical to SEQ ID NO: 170135
  derived and/or modified CDS sequence (opt4) from hemagglutinin__InfluenzaA__AHZ42561

SEQ ID NO: 172378 - RNA, 1701 nt, Artificial Sequence
  derived and/or modified CDS sequence (opt4) from hemagglutinin__InfluenzaA__AHZ42572
augaagaccaucaucgcccugagcuacauccugugccugguguucgcccagaagcugcccggcaacgacaacagcaccgccacccugugccugggccaccacgccgugcccaacggcaccaucgugaagaccaucaccaacgacagaaucgaggugaccaacgccaccgagcuggugcagaacagcagcaucggcgagaucugcgacagcccccaccagauccuggacggcgagaacugcacccugaucgacgcccugcugggcgacccccagugcgacggcuuccagaacaagaagugggaccuguucguggagagaagcaaggccuacagcaacugcuaccccuacgacgugcccgacuacgccagccugagaagccugguggccagcagcggcacccuggaguucaacaacgagagcuucaacuggaccggcgugacccagaacggcaccagcagcgccugcaucagaagaagcaacagcagcuucuucagcagacugaacuggcugacccaccugaacuucaaguaccccgcccugaacgugaccaugcccaacaacgagcaguucgacaagcuguacaucuggggcgugcaccaccccggcaccgacaaggaccagaucuuccuguacgcccagagcagcggcagaaucaccgugagcaccaagagaagccagcaggccgugauccccaacaucggcagcagacccagaaucagaaacauccccagcagaaucagcaucuacuggaccaucgugaagcccggcgacauccugcugaucaacagcaccggcaaccugaucgcccccagaggcuacuucaagaucagaagcggcaagagcagcaucaugagaagcgacgcccccaucggcaagugcaagagcgagugcaucacccccaacggcagcauccccaacgacaagcccuuccagaacgugaacagaaucaccuacggcgccugccccagauacgugaagcagagcacccugaagcuggccaccggcaugagaaacgugcccgagaagcagaccagaggcaucuucggcgccaucgccggcuucaucgagaacggcugggagggcaugguggacggcugguacggcuucagacaccagaacagcgagggcagaggccaggccgccgaccugaagagcacccaggccgccaucgaccagaucaacggcaagcugaacagacugaucggcaagaccaacgagaaguuccaccagaucgagaaggaguucagcgagguggagggcagaauccaggaccuggagaaguacguggaggacaccaagaucgaccuguggagcuacaacgccgagcugcugguggcccuggagaaccagcacaccaucgaccugaccgacagcgagauggacaagcuguucgagaagaccaagaagcagcugagagagaacgccgaggacaugggcaacggcugcuucaagaucuaccacaagugcgacaacgccugcaucggcagcaucagaaacggcaccuacgaccacgacguguacagagacgaggcccugaacaacagauuccagaucaagggcguggagcugaagagcggcuacaaggacuggauccuguggaucagcuucgccaucagcugcuuccugcugugcguggcccugcugggcuucaucaugugggccugccagaagggcaacaucagaugcaacaucugcaucuga

SEQ ID NO: 172379 - RNA, 1701 nt, Artificial Sequence; identical to SEQ ID NO: 171846
  derived and/or modified CDS sequence (opt4) from hemagglutinin__InfluenzaA__AHZ42584

SEQ ID NO: 172380 - RNA, 1701 nt, Artificial Sequence; identical to SEQ ID NO: 169943
  derived and/or modified CDS sequence (opt4) from hemagglutinin__InfluenzaA__AHZ42596

SEQ ID NO: 172381 - RNA, 1701 nt, Artificial Sequence; identical to SEQ ID NO: 170120
  derived and/or modified CDS sequence (opt4) from hemagglutinin__InfluenzaA__AHZ42608

SEQ ID NO: 172382 - RNA, 1701 nt, Artificial Sequence; identical to SEQ ID NO: 169943
  derived and/or modified CDS sequence (opt4) from hemagglutinin__InfluenzaA__AHZ42619

SEQ ID NO: 172383 - RNA, 1701 nt, Artificial Sequence
  derived and/or modified CDS sequence (opt4) from hemagglutinin__InfluenzaA__AHZ42631
augaagaccaucaucgcccugagcuacauccugugccugguguucgcccagaagcugcccggcaacuacaacagcaccgccacccugugccugggccaccacgccgugcccaacggcaccaucgugaagaccaucaccaacgacagaaucgaggugaccaacgccaccgagcuggugcagaacagcagcaucggcgagaucugcgacagcccccaccagauccuggacggcgagaacugcacccugaucgacgcccugcugggcgacccccagugcgacggcuuccagaacaagaagugggaccuguucguggagagaagcaaggccuacagcaacugcuaccccuacgacgugcccgacuacgccagccugagaagccugguggccagcagcggcacccuggaguucaacaacgagagcuucaacuggaccggcgugacccagaacggcaccagcagcgccugcaucagaagaagcaacagcagcuucuucagcagacugaacuggcugacccaccugaacuucaaguaccccgcccugaacgugaccaugcccaacaacgagcaguucgacaagcuguacaucuggggcgugcaccaccccggcaccgacaaggaccagaucuuccuguacgcccagagcagcggcagaaucaccgugagcaccaagagaagccagcaggccgugauccccaacaucggcagcagacccagaaucagaaacauccccagcagaaucagcaucuacuggaccaucgugaagcccggcgacauccugcugaucaacagcaccggcaaccugaucgcccccagaggcuacuucaagaucagaagcggcaagagcagcaucaugagaagcgacgcccccaucggcaagugcaagagcgagugcaucacccccaacggcagcauccccaacgacaagcccuuccagaacgugaacagaaucaccuacggcgccugccccagauacgugaagcagagcacccugaagcuggccaccggcaugagaaacgugcccgagaagcagaccagaggcaucuucggcgccaucgccggcuucaucgagaacggcugggagggcaugguggacggcugguacggcuucagacaccagaacagcgagggcagaggccaggccgccgaccugaagagcacccaggccgccaucgaccagaucaacggcaagcugaacagacugaucggcaagaccaacgagaaguuccaccagaucgagaaggaguucagcgagguggagggcagaauccaggaccuggagaaguacguggaggacaccaagaucgaccuguggagcuacaacgccgagcugcugguggcccuggagaaccagcacaccaucgaccugaccgacagcgagaugaacaagcuguucgagaagaccaagaagcagcugagagagaacgccgaggacaugggcaacggcugcuucaagaucuaccacaagugcgacaacgccugcaucggcagcaucagaaacggcaccuacgaccacgacguguacagagacgaggcccugaacaacagauuccagaucaagggcguggagcugaagagcggcuacaaggacuggauccuguggaucagcuucgccaucagcugcuuccugcugugcguggcccugcugggcuucaucaugugggccugccagaagggcaacaucagaugcaacaucugcaucuga

SEQ ID NO: 172384 - RNA, 1701 nt, Artificial Sequence
  derived and/or modified CDS sequence (opt4) from hemagglutinin__InfluenzaA__AHZ42643
augaaggccauccugguggugaugcuguacaccuucgccaccgccaacgccgacacccugugcaucggcuaccacgccaacaacagcaccgacaccguggacaccgugcuggagaagaacgugaccgugacccacagcgugaaccugcuggaggacaagcacaacggcaagcugugcaagcugagaggcguggccccccugcaccugggcaagugcaacaucgccggcuggauccugggcaaccccgagugcgagagccugagcaccgccagcagcuggagcuacaucguggagaccagcggcagcgacaacggcaccugcuaccccggcgacuucaucgacuacgaggagcugagagagcagcugagcagcgugagcagcuucgagagauucgagaucuuccccaaggccagcagcuggcccaaccacgacagcaacaagggcgugaccgccgccugcccccacgccggcgccaagggcuucuacaagaaccugaucuggcuggugaagaagggcaacagcuaccccaagcugagcaucagcuacaucaacgacaagggcaaggaggugcuggugcuguggggcauccaccaccccagcaccaccgccgaccagcagagccuguaccagaacgccgacaccuacguguucgugggcaccagcagauacagcaagaaguucaagcccgagaucgccaucagacccaaggugagagaccaggagggcagaaugaacuacuacuggacccugguggagcccggcgacaagaucaccuucgaggccaccggcaaccugguggugcccagauacgccuucgccauggagagaaacgccggcagcggcaucaucaucagcgacacccccgugcacgacugcaacaccaccugccagacccccaagggcgccaucaacaccagccugcccuuccagaacauccaccccaucaccaucggcaagugccccaaguacgugaagagcaccaagcugagacuggccaccggccugagaaacgugcccagcauccagagcagaggccuguucggcgccaucgccggcuucaucgagggcggcuggaccggcaugguggacggcugguacggcuaccaccaccagaacgagcagggcagcggcuacgccgccgaccugaagagcacccagaacgccaucgacaagaucaccaacaaggugaacagcgugaucgagaagaugaacacccaguucaccgccgugggcaaggaguucaaccaccuggagaagagaaucgagaaccugaacaagaagguggacgacggcuuccuggacaucuggaccuacaacgccgagcugcuggugcugcuggagaacgagagaacccuggacuaccacgacagcaacgugaagaaccuguacgagaaggugagaaaccagcugaagaacaacgccaaggagaucggcaacggcugcuucgaguucuaccacaagugcgacaacaccugcauggagagcgugaagaacggcaccuacgacuaccccaaguacagcgaggaggccaagcugaacagagagaagaucgacggcgugaagcuggagagcaccagaaucuaccagauccuggccaucuacagcaccgccgccagcagccuggugcugguggugagccugggcgccaucagcuucuggaugugcagcaacggcagccugcagugcagaaucugcaucuga

SEQ ID NO: 172385 - RNA, 1701 nt, Artificial Sequence; identical to SEQ ID NO: 169943
  derived and/or modified CDS sequence (opt4) from hemagglutinin__InfluenzaA__AHZ42654

SEQ ID NO: 172386 - RNA, 1701 nt, Artificial Sequence; identical to SEQ ID NO: 169918
  derived and/or modified CDS sequence (opt4) from hemagglutinin__InfluenzaA__AHZ42666

SEQ ID NO: 172387 - RNA, 1701 nt, Artificial Sequence; identical to SEQ ID NO: 169918
  derived and/or modified CDS sequence (opt4) from hemagglutinin__InfluenzaA__AHZ42678

SEQ ID NO: 172388 - RNA, 1701 nt, Artificial Sequence
  derived and/or modified CDS sequence (opt4) from hemagglutinin__InfluenzaA__AHZ42690
augaaggccauccugguggugcugcuguacaccuacgccaccgccaacgccgacacccugugcaucggcuaccacgccaacaacagcaccgacaccguggacaccgugcuggagaagaacgugaccgugacccacagcgugaaccugcuggaggacaagcacaacggcaagcugugcaagcugagaggcguggccccccugcaccugggcaagugcaacaucgccggcuggauccugggcaaccccgagugcgagagccugagcaccgccagcagcuggagcuacaucguggagaccagcagcagcgacaacggcaccugcuaccccggcgacuucaucaacuacgaggagcugagagagcagcugagcagcgugagcagcuucgagagauucgagaucuuccccaagaccagcagcuggcccaaccacgacagcaacaagggcgugaccgccgccugcccccacgccggcgccaagagcuucuacaagaaccugaucuggcuggugaagaagggcaacagcuaccccaagcugagcaagagcuacaucaacgacaagggcaaggaggugcuggugcuguggggcauccaccaccccagcaccaccaccgaccagcagagccuguaccagaacgccgacgccuacguguucgugggcaccagcagauacagcaagaaguucaagcccgagaucgccaucagacccaaggugagagaccaggagggcagaaugaacuacuacuggacccugaucgagcccggcgacaagaucaccuucgaggccaccggcaaccugguggugcccagauacgccuucgccauggagagaaacgccggcagcggcaucaucaucagcgacacccccgugcacgacugcaacaccaccugccagacccccgagggcgccaucaacaccagccugcccuuccagaacauccaccccaucaccaucggcaagugccccaaguacgugaagagcaccaagcugagacuggccaccggccugagaaacgugcccagcauccagagcagaggccuguucggcgccaucgccggcuucaucgagggcggcuggaccggcaugguggacggcugguacggcuaccaccaccagaacgagcagggcagcggcuacgccgccgaccugaagagcacccagaacgccaucgacaagaucaccaacaaggugaacagcgugaucgagaagaugaacacccaguucaccgccgugggcaaggaguucaaccaccuggagaagagaaucgagaaccugaacaagaagguggacgacggcuuccuggacaucuggaccuacaacgccgagcugcuggugcugcuggagaacgagagaacccuggacuaccacgacagcaacgugaagaaccuguacgagaaggugagaaaccagcugaagaacaacgccaaggagaucggcaacggcugcuucgaguucuaccacaagugcgacaacaccugcauggagagcgugaagaacggcaccuacgacuaccccaaguacagcgaggaggccaagcugaacagagagaagaucgacggcgugaagcuggagagcaccagaaucuaccagauccuggccaucuacagcaccguggccagcagccuggugcugguggugagccugggcgccaucagcuucuggaugugcagcaacggcagccugcagugcagaaucugcaucuga

SEQ ID NO: 172389 - RNA, 1701 nt, Artificial Sequence; identical to SEQ ID NO: 169943
  derived and/or modified CDS sequence (opt4) from hemagglutinin__InfluenzaA__AHZ42701

SEQ ID NO: 172390 - RNA, 1701 nt, Artificial Sequence; identical to SEQ ID NO: 169918
  derived and/or modified CDS sequence (opt4) from hemagglutinin__InfluenzaA__AHZ42713

SEQ ID NO: 172391 - RNA, 1701 nt, Artificial Sequence
  derived and/or modified CDS sequence (opt4) from hemagglutinin__InfluenzaA__AHZ42725
augaagaccaucaucgcccugagcuacauccugugccugguguucgcccagaagcugcccggcaacgacaacagcaccgccacccugugccugggccaccacgccgugcccaacggcaccaucgugaagaccaucaccaacgacagaaucgaggugaccaacgccaccgagcuggugcagaacagcagcaucggcgagaucugcgacagcccccaccagauccuggacggcgagaacugcacccugaucgacgcccugcugggcgacccccagugcgacggcuuccagaacaagaagugggaccuguucguggagagaagcaaggccuacagcaacugcuaccccuacgacgugcccgacuacgccagccugagaagccugguggccagcagcggcacccuggaguucaacaacgagagcuucaacuggaccggcgugacccagaacggcaccagcagcgccugcaucagaagaagcaacagcagcuucuucagcagacugaacuggcugacccaccugaacuucaaguaccccgcccugaacgugaccaugcccaacaacgagcaguucgacaagcuguacaucuggggcgugcaccaccccggcaccgacaaggaccagaucuuccuguacgcccagagcagcggcagaaucaccgugagcaccaagagaagccagcaggccgugauccccaacaucggcagcagacccagaaucagaaacauccccagcagaaucagcaucuacuggaccaucgugaagcccggcgacauccugcugaucaacagcaccggcaaccugaucgcccccagaggcuacuucaagaucagaaacggcaagagcagcaucaugagaagcgacgcccccaucggcaagugcaagagcgagugcaucacccccaacggcagcauccccaacgacaagcccuuccagaacgugaacagaaucaccuacggcgccugccccagauacgugaagcagagcacccugaagcuggccaccggcaugagaaacgugcccgagaagcagaccagaggcaucuucggcgccaucgccggcuucaucgagaacggcugggagggcaugguggacggcugguacggcuucagacaccagaacagcgagggcagaggccaggccgccgaccugaagagcacccaggccgccaucgaccagaucaacggcaagcugaacagacugaucggcaagaccaacgagaaguuccaccagaucgagaaggaguucagcgagguggagggcagaauccaggaccuggagaaguacguggaggacaccaagaucgaccuguggagcuacaacgccgagcugcugguggcccuggagaaccagcacaccaucgaccugaccgacagcgagaugaacaagcuguucgagaagaccaagaagcagcugagagagaacgccgaggacaugggcaacggcugcuucaagaucuaccacaagugcgacaacgccugcaucggcagcaucagaaacggcaccuacgaccacgacguguacagagacgaggcccugaacaacagauuccagaucaagggcguggagcugaagagcggcuacaaggacuggauccuguggaucagcuucgccaucagcugcuuccugcugugcguggcccugcugggcuucaucaugugggccugccagaagggcaacaucagaugcaacaucugcaucuga

SEQ ID NO: 172392 - RNA, 1701 nt, Artificial Sequence
  derived and/or modified CDS sequence (opt4) from hemagglutinin__InfluenzaA__AHZ42737
augaaggccauccugguggugcugcuguacaccuucgccaccgccaacgccgacacccugugcaucggcuaccacgccaacaacagcaccgacaccguggacaccgugcuggagaagaacgugaccgugacccacagcgugaaccugcuggaggacaagcacaacggcaagcugugcaagcugagaggcguggccccccugcaccugggcaagugcaacaucgccggcuggauccugggcaaccccgagugcgagagccugagcaccgccagcagcuggagcuacaucguggagaccagcagcagcgacaacggcaccugcuaccccggcgacuucaucaacuacgaggagcugagagagcagcugagcagcgugagcagcuucgagagauucgagaucuuccccaagaccagcagcuggcccaaccacgacagcaacaagggcgugaccgccgccugcccccacgccggcgccaagagcuucuacaagaaccugaucuggcuggugaagaagggcaacagcuaccccaagcugagcaagagcuacaucaacgacaagggcaaggaggugcuggugcuguggggcauccaccaccccagcaccaccgccgaccagcagagccuguaccagaacgccgacgccuacguguucgugggcaccagcagauacagcaagaaguucaagcccgagaucgccaucagacccaaggugagagaccaggagggcagaaugaacuacuacuggacccugaucgagcccggcgacaagaucaccuucgaggccaccggcaaccugguggugcccagauacgccuucgccauggagagaaacgccgagagcggcaucaucaucagcgacacccccgugcacgacugcaacaccaccugccagacccccgagggcgccaucaacaccagccugcccuuccagaacauccaccccaucaccaucggcaagugccccaaguacgugaagagcaccaagcugagacuggccaccggccugagaaacgugcccagcauccagagcagaggccuguucggcgccaucgccggcuucaucgagggcggcuggaccggcaugguggacggcugguacggcuaccaccaccagaacgagcagggcagcggcuacgccgccgaccugaagagcacccagaacgccaucgacaagaucaccaacaaggugaacagcgugaucgagaagaugaacacccaguucaccgccgugggcaaggaguucaaccaccuggagaagagaaucgagaaccugaacaagaagguggacgacggcuuccuggacaucuggaccuacaacgccgagcugcuggugcugcuggagaacgagagaacccuggacuaccacgacagcaacgugaagaaccuguacgagaaggugagaaaccagcugaagaacaacgccaaggagaucggcaacggcugcuucgaguucuaccacaagugcgacaacaccugcauggagagcgugaagaacggcaccuacgacuaccccaaguacagcgaggaggccaagcugaacagagagaagaucgacggcgugaagcuggagagcaccagaaucuaccagauccuggccaucuacagcaccguggccagcagccuggugcugguggugagccugggcgccaucagcuucuggaugugcagcaacggcagccugcagugcagaaucugcaucuga

SEQ ID NO: 172393 - RNA, 1701 nt, Artificial Sequence; identical to SEQ ID NO: 169943
  derived and/or modified CDS sequence (opt4) from hemagglutinin__InfluenzaA__AHZ42748

SEQ ID NO: 172394 - RNA, 1701 nt, Artificial Sequence; identical to SEQ ID NO: 169963
  derived and/or modified CDS sequence (opt4) from hemagglutinin__InfluenzaA__AHZ42760

SEQ ID NO: 172395 - RNA, 1701 nt, Artificial Sequence
  derived and/or modified CDS sequence (opt4) from hemagglutinin__InfluenzaA__AHZ42772
augaagaccaucaucgcccugagcuacauccugugccugguguucgcccaggagcugcccggcaacgacgacagcaccgccacccugugccugggccaccacgccgugcccaacggcaccaucgugaagaccaucaccaacgacagaaucgaggugaccaacgccaccgagcuggugcagagcagcagcaccggcgagaucugcaacagcccccaccagauccuggacggcgagaacugcacccugaucgacgcccugcugggcgacccccagugcgacggcuuccagaacaagaagugggaccuguucguggagagaagcaaggcccacagcaacugcuaccccuacgacgugcccgacuacgccagccugagaagccugguggccagcagcggcacccuggaguucaacaacgagagcuucaacuggaccggcgugacccagaacggcaccagcagcgccugcaucagaagaagcaacaacagcuucuucagcagacugaacuggcugacccaccugaacuucaaguaccccgcccugaacgugaccaugcccaacaacgagcaguucgacaagcuguacaucuggggcgugcaccaccccggcaccgacaaggaccagaucuuccuguacgcccaggccagcggcagaaucaccgugagcaccaagagaagccagcagaccgugauccccaacaucggcagcagacccagagugagaaacauccccagcagagugagcaucuacuggaccaucgugaagcccggcgacauccugcugaucaacagcaccggcaaccugaucgcccccagaggcuacuucaagaucagaagcggcaagagcagcaucaugagaagcgacgcccccaucggcaagugcaacagcgccugcaucacccccaacggcagcauccccaacgacaagcccuuccagaacgugaacagaaucaccuacggcgccugccccagauacgugaagcagaacacccugaagcuggccaccggcaugagaaacgugcccgagaagcagaccagaggcaucuucggcgccaucgccggcuucaucgagaacggcugggagggcaugguggacggcugguacggcuucagacaccagaacagcgagggcagaggccaggccgccgaccugaagagcacccaggccgccaucgaccagaucaacggcaagcugaacagacugaucggcaagaccaacgagaaguuccaccagaucgagaaggaguucagcgagguggagggcagaauccaggaccuggagaaguacguggaggacaccaagaucgaccuguggagcuacaacgccgagcugcugguggcccuggagaaccagcacaccaucgaccugaccgacagcgagaugaacaagcuguucgagaagaccaagaagcagcugagagagaacgccgaggacaugggcaacggcugcuucaagaucuaccacaagugcgacaacgccugcaucggcagcaucagaaacggcaccuacgaccacgacguguacagagacgaggcccugaacaacagauuccagaucaaggagguggagcugaagagcggcuacaaggacuggauccuguggaucagcuucgccaucagcugcuuccugcugugcguggcccugcugggcuucaucaugugggccugccagaagggcaacaucagaugcaacaucugcaucuga

SEQ ID NO: 172396 - RNA, 1701 nt, Artificial Sequence; identical to SEQ ID NO: 169943
  derived and/or modified CDS sequence (opt4) from hemagglutinin__InfluenzaA__AHZ42784

SEQ ID NO: 172397 - RNA, 1701 nt, Artificial Sequence; identical to SEQ ID NO: 169918
  derived and/or modified CDS sequence (opt4) from hemagglutinin__InfluenzaA__AHZ42796

SEQ ID NO: 172398 - RNA, 1701 nt, Artificial Sequence; identical to SEQ ID NO: 169918
  derived and/or modified CDS sequence (opt4) from hemagglutinin__InfluenzaA__AHZ42808

SEQ ID NO: 172399 - RNA, 1701 nt, Artificial Sequence; identical to SEQ ID NO: 172392
  derived and/or modified CDS sequence (opt4) from hemagglutinin__InfluenzaA__AHZ42820

SEQ ID NO: 172400 - RNA, 1701 nt, Artificial Sequence; identical to SEQ ID NO: 170527
  derived and/or modified CDS sequence (opt4) from hemagglutinin__InfluenzaA__AHZ42831

SEQ ID NO: 172401 - RNA, 1701 nt, Artificial Sequence
  derived and/or modified CDS sequence (opt4) from hemagglutinin__InfluenzaA__AHZ42843
augaagaccaucaucgcccugagcuacauccugugccugguguucgcccagaagcugcccggcaacgacaacagcaccgccacccugugccugggccaccacgccgugcccaacggcaccauggugaagaccaucaccaacgacagaaucgaggugaccaacgccaccgagcuggugcagaacagcagcaucggcgagaucugcgacagcccccaccagauccuggacggcgagaacugcacccugaucgacgcccugcugggcgacccccagugcgacggcuuccagaacaagaagugggaccuguucguggagagaagcaaggccuacagcaacugcuaccccuacgacgugcccgacuacgccagccugagaagccugguggccagcagcggcacccuggaguucaacaacgagagcuucaacuggaccggcgugacccagaacggcaccagcagcgccugcaucagaagaagcaacagcagcuucuucagcagacugaacuggcugacccaccugaacuucaaguaccccgcccugaacgugaccaugcccaacaacgagcaguucgacaagcuguacaucuggggcgugcaccaccccggcaccgacaaggaccagaucuuccuguacgcccagagcagcggcagaaucaccgugagcaccaagagaagccagcaggccgugauccccaacaucggcagcagacccagaaucagaaacauccccagcagaaucagcaucuacuggaccaucgugaagcccggcgacauccugcugaucaacagcaccggcaaccugaucgcccccagaggcuacuucaagaucagaagcggcaagagcagcaucaugagaagcgacgcccccaucggcaagugcaagagcgagugcaucacccccaacggcagcauccccaacgacaagcccuuccagaacgugaacagaaucaccuacggcgccugccccagauacgugaagcagagcacccugaagcuggccaccggcaugagaaacgugcccgagaagcagaccagaggcaucuucggcgccaucgccggcuucaucgagaacggcugggagggcaugguggacggcugguacggcuucagacaccagaacagcgagggcagaggccaggccgccgaccugaagagcacccaggccgccaucgaccagaucaacggcaagcugaacagacugaucggcaagaccaacgagaaguuccaccagaucgagaaggaguucagcgagguggagggcagaauccaggaccuggagaaguacguggaggacaccaagaucgaccuguggagcuacaacgccgagcugcugguggcccuggagaaccagcacaccaucgaccugaccgacagcgagaugaacaagcuguucgagaagaccaagaagcagcugagagagaacgccgaggacaugggcaacggcugcuucaagaucuaccacaagugcgacaacgccugcaucggcagcaucagaaacggcaccuacgaccacaacguguacagagacgaggcccugaacaacagauuccagaucaagggcguggagcugaagagcggcuacaaggacuggauccuguggaucagcuucgccaucagcugcuuccugcugugcguggcccugcugggcuucaucaugugggccugccagaagggcaacaucagaugcaacaucugcaucuga

SEQ ID NO: 172402 - RNA, 1701 nt, Artificial Sequence
  derived and/or modified CDS sequence (opt4) from hemagglutinin__InfluenzaA__AHZ42855
augaagaccaucaucgcccugagcuacauccugugccugguguucgcccagaagcugcccggcaacgacaacagcaccgccacccugugccugggccaccacgccgugcccaacggcaccaucgugaagaccaucaccaacgacagaaucgaggugaccaacgccaccgagcuggugcagaacagcagcaucggcgagaucugcgacagcccccaccagauccuggacggcgagaacugcacccugaucgacgcccugcugggcgacccccagugcgacggcuuccagaacaagaagugggaccuguucguggagagaagcaaggccuacagcaacugcuaccccuacgacgugcccgacuacgccagccugagaagccugguggccagcagcggcacccuggaguucaacaacgagagcuucaacuggaccggcgugacccagaacggcaccagcagcgccugcaucagaagaagcaacagcagcuucuucagcagacugaacuggcugacccaccugaacuucaaguaccccgcccugaacaugaccaugcccaacaacgagcaguucgacaagcuguacaucuggggcgugcaccaccccggcaccgacaaggaccagaucuuccuguacgcccagagcagcggcagaaucaccgugagcaccaagagaagccagcaggccgugauccccaacaucggcagcagacccagaaucagaaacauccccagcagaaucagcaucuacuggaccaucgugaagcccggcgacauccugcugaucaacagcaccggcaaccugaucgcccccagaggcuacuucaagaucagaagcggcaagagcagcaucaugagaagcgacgcccccaucggcaagugcaagagcgagugcaucacccccaacggcagcauccccaacgacaagcccuuccagaacgugaacagaaucaccuacggcgccugccccagauacgugaagcagagcacccugaagcuggccaccggcaugagaaacgugcccgagaagcagaccagaggcaucuucggcgccaucgccggcuucaucgagaacggcugggagggcaugguggacggcugguacggcuucagacaccagaacagcgagggcagaggccaggccgccgaccugaagagcacccaggccgccaucgaccagaucaacggcaagcugaacagacugaucggcaagaccaacgagaaguuccaccagaucgagaaggaguucagcgagguggagggcagaauccaggaccuggagaaguacguggaggacaccaagaucgaccuguggagcuacaacgccgagcugcugguggcccuggagaaccagcacaccaucgaccugaccgacagcgagaugaacaagcuguucgagaagaccaagaagcagcugagagagaacgccgaggacaugggcaacggcugcuucaagaucuaccacaagugcgacaacgccugcaucggcagcaucagaaacggcaccuacgaccacaacguguacagagacgaggcccugaacaacagauuccagaucaagggcguggagcugaagagcggcuacaaggacuggauccuguggaucagcuucgccaucagcugcuuccugcugugcguggcccugcugggcuucaucaugugggccugccagaagggcaacaucagaugcaacaucugcaucuga

SEQ ID NO: 172403 - RNA, 1701 nt, Artificial Sequence
  derived and/or modified CDS sequence (opt4) from hemagglutinin__InfluenzaA__AHZ42867
augaagaccaucaucgcccugagcuacauccugugccugguguucgcccagaagcugcccggcaacgacaacagcaccgccacccugugccugggccaccacgccgugcccaacggcaccaucgugaagaccaucaccaacgaccagaucgaggugaccaacgccaccgagcuggugcagaacagcagcaucggcgagaucugcgacagcccccaccagauccuggacggcgagaacugcacccugaucgacgcccugcugggcgacccccagugcgacggcuuccagaacaagaagugggaccuguucguggagagaagcaaggccuacagcaacugcuaccccuacgacgugcccgacuacgccagccugagaagccugguggccagcagcggcacccuggaguucaacaacgagagcuucaacugggccggcgugacccagaacggcaccagcagcgccugcaucagaggcagcaacagcagcuucuucagcagacugaacuggcugacccaccugaacuucaaguaccccgcccugaacgugaccaugcccaacaacgagcaguucgacaagcuguacaucuggggcgugcaccaccccggcaccgacaaggaccagaucuuccuguacgcccagagcagcggcagaaucaccgugagcaccaagagaagccagcaggccgugauccccaacaucggcagcagacccagaaucagaaacauccccagcagaaucagcaucuacuggaccaucgugaagcccggcgacauccugcugaucaacagcaccggcaaccugaucgcccccagaggcuacuucaagaucagaagcggcaagagcagcaucaugagaagcgacgcccccaucggcaagugcaagagcgagugcaucacccccaacggcagcauccccaacgacaagcccuuccagaacgugaacagaaucaccuacggcgccugccccagauacgugaagcagagcacccugaagcuggccaccggcaugagaaacgugcccgagaagcagaccagaggcaucuucggcgccaucgccggcuucaucgagaacggcugggagggcaugguggacggcugguacggcuucagacaccagaacagcgagggcagaggccaggccgccgaccugaagagcacccaggccgccaucgaccagaucaacggcaagcugaacagacugaucggcaagaccaacgagaaguuccaccagaucgagaaggaguucagcgagguggagggcagaauccaggaccuggagaaguacguggaggacaccaagaucgaccuguggagcuacaacgccgagcugcugguggcccuggagaaccagcacaccaucgaccugaccgacagcgagaugaacaagcuguucgagaagaccaagaagcagcugagagagaacgccgaggacaugggcaacggcugcuucaagaucuaccacaagugcgacaacgccugcaucggcagcaucagaaacggcaccuacgaccacgacguguacagagacgaggcccugaacaacagauuccagaucaagggcguggagcugaagagcgaguacaaggacuggauccuguggaucagcuucgccaucagcugcuuccugcugugcguggcccugcugggcuucaucaugugggccugccagaagggcaacaucagaugcaacaucugcaucuga

SEQ ID NO: 172404 - RNA, 1701 nt, Artificial Sequence; identical to SEQ ID NO: 169918
  derived and/or modified CDS sequence (opt4) from hemagglutinin__InfluenzaA__AHZ42879

SEQ ID NO: 172405 - RNA, 1701 nt, Artificial Sequence
  derived and/or modified CDS sequence (opt4) from hemagglutinin__InfluenzaA__AHZ42891
augaagaccaucaucgcccugagcuacauccugugccugguguucgcccagaagcugcccggcaacgacaacagcaccgccacccugugccugggccaccacgccgugcccaacggcaccaucgugaagaccaucaccaacgacagaaucgaggugaccaacgccaccgagcuggugcagaacagcagcaucggcgagaucugcgacagcccccaccagauccuggacggcgagaacugcacccugaucgacgcccugcugggcgacccccagugcgacggcuuccagaacaagaagugggaccuguucguggagagaagcaaggccuacagcagcugcuaccccuacgacgugcccgacuacgccagccugagaagccugguggccagcagcggcacccuggaguucaacaacgagagcuucaacugggccggcgugacccagaacggcaccagcagcgccugcaucagaagaagcaacagcagcuucuucagcagacugaacuggcugacccaccugaacuucaaguaccccgcccugaacgugaccaugcccaacaacgagcaguucgacaagcuguacaucuggggcgugcaccaccccggcaccgacaaggaccagaucuuccuguacgcccagagcagcggcagaaucaccgugagcaccaagagaagccagcaggccgugauccccaacaucggcagcagacccagaaucagaaacauccccagcagaaucagcaucuacuggaccaucgugaagcccggcgacauccugcugaucaacagcaccggcaaccugaucgcccccagaggcuacuucaagaucagaagcggcaagagcagcaucaugagaagcgacgcccccaucggcaagugcaagagcgagugcaucacccccaacggcagcauccccaacgacaagcccuuccagaacgugaacagaaucaccuacggcgccugccccagauacgugaagcagagcacccugaagcuggccaccggcaugagaaacgugcccgagaagcagaccagaggcaucuucggcgccaucgccggcuucaucgagaacggcugggagggcaugguggacggcugguacggcuucagacaccagaacagcgagggcagaggccaggccgccgaccugaagagcacccaggccgccaucgaccagaucaacggcaagcugaacagacugaucggcaagaccaacgagaaguuccaccagaucgagaaggaguucagcgagguggagggcagaauccaggaccuggagaaguacguggaggacaccaagaucgaccuguggagcuacaacgccgagcugcugguggcccuggagaaccagcacaccaucgaccugaccgacagcgagaugaacaagcuguucgagaagaccaagaagcagcugagagagaacgccgaggacaugggcaacggcugcuucaagaucuaccacaagugcgacaacgccugcaucggcagcaucagaaacggcaccuacgaccacgacguguacagagacgaggcccugaacaacagauuccagaucaagggcguggagcugaagagcggcuacaaggacuggauccuguggaucagcuucgccaucagcugcuuccugcugugcguggcccugcugggcuucaucaugugggccugccagaagggcaacaucagaugcaacaucugcaucuga

SEQ ID NO: 172406 - RNA, 1701 nt, Artificial Sequence
  derived and/or modified CDS sequence (opt4) from hemagglutinin__InfluenzaA__AHZ42903
augaagaccaucaucgcccugagcuacauccugugccugguguucgcccagaagauccccggcaacgacaacagcaccgccacccugugccugggccaccacgccgugcccaacggcaccaucgugaagaccaucaccaacgacagaaucgaggugaccaacgccaccgagcuggugcagaacagcagcaucggcgagaucugcgacagcccccaccagauccuggacggcgagaacugcacccugaucgacgcccugcugggcgacccccagugcgacggcuuccagaacaagaagugggaccuguucguggagagaagcaaggccuacagcaacugcuaccccuacgacgugcccgacuacgccagccugagaagccugguggccagcagcggcacccuggaguucaacaacgagagcuucaacuggaccggcgugacccagaacggcaccagcagcgccugcaucagaagaagcaacagcagcuucuucagcagacugaacuggcugacccaccugaacuucaaguaccccgcccugaacgugaccaugcccaacaacgagcaguucgacaagcuguacaucuggggcgugcaccaccccggcaccgacaaggaccagaucuuccuguacgcccagagcagcggcagaaucaccgugagcaccaagagaagccagcaggccgugauccccaacaucggcagcagacccagaaucagaaacauccccagcagaaucagcaucuacuggaccaucgugaagcccggcgacauccugcugaucaacagcaccggcaaccugaucgcccccagaggcuacuucaagaucagaagcggcaagagcagcaucaugagaagcgacgcccccaucggcaagugcaagagcgagugcaucacccccaacggcagcauccccaacgacaagcccuuccagaacgugaacagaaucaccuacggcgccugccccagauacgugaagcagagcacccugaagcuggccaccggcaugagaaacgugcccgagaagcagaccagaggcaucuucggcgccaucgccggcuucaucgagaacggcugggagggcaugguggacggcugguacggcuucagacaccagaacagcgagggcagaggccaggccgccgaccugaagagcacccaggccgccaucgaccagaucaacggcaagcugaacagacugaucggcaagaccaacgagaaguuccaccagaucgagaaggaguucagcgagguggagggcagaauccaggaccuggagaaguacguggaggacaccaagaucgaccuguggagcuacaacgccgagcugcugguggcccuggagaaccagcacaccaucgaccugaccgacagcgagaugaacaagcuguucgagaagaccaagaagcagcugagagagaacgccgaggacaugggcaacggcugcuucaagaucuaccacaagugcgacaacgccugcaucggcagcaucagaaacggcaccuacgaccacaacguguacagagacgaggcccugaacaacagauuccagaucaagggcguggagcugaagagcggcuacaaggacuggauccuguggaucagcuucgccaucagcugcuuccugcugugcguggcccugcugggcuucaucaugugggccugccagaagggcaacaucagaugcaacaucugcaucuga

SEQ ID NO: 172407 - RNA, 1701 nt, Artificial Sequence; identical to SEQ ID NO: 169895
  derived and/or modified CDS sequence (opt4) from hemagglutinin__InfluenzaA__AHZ42915

SEQ ID NO: 172408 - RNA, 1683 nt, Artificial Sequence; identical to SEQ ID NO: 170048
  derived and/or modified CDS sequence (opt4) from hemagglutinin__InfluenzaA__AHZ59747

SEQ ID NO: 172409 - RNA, 1683 nt, Artificial Sequence
  derived and/or modified CDS sequence (opt4) from hemagglutinin__InfluenzaA__AHZ59759
augaacacccagauccugguguucgcccugaucgccaucauccccaccaacgccgacaagaucugccugggccaccacgccgugagcaacggcaccaaggugaacacccugaccgagagaggcguggagguggugaacgccaccgagaccguggagagaaccaacauccccagaaucugcagcaagggcaagagaaccguggaccugggccagugcggccugcugggcaccaucaccggccccccccagugcgaccaguuccuggaguucagcgccgaccugaucaucgagagaagagagggcagcgacgugugcuaccccggcaaguucgugaacgaggaggcccugagacagauccugagagagagcggcggcaucgacaaggaggccaugggcuucaccuacagcggcaucagaaccaacggcgccaccagcgccugcagaagaagcggcagcagcuucuacgccgagaugaaguggcugcugagcaacaccgacaacgccgccuucccccagaugaccaagagcuacaagaacaccagaaagagccccgcccugaucguguggggcauccaccacagcgugagcaccgccgagcagaccaagcuguacggcagcggcaacaagcuggugaccgugggcagcagcaacuaccagcagagcuucgugcccagccccggcgccagaccccaggugaacggccugagcggcagaaucgacuuccacuggcugaugcugaaccccaacgacaccgugaccuucagcuucaacggcgccuucaucgcccccgacagagccagcuuccugagaggcaagagcaugggcauccagagcggcgugcagguggacgccaacugcgagggcgacugcuaccacagcggcggcaccaucaucagcaaccugcccuuccagaacaucgacagcagagccgugggcaagugccccagauacgugaagcagagaagccugcugcuggccaccggcaugaagaacgugcccgagauccccaagggcagaggccuguucggcgccaucgccggcuucaucgagaacggcugggagggccugaucgacggcugguacggcuucagacaccagaacgcccagggcgagggcaccgccgccgacuacaagagcacccagagcgccaucgaccagaucaccggcaagcugaacagacugaucgagaagaccaaccagcaguucgagcugaucgacaacgaguucaacgagguggagaagcagaucggcaacgugaucaacuggaccagagacagcaucaccgagguguggagcuacaacgccgagcugcugguggccauggagaaccagcacaccaucgaccuggccgacagcgagauggacaagcuguacgagagagugaagagacagcugagagagaacgccgaggaggacggcaccggcugcuucgagaucuuccacaagugcgacgacgacugcauggccagcaucagaaacaacaccuacgaccacagcaagagcagagaggaggccaugcagaacagaauccagaucgaccccgugaagcugagcagcggcuacaaggacgugauccugugguucagcuucggcgccagcugcuucauccugcuggccaucgugaugggccugguguucaucugcgugaagaacggcaacaugagaugcaccaucugcaucuga

SEQ ID NO: 172410 - RNA, 1683 nt, Artificial Sequence
  derived and/or modified CDS sequence (opt4) from hemagglutinin__InfluenzaA__AHZ59771
augaacacccagauccugguguucgcccugaucgccaucauccccaccaacgccgacaagaucugccugggccaccacgccgugagcaacggcaccaaggugaacacccugaccgagagaggcguggagguggugaacgccaccgagaccguggagagaaccaacauccccagaaucugcagcaagggcaagagaaccguggaccugggccagugcggccugcugggcaccaucaccggccccccccagugcgaccaguuccuggaguucagcgccgaccugaucaucgagagaagagagggcagcgacgugugcuaccccggcaaguucgugaacgaggaggcccugagacagauccugagagagagcggcggcaucgacaaggaggccaugggcuucaccuacagcggcaucagaaccaacggcgccaccagcgccugcagaagaagcggcagcagcuucuacgccgagaugaaguggcugcugagcaacaccgacaacgccgccuucccccagaugaccaagagcuacaagaacaccagaaagagccccgcccugaucguguggggcauccaccacagcgugagcaccgccgagcagaccaagcuguacggcagcggcaacaagcuggugaccgugggcagcagcaacuaccagcagagcuucgugcccagccccggcgccagaccccaggugaacggccagagcggcagaaucgacuuccacuggcugaugcugaaccccaacgacaccgugaccuucagcuucaacggcgccuucaucgcccccgacagagccagcuuccugagaggcaagagcaugggcauccagagcggcgugcagguggacgccaacugcgagggcgacugcuaccacagcggcggcaccaucaucagcaaccugcccuuccagaacaucgacagcagagccgugggcaagugccccagauacgugaagcagagaagccugcugcuggccaccggcaugaagaacgugcccgagauccccaagggcagaggccuguucggcgccaucgccggcuucaucgagaacggcugggagggccugaucgacggcugguacggcuucagacaccagaacgcccagggcgagggcaccgccgccgacuacaagagcacccagagcgccaucgaccagaucaccggcaagcugaacagacugaucgagaagaccaaccagcaguucgagcugaucgacaacgaguucaacgagguggagaagcagaucggcaacgugaucaacuggaccagagacagcaucaccgagguguggagcuacaacgccgagcugcugguggccauggagaaccagcacaccaucgaccuggccgacagcgagauggacaagcuguacgagagagugaagagacagcugagagagaacgccgaggaggacggcaccggcugcuucgagaucuuccacaagugcgacgacgacugcauggccagcaucagaaacaacaccuacgaccacagcaaguacagagaggaggccaugcagaacagaauccagaucgaccccgugaagcugagcagcggcuacaaggacgugauccugugguucagcuucggcgccagcugcuucauccugcuggccaucgugaugggccugguguucaucugcgugaagaacggcaacaugagaugcaccaucugcaucuga

SEQ ID NO: 172411 - RNA, 1683 nt, Artificial Sequence
  derived and/or modified CDS sequence (opt4) from hemagglutinin__InfluenzaA__AHZ59795
augaacacccagauccugguguucgcccugaucgccaucauccccaccaacgccgacaagaucugccugggccaccacgccgugagcaacggcaccaaggugaacacccugaccgagagaggcguggagguggugaacgccaccgagaccguggagagaaccaacauccccagaaucugcagcaagggcaagagaaccguggaccugggccagugcggccugcugggcaccaucaccggccccccccagugcgaccaguuccuggaguucagcgccgaccugaucaucgagagaagagagggcagcgacgugugcuaccccggcaaguucgugaacgaggaggcccugagacagauccugagagagagcggcggcaucgacaaggaggccaugggcuucaccuacagcggcaucagaaccaacggcaccaccagcgccugcagaagaagcggcagcagcuucuacgccgagaugaaguggcugcugagcaacaccgacaacgccgccuucccccagaugaccaagagcuacaagaacaccagaaagagccccgcccugaucguguggggcauccaccacagcgugagcaccgccgagcagaccaagcuguacggcagcggcaacaagcuggugaccgugggcagcagcaacuaccagcagagcuucgugcccagccccggcgccagaccccaggugaacggccugagcggcagaaucgacuuccacuggcugaugcugaaccccaacgacaccgugaccuucagcuucaacggcgccuucaucgcccccgacagagccagcuuccugagaggcaagagcaugggcauccagagcggcgugcagguggacgccaacugcgagggcgacugcuaccacagcggcggcaccaucaucagcaaccugcccuuccagaacaucgacagcagagccgugggcaagugccccagauacgugaagcagagaagccugcugcuggccaccggcaugaagaacgugcccgagauccccaagggcagaggccuguucggcgccaucgccggcuucaucgagaacggcugggagggccugaucgacggcugguacggcuucagacaccagaacgcccagggcgagggcaccgccgccgacuacaagagcacccagagcgccaucgaccagaucaccggcaagcugaacagacugaucgagaagaccaaccagcaguucgagcugaucgacaacgaguucaacgagguggagaagcagaucggcaacgugaucaacuggaccagagacagcaucaccgagguguggagcuacaacgccgagcugcugguggccauggagaaccagcacaccaucgaccuggccgacagcgagauggacaagcuguacgagagagugaagagacagcugagagagaacgccgaggaggacggcaccggcugcuucgagaucuuccacaagugcgacgacgacugcauggccagcaucagaaacaacaccuacgaccacagcaaguacagagaggaggccaugcagaacagaauccagaucgaccccgugaagcugagcagcggcuacaaggacgugauccugugguucagcuucggcgccagcugcuucauccugcuggccaucgugaugggccugguguucaucugcgugaagaacggcaacaugagaugcaccaucugcaucuga

SEQ ID NO: 172412 - RNA, 1683 nt, Artificial Sequence; identical to SEQ ID NO: 172411
  derived and/or modified CDS sequence (opt4) from hemagglutinin__InfluenzaA__AHZ59807

SEQ ID NO: 172413 - RNA, 1683 nt, Artificial Sequence; identical to SEQ ID NO: 172411
  derived and/or modified CDS sequence (opt4) from hemagglutinin__InfluenzaA__AHZ59819

SEQ ID NO: 172414 - RNA, 1683 nt, Artificial Sequence; identical to SEQ ID NO: 170048
  derived and/or modified CDS sequence (opt4) from hemagglutinin__InfluenzaA__AHZ59831

SEQ ID NO: 172415 - RNA, 1683 nt, Artificial Sequence; identical to SEQ ID NO: 170048
  derived and/or modified CDS sequence (opt4) from hemagglutinin__InfluenzaA__AHZ59843

SEQ ID NO: 172416 - RNA, 1683 nt, Artificial Sequence; identical to SEQ ID NO: 170048
  derived and/or modified CDS sequence (opt4) from hemagglutinin__InfluenzaA__AHZ59855

SEQ ID NO: 172417 - RNA, 1683 nt, Artificial Sequence; identical to SEQ ID NO: 172410
  derived and/or modified CDS sequence (opt4) from hemagglutinin__InfluenzaA__AHZ59867

SEQ ID NO: 172418 - RNA, 1683 nt, Artificial Sequence; identical to SEQ ID NO: 170048
  derived and/or modified CDS sequence (opt4) from hemagglutinin__InfluenzaA__AHZ59879

SEQ ID NO: 172419 - RNA, 1683 nt, Artificial Sequence; identical to SEQ ID NO: 172410
  derived and/or modified CDS sequence (opt4) from hemagglutinin__InfluenzaA__AHZ59915

SEQ ID NO: 172420 - RNA, 1683 nt, Artificial Sequence; identical to SEQ ID NO: 170048
  derived and/or modified CDS sequence (opt4) from hemagglutinin__InfluenzaA__AHZ59927

SEQ ID NO: 172421 - RNA, 1683 nt, Artificial Sequence; identical to SEQ ID NO: 172410
  derived and/or modified CDS sequence (opt4) from hemagglutinin__InfluenzaA__AHZ59939

SEQ ID NO: 172422 - RNA, 1683 nt, Artificial Sequence; identical to SEQ ID NO: 170048
  derived and/or modified CDS sequence (opt4) from hemagglutinin__InfluenzaA__AHZ59951

SEQ ID NO: 172423 - RNA, 1683 nt, Artificial Sequence; identical to SEQ ID NO: 170048
  derived and/or modified CDS sequence (opt4) from hemagglutinin__InfluenzaA__AHZ59963

SEQ ID NO: 172424 - RNA, 1683 nt, Artificial Sequence; identical to SEQ ID NO: 170048
  derived and/or modified CDS sequence (opt4) from hemagglutinin__InfluenzaA__AHZ59988

SEQ ID NO: 172425 - RNA, 1683 nt, Artificial Sequence; identical to SEQ ID NO: 170048
  derived and/or modified CDS sequence (opt4) from hemagglutinin__InfluenzaA__AHZ60000

SEQ ID NO: 172426 - RNA, 1683 nt, Artificial Sequence; identical to SEQ ID NO: 170048
  derived and/or modified CDS sequence (opt4) from hemagglutinin__InfluenzaA__AHZ60012

SEQ ID NO: 172427 - RNA, 1683 nt, Artificial Sequence; identical to SEQ ID NO: 170048
  derived and/or modified CDS sequence (opt4) from hemagglutinin__InfluenzaA__AHZ60024

SEQ ID NO: 172428 - RNA, 1683 nt, Artificial Sequence; identical to SEQ ID NO: 172411
  derived and/or modified CDS sequence (opt4) from hemagglutinin__InfluenzaA__AHZ60036

SEQ ID NO: 172429 - RNA, 1683 nt, Artificial Sequence; identical to SEQ ID NO: 172411
  derived and/or modified CDS sequence (opt4) from hemagglutinin__InfluenzaA__AHZ60048

SEQ ID NO: 172430 - RNA, 1683 nt, Artificial Sequence; identical to SEQ ID NO: 172411
  derived and/or modified CDS sequence (opt4) from hemagglutinin__InfluenzaA__AHZ60060

SEQ ID NO: 172431 - RNA, 1683 nt, Artificial Sequence; identical to SEQ ID NO: 172411
  derived and/or modified CDS sequence (opt4) from hemagglutinin__InfluenzaA__AHZ60072

SEQ ID NO: 172432 - RNA, 1683 nt, Artificial Sequence; identical to SEQ ID NO: 172411
  derived and/or modified CDS sequence (opt4) from hemagglutinin__InfluenzaA__AHZ60084

SEQ ID NO: 172433 - RNA, 1683 nt, Artificial Sequence
  derived and/or modified CDS sequence (opt4) from hemagglutinin__InfluenzaA__AHZ60096
augaacacccagauccugguguucgcccugaucgccaucauccccaccaacgccgacaagaucugccugggccaccacgccgugagcaacggcaccaaggugaacacccugaccgagagaggcguggagguggugaacgccaccgagaccguggagagaaccaacauccccagaaucugcagcaagggcaagagaaccguggaccugggccagugcggccugcugggcaccaucaccggccccccccagugcgaccaguuccuggaguucagcgccgaccugaucaucgagagaagagagggcagcgacgugugcuaccccggcaaguucgugaacgaggaggcccugagacagauccugagagagagcggcggcaucgacaaggaggccaugggcuucaccuacagcggcaucagaaccaacggcgccaccagcgccugcagaagaagcggcagcagcuucuacgccgagaugaaguggcugcugagcaacaccgacgacgccgccuucccccagaugaccaagagcuacaagaacaccagaaagagccccgcccugaucguguggggcauccaccacagcgugagcaccgccgagcagaccaagcuguacggcagcggcaacaagcuggugaccgugggcagcagcaacuaccagcagagcuucgugcccagccccggcgccagaccccaggugaacggccugagcggcagaaucgacuuccacuggcugaugcugaaccccaacgacaccgugaccuucagcuucaacggcgccuucaucgcccccgacagagccagcuuccugagaggcaagagcaugggcauccagagcggcgugcagguggacgccaacugcgagggcgacugcuaccacagcggcggcaccaucaucagcaaccugcccuuccagaacaucgacagcagagccgugggcaagugccccagauacgugaagcagagaagccugcugcuggccaccggcaugaagaacgugcccgagauccccaagggcagaggccuguucggcgccaucgccggcuucaucgagaacggcugggagggccugaucgacggcugguacggcuucagacaccagaacgcccagggcgagggcaccgccgccgacuacaagagcacccagagcgccaucgaccagaucaccggcaagcugaacagacugaucgagaagaccaaccagcaguucgagcugaucgacaacgaguucaacgagguggagaagcagaucggcaacgugaucaacuggaccagagacagcaucaccgagguguggagcuacaacgccgagcugcugguggccauggagaaccagcacaccaucgaccuggccgacagcgagauggacaagcuguacgagagagugaagagacagcugagagagaacgccgaggaggacggcaccggcugcuucgagaucuuccacaagugcgacgacgacugcauggccagcaucagaaacaacaccuacgaccacagcaaguacagagaggaggccaugcagaacagaauccagaucgaccccgugaagcugagcagcggcuacaaggacgugauccugugguucagcuucggcgccagcugcuucauccugcuggccaucgugaugggccugguguucaucugcgugaagaacggcaacaugagaugcaccaucugcaucuga

SEQ ID NO: 172434 - RNA, 1701 nt, Artificial Sequence
  derived and/or modified CDS sequence (opt4) from hemagglutinin__InfluenzaA__AIC64889
augaaggccauccugguggugcugcuguacaccuucgccaccgccaacgccgacacccugugcaucggcuaccacgccaacaacagcaccgacaccguggacaccgugcuggagaagaacgugaccgugacccacagcgugaacauccuggaggacaagcacaacggcaagcugugcaagcugagaggcguggccccccugcaccugggcaagugcaacaucgccggcuggauccugggcaaccccgagugcgagagccugagcaccgccagcagcuggagcuacaucguggagaccagcagcagcgacaacggcaccugcuaccccggcgacuucaucgacuacgaggagcugagagagcagcugagcagcgugagcagcuucgagagauucgagaucuuccccaagaccagcagcuggcccaaccacgacagcaacaagggcgugaccgccgccugcccccacgccggcgccaagagcuucuacaagaaccugaucuggcuggugaagaaggagaacagcuaccccaagcugagcaagagcuacaucaacgacaagggcaaggaggugcuggugcuguggggcauccaccaccccagcaccagcgccgaccagcagagccuguaccagaacgccgacgccuacguguucgugggcagcagcagauacagcaagaaguucaagcccgagaucgccaucagacccaaggugagaggccaggagggcagaaugaacuacuacuggacccugguggagcccggcgacaagaucaccuucgaggccaccggcaaccugguggugcccagauacgccuucgccauggagagaaacgccggcagcggcaucaucaucagcgacacccccgugcacgacugcaacaccaccugccagacccccaagggcgccaucaacaccagccugcccuuccagaacauccaccccaucaccaucggcaagugccccaaguacgugaagagcaccaagcugagacuggccaccggccugagaaacgugcccagcauccagagcagaggccuguucggcgccaucgccggcuucaucgagggcggcuggaccggcaugguggacggcugguacggcuaccaccaccagaacgagcagggcagcggcuacgccgccgaccugaagagcacccagaacgccaucgacgagaucaccaacaaggugaacagcgugaucgagaagaugaacacccaguucaccgccgugggcaaggaguucaaccaccuggagaagagaaucgagaaccugaacaagaagguggacgacggcuuccuggacaucuggaccuacaacgccgagcugcuggugcugcuggagaacgagagaacccuggacuaccacgacagcaacgugaagaaccuguacgagaaggugagaagccagcugaagaacaacgccaaggagaucggcaacggcugcuucgaguucuaccacaagugcgacaacaccugcauggagagcgugaagaacggcaccuacgacuaccccaaguacagcgaggaggccaagcugaacagagaggagaucgacggcgugaagcuggagagcaccagaaucuaccagauccuggccaucuacagcaccguggccagcagccuggugcugguggugagccugggcgccaucagcuucuggaugugcagcaacggcagccugcagugcagaaucugcaucuga

SEQ ID NO: 172435 - RNA, 1701 nt, Artificial Sequence; identical to SEQ ID NO: 170100
  derived and/or modified CDS sequence (opt4) from hemagglutinin__InfluenzaA__AIC73738

SEQ ID NO: 172436 - RNA, 1701 nt, Artificial Sequence
  derived and/or modified CDS sequence (opt4) from hemagglutinin__InfluenzaA__AIC73739
augaaggccauccugguggugcugcuguacaccuucgccaccgccaacgccgacacccugugcaucggcuaccacgccaacaacagcaccgacaccguggacaccgugcuggagaagaacgugaccgugacccacagcgugaaccugcuggaggacaagcacaacggcaagcugugcaagcugagaggcguggccccccugcaccugggcaagugcaacaucgccggcuggauccugggcaaccccgagugcgagagccugagcaccgccagcagcuggagcuacaucguggagaccagcagcagcgacaacggcaccugcuaccccggcgacuucaucaacuacgaggagcugagagagcagcugagcagcgugagcagcuucgagagauucgagaucuuccccaagaccagcagcuggcccaaccacgacagcaacaagggcgugaccgccgccugcccccacgccggcgccaagagcuucuacaagaaccugaucuggcuggugaagaagggcaacagcuaccccaagcugagccagagcuacaucaacgacaagggcaaggaggugcuggugcuguggggcauccaccaccccagcaccaccgccgaccagcagagccuguaccagaacgccgacgccuacguguucgugggcaccagcagauacagcaagaaguucaagcccgagaucgccaucagacccaaggugagagaccaggagggcagaaugaacuacuacuggacccugguggagcccggcgacaagaucaccuucgaggccaccggcaaccugguggugcccagauacgccuucaccauggagagacacgccggcagcggcaucaucaucagcgacacccccgugcacgacugcaacaccaccugccagacccccgagggcgccaucaacaccagccugcccuuccagaacauccaccccaucaccaucggcaagugccccaaguacgugaagagcaccaagcugagacuggccaccggccugagaaacgugcccagcauccagagcagaggccuguucggcgccaucgccggcuucaucgagggcggcuggaccggcaugguggacggcugguacggcuaccaccaccagaacgagcagggcagcggcuacgccgccgaccugaagagcacccagaacgccaucgacaagaucaccaacaaggugaacagcgugaucgagaagaugaacacccaguucaccgccgugggcaaggaguucaaccaccuggagaagagaaucgagaaccugaacaagaagguggacgacggcuuccuggacaucuggaccuacaacgccgagcugcuggugcugcuggagaacgagagaacccuggacuaccacgacagcaacgugaagaaccuguacgagaaggugagaaaccagcugaagaacaacgccaaggagaucggcaacggcugcuucgaguucuaccacaagugcgacaacaccugcauggagagcgugaagaacggcaccuacgacuaccccaaguacagcgaggaggccaagcugaacagagagaagaucgacggcgugaagcuggagagcaccagaaucuaccagauccuggccaucuacagcaccguggccagcagccuggugcugguggugagccugggcgccaucagcuucuggaugugcagcaacggcagccugcagugcagaaucugcaucuga

SEQ ID NO: 172437 - RNA, 1701 nt, Artificial Sequence
  derived and/or modified CDS sequence (opt4) from hemagglutinin__InfluenzaA__AIC73740
augaaggccauccugguggugcugcuguacaccuucaccaccgccaacgccgacacccugugcaucggcuaccacgccaacaacagcaccgacaccguggacaccgugcuggagaagaacgugaccgugacccacagcgugaaccugcuggaggacaagcacaacggcaagcugugcaagcugagaggcguggccccccugcaccugggcaagugcaacaucgccggcuggauccugggcaaccccgagugcgagagccugagcaccgccagcagcuggagcuacaucguggagaccagcagcagcgacaacggcaccugcuaccccggcgacuucaucaacuacgaggagcugagagagcagcugagcagcgugagcagcuucgagagauucgagaucuuccccaagaccagcagcuggcccaaccacgacagcaacaagggcgugaccgccgccugcccccacgccggcgccaagagcuucuacaagaaccugaucuggcuggugaagaagggcaacagcuaccccaagcugagccagagcuacaucaacgacaagggcaaggaggugcuggugcuguggggcauccaccacccccccaccaccgccgaccagcagagccuguaccagaacgccgacgccuacguguucgugggcaccagcagauacagcaagaaguucaagcccgagaucgccaucagacccaaggugagagaccaggagggcagaaugaacuacuacuggacccugguggagcccggcgacaagaucaccuucgaggccaccggcaaccugguggugcccagauacgccuucaccauggagagaaacgccggcagcggcaucaucaucagcgacacccccgugcacgacugcaacaccaccugccagacccccgagggcgccaucaacaccagccugcccuuccagaacauccaccccaucaccaucggcaagugccccaaguacgugaagagcaccaagcugagacuggccaccggccugagaaacgugcccagcauccagagcagaggccuguucggcgccaucgccggcuucaucgagggcggcuggaccggcaugguggacggcugguacggcuaccaccaccagaacgagcagggcagcggcuacgccgccgaccugaagagcacccagaacgccaucgacaagaucaccaacaaggugaacagcgugaucgagaagaugaacacccaguucaccgccgugggcaaggaguucaaccaccuggagaagagaaucgagaaccugaacaagaagguggacgacggcuuccuggacaucuggaccuacaacgccgagcugcuggugcugcuggagaacgagagaacccuggacuaccacgacagcaacgugaagaaccuguacgagaaggugagaaaccagcugaagaacaacgccaaggagaucggcaacggcugcuucgaguucuaccacaagugcgacaacaccugcauggagagcgugaagaacggcaccuacgacuaccccaaguacagcgaggaggccaagcuggacagagagaagaucgacggcgugagacuggagagcaccagaaucuaccagauccuggccaucuacagcaccguggccagcagccuggugcugguggugagccugggcgccaucagcuucuggaugugcagcaacggcagccugcagugcagaaucugcaucuga

SEQ ID NO: 172438 - RNA, 1701 nt, Artificial Sequence
  derived and/or modified CDS sequence (opt4) from hemagglutinin__InfluenzaA__AIC73741
augaagaccaucaucgcccugagcuacauccugugccugguguucgcccagaagcugcccggcaacgacaacagcaccgccacccugugccugggccaccacgccgugcccaacggcaccaucgugaagaccaucaccaacgacagaaucgaggugaccaacgccaccgagcuggugcagaacagcagcaucggcgagaucugcgacagcccccaccagauccuggacggcgagaacugcacccugaucgacgcccugcugggcgacccccacugcgacggcuuccagaacaagaagugggaccuguucguggagagaagcaaggccuacagcaacugcuaccccuacgacgugcccgacuacgccagccugagaagccugguggccagcagcggcacccuggaguucaacaacgagagcuucaacugggccggcgugacccagaacggcaccagcagcgccugcaucagaggcagcaacagcagcuucuucagcagacugaacuggcugacccaccugaacuucaaguaccccgcccugaacgugaccaugcccaacaacgagcaguucgacaagcuguacaucuggggcgugcaccaccccggcaccgacaaggaccagaucuuccuguacgcccagagcagcggcagaaucaccgugagcaccaagagaagccagcaggccgugauccccaacaucggcagcagacccagaaucagaaacauccccagcagaaucagcaucuacuggaccaucgugaagcccggcgacauccugcugaucaacagcaccggcaaccugaucgcccccagaggcuacuucaagaucagaagcggcaagagcagcaucaugagaagcgacgcccccaucggcaagugcaagagcgagugcaucacccccaacggcagcauccccaacgacaagcccuuccagaacgugaacagaaucaccuacggcgccugccccagauacgugaagcagagcacccugaagcuggccaccggcaugagaaacgugcccgagaagcagaccagaggcaucuucggcgccaucgccggcuucaucgagaacggcugggagggcaugauggacggcugguacggcuucagacaccagaacagcgagggcagaggccaggccgccgaccugaagagcacccaggccgccaucgaccagaucaacggcaagcugaacagacugaucggcaagaccaacgagaaguuccaccagaucgagaaggaguucagcgagguggagggcagaauccaggaccuggagaaguacguggaggacaccaagaucgaccuguggagcuacaacgccgagcugcugguggcccuggagaaccagcacaccaucgaccugaccgacagcgagaugaacaagcuguucgagaagaccaagaagcagcugagagagaacgccgaggacaugggcaacggcugcuucaagaucuaccacagaugcgacaacgccugcaucggcagcaucagaaacggcaccuacgaccacaacguguacagagacgaggcccugaacaacagauuccagaucagaggcguggagcugaagagcggcuacaaggacuggauccuguggaucagcuucgccaucagcugcuuccugcugugcguggcccugcugggcuucaucaugugggccugccagaagggcaacaucagaugcaacaucugcaucuga

SEQ ID NO: 172439 - RNA, 1701 nt, Artificial Sequence
  derived and/or modified CDS sequence (opt4) from hemagglutinin__InfluenzaA__AIC73742
augaaggccauccugguggugcugcuguacaccuucgccaccgccaacgccgacacccugugcaucggcuaccacgccaacaacagcaccgacaccguggacaccgugcuggagaagaacgugaccgugacccacagcgugaaccugcuggaggacaagcacaacggcaagcugugcaagcugagaggcguggccccccugcaccugggcaagugcaacaucgccggcuggauccugggcaaccccgagugcgagagccugagcaccgccagcagcuggagcuacaucguggagaccagcagcagcgacaacggcaccugcuaccccggcgacuucaucaacuacgaggagcugagagagcagcugagcagcgugagcagcuucgagagauucgagaucuuccccaagaccagcagcuggcccaaccacgacagcaacaagggcgugaccgccgccugcccccacgccggcgccaagagcuucuacaagaaccugaucuggcuggugaagaagggcaacagcuaccccaagcugagacagagcuacaucaacgacaagggcaaggaggugcuggugcuguggggcauccaccaccccagcaccaccaccgaccagcagagccuguaccagaacgccgacgccuacguguucgugggcaccagcagauacagcaagaaguucaagcccgagaucgccaucagacccaaggugagagaccaggagggcagaaugaacuacuacuggacccugguggagcccggcgacaagaucaccuucgaggccaccggcaaccugguggugcccagauacgccuucaccauggagagaaacgccggcagcggcaucaucaucagcgacacccccgugcacgacugcaacaccaccugccagacccccgagggcgccaucaacaccagccugcccuuccagaacauccaccccaucaccaucggcaagugccccaaguacgugaagagcaccaagcugagacuggccaccggccugagaaacgugcccagcauccagagcagaggccuguucggcgccaucgccggcuucaucgagggcggcuggaccggcaugguggacggcugguacggcuaccaccaccagaacgagcagggcagcggcuacgccgccgaccugaagagcacccagaacgccaucgacaagaucaccaacaaggugaacagcgugaucgagaagaugaacacccaguucaccgccgugggcaaggaguucaaccaccuggagaagagaaucgagaaccugaacagaaagguggacgacggcuuccuggacaucuggaccuacaacgccgagcugcuggugcugcuggagaacgagagaacccuggacuaccacgacagcaacgugaagaaccuguacgagaaggugagaaaccagcugaagaacaacgccaaggagaucggcaacggcugcuucgaguucuaccacaagugcgacaacaccugcauggagagcgugaagaacggcaccuacgacuaccccaaguacagcgaggaggccaagcugaacagagagaagaucgacggcgugaagcuggagagcaccagaaucuaccagauccuggccaucuacagcaccguggccagcagccuggugcugguggugagccugggcgccaucagcuucuggaugugcagcaacggcagccugcagugcagaaucugcaucuga

SEQ ID NO: 172440 - RNA, 1701 nt, Artificial Sequence; identical to SEQ ID NO: 172439
  derived and/or modified CDS sequence (opt4) from hemagglutinin__InfluenzaA__AIC73743

SEQ ID NO: 172441 - RNA, 1701 nt, Artificial Sequence
  derived and/or modified CDS sequence (opt4) from hemagglutinin__InfluenzaA__AIC73744
augaaggccauccugguggugcugcuguacaccuucgccaccgccaacgccgacacccugugcaucggcuaccacgccaacaacagcaccgacaccguggacaccgugcuggagaagaacgugaccgugacccacagcgugaaccugcuggaggacaagcacaacggcaagcugugcaagcugagaggcguggccccccugcaccugggcaagugcaacaucgccggcuggauccugggcaaccccgagugcgagagccugagcaccgccagcagcuggagcuacaucguggagaccagcagcagcgacaacggcaccugcuaccccggcgacuucaucaacuacgaggagcugagagagcagcugagcagcgugagcagcuucgagagauucgagaucuuccccaagaccagcagcuggcccaaccacgacagcaacaagggcgugaccgccgccugcccccacgccggcgccaagagcuucuacaagaaccugaucuggcuggugaagaagggcaacagcuaccccaagcugaaccagagcuacaucaacgacaagggcaaggaggugcuggugcuguggggcauccaccaccccagcaccaccgccgaccagcagagccuguaccagaacgccgacgccuacguguucgugggcaccagcagauacagcaagaaguucaagcccgagaucgccaucagacccaaggugagagaccaggagggcagaaugaacuacuacuggacccugguggagcccggcgacaagaucaccuucgaggccaccggcaaccugguggugcccagauacgccuucaccauggagagaaacgccggcagcggcaucaucaucagcgacacccccgcccacgacugcaacaccaccugccagacccccgagggcgccaucaacaccagccugcccuuccagaacauccaccccaucaccaucggcaagugccccaaguacgugaagagcaccaagcugagacuggccaccggccugagaaacgugcccagcauccagagcagaggccuguucggcgccaucgccggcuucaucgagggcggcuggaccggcaugguggacggcugguacggcuaccaccaccagaacgagcagggcagcggcuacgccgccgaccugaagagcacccagaacgccaucgacaagaucaccaacaaggugaacagcgugaucgagaagaugaacacccaguucaccgccgugggcaaggaguucaaccaccuggagaagagaaucgagaaccugaacaagaagguggacgacggcuuccuggacaucuggaccuacaacgccgagcugcuggugcugcuggagaacgagagaacccuggacuaccacgacagcaacgugaagaaccuguacgagaaggugagaaaccagcugaagaacaacgccaaggagaucggcaacggcugcuucgaguucuaccacaagugcgacaacaccugcauggagagcgugaagaacggcaccuacgacuaccccaaguacagcgaggaggccaagcugaacagagagaagaucgacggcgugaagcuggagagcaccagaaucuaccagauccuggccaucuacagcaccguggccagcagccuggugcugguggugagccugggcgccaucagcuucuggaugugcagcaacggcagccugcagugcagaaucugcaucuga

SEQ ID NO: 172442 - RNA, 1701 nt, Artificial Sequence
  derived and/or modified CDS sequence (opt4) from hemagglutinin__InfluenzaA__AIC73745
augaaggccauccugguggugcugcuguacaccuucgccaccgccaacgccgacacccugugcaucggcuaccacgccaacaacagcaccgacaccguggacaccgugcuggagaagaacgugaccgugacccacagcgugaaccugcuggaggacaagcacaacggcaagcugugcaagcugagaggcguggccccccugcaccugggcaagugcaacaucgccggcuggauccugggcaaccccgagugcgagagccugagcaccgccagcagcuggagcuacaucguggagaccagcagcagcgacaacggcaccugcuaccccggcgacuucaucaacuacgaggagcugagagagcagcugagcagcgugagcagcuucgagagauucgagaucuuccccaagaccagcagcuggcccaaccacgacagcaacaagggcgugaccgccgccugcccccacgccggcgccaagagcuucuacaagaaccugaucuggcuggugaagaagggcaacagcuaccccaagcugagccagagcuacaucaacgacaagggcaaggaggugcuggugcuguggggcauccaccaccccagcaccaccgccgaccagcagagccuguaccagaacgccgacgccuacguguucgugggcaccagcagauacagcaagaaguucaagcccgagaucgccaucagacccaaggugagagaccaggagggcagaaugaacuacuacugggcccugguggagcccggcgacaagaucaccuucgaggccaccggcaaccugguggugcccagauacgccuucaccauggagagaaacgccggcagcggcaucaucaucagcgacacccccgugcacgacugcaacaccaccugccagacccccgagggcgccaucaacaccagccugcccuuccagaacauccaccccaucaccaucggcaagugccccaaguacgugaagagcaccaagcugagacuggccaccggccugagaaacauccccagcauccagagcagaggccuguucggcgccaucgccggcuucaucgagggcggcuggaccggcaugguggacggcugguacggcuaccaccaccagaacgagcagggcagcggcuacgccgccgaccugaagagcacccagaacgccaucgacaagaucaccaacaaggugaacagcgugaucgagaagaugaacacccaguucaccgccgugggcaaggaguucaaccaccuggagaagagaaucgagaaccugaacaagaagguggacgacggcuuccuggacaucuggaccuacaacgccgagcugcuggugcugcuggagaacgagagaacccuggacuaccacgacagcaacgugaagaaccuguacgagaaggugagaaaccagcugaagaacaacgccaaggagaucggcaacggcugcuucgaguucuaccacaagugcgacaacaccugcauggagagcgugaagaacggcaccuacgacuaccccaaguacagcgaggaggccaagcugaacagagagaagaucgacggcgugaagcuggagagcaccagaaucuaccagauccuggccaucuacagcaccguggccagcagccuggugcugguggugagccugggcgccaucagcuucuggaugugcagcaacggcagccugcagugcagaaucugcaucuga

SEQ ID NO: 172443 - RNA, 1701 nt, Artificial Sequence
  derived and/or modified CDS sequence (opt4) from hemagglutinin__InfluenzaA__AIC73746
augaaggccauccugguggugcugcuguacaccuucgccaccgccaacgccgacacccugugcaucggcuaccacgccaacaacagcaccgacaccguggacaccgugcuggagaagaacgugaccgugacccacagcgugaaccugcuggaggacaagcacaacggcaagcugugcaagcugagaggcgugaccccccugcaccugggcaagugcaacaucgccggcuggauccugggcaaccccgagugcgagagccugagcaccgccagcagcuggagcuacaucguggagaccagcagcagcgacaacggcaccugcuaccccggcgacuucaucaacuacgaggagcugagagagcagcugagcagcgugagcagcuucgagagauucgagaucuuccccaagaccagcagcuggcccaaccacgacagcaacaagggcgugaccgccgccugcccccacgccggcgccaagagcuucuacaagaaccugaucuggcuggugaagaagggcaacagcuaccccaagcugagccagagcuacaucaacgacaagggcaaggaggugcuggugcuguggggcauccaccaccccagcaccaccaccgaccagcagagccuguaccagaacgccgacgccuacguguucgugggcaccagcagauacagcaagaaguucaagcccgagaucgccaucagacccaaggugagagaccaggagggcagaaugaacuacuacuggacccugguggagcccggcgacaagaucaccuucgaggccaccggcaaccugguggugcccagauacgccuucaccauggagagaaacgccggcagcggcaucaucaucagcgacacccccgugcacgacugcaacaccaccugccagacccccgagggcgccaucaacaccagccugcccuuccagaacauccaccccaucaccaucggcaagugccccaaguacgugaagagcaccaagcugagacuggccaccggccugagaaacgugcccagcauccagagcagaggccuguucggcgccaucgccggcuucaucgagggcggcuggaccggcaugguggacggcugguacggcuaccaccaccagaacgagcagggcagcggcuacgccgccgaccugaagagcacccagaacgccaucgacaagaucaccaacaaggugaacagcgugaucgagaagaugaacacccaguucaccgccgugggcaaggaguucaaccaccuggagaagagaaucgagaaccugaacaagaagguggacgacggcuuccuggacaucuggaccuacaacgccgagcugcuggugcugcuggagaacgagagaacccuggacuaccacgacagcaacgugaagaaccuguacgagaaggugagaaaccagcugaagaacaacgccaaggagaucggcaacggcugcuucgaguucuaccacaagugcgacaacaccugcauggagagcgugaagaacggcaccuacgacuaccccaaguacagcgaggaggccaagcugaacagagagaagaucgacggcgugaagcuggagagcaccagaaucuaccagauccuggccaucuacagcaccguggccagcagccuggugcugguggugagccugggcgccaucagcuucuggaugugcagcaacggcagccugcagugcagaaucugcaucuga

SEQ ID NO: 172444 - RNA, 1701 nt, Artificial Sequence
  derived and/or modified CDS sequence (opt4) from hemagglutinin__InfluenzaA__AIC73747
augaaggccauccugguggugcugcuguacacccuggccaccgccaacgccgacacccugugcaucggcuaccacgccaacaacagcaccgacaccguggacaccgugcuggagaagaacgugaccgugacccacagcgugaaccugcuggaggacaagcacaacggcaagcugugcaagcugagaggcguggccccccugcaccugggcaagugcaacaucgccggcuggauccugggcaaccccgagugcgagagccugagcaccgccagcagcuggagcuacaucguggagaccagcagcagcgacaacggcaccugcuaccccggcgacuucaucaacuacgaggagcugagagagcagcugagcagcgugagcagcuucgagagauucgagaucuuccccaagaccagcagcuggcccaaccacgacagcaacaagggcgugaccgccgccugcccccacgccggcgccaagagcuucuacaagaaccugaucuggcuggugaagaagggcaacagcuaccccaagcugagccagagcuacaucaacgacaagggcaaggaggugcuggugcuguggggcauccaccaccccagcaccaccgccgaccagcagagccuguaccagaacgccgacgccuacguguucgugggcaccagcagauacagcaagaaguucaagcccgagaucgccaucagacccaaggugagagaccaggagggcagaaugaacuacuacuggacccugguggagcccggcgacaagaucaccuucgaggccaccggcaaccugguggugcccagauacgccuucaccauggagagaaacaccggcagcggcaucaucaucagcgacacccccgugcacgacugcaacaccaccugccagacccccgagggcgccaucaacaccagccugcccuuccagaacauccaccccaucaccaucggcaagugccccaaguacgugaagagcaccaagcugagacuggccaccggccugagaaacgugcccagcauccagagcagaggccuguucggcgccaucgccggcuucaucgagggcggcuggaccggcaugguggacggcugguacggcuaccaccaccagaacgagcagggcagcggcuacgccgccgaccugaagagcacccagaacgccaucgacaagaucaccaacaaggugaacagcgugaucgagaagaugaacacccaguucaccgccgugggcaaggaguucaaccaccuggagaagagaaucgagaaccugaacaagaagguggacgacggcuuccuggacaucuggaccuacaacgccgagcugcuggugcugcuggagaacgagagaacccuggacuaccacgacagcaacgugaagaaccuguacgagaaggugagaaaccagcugaagaacaacgccaaggagaucggcaacggcugcuucgaguucuaccacaagugcgacaacaccugcauggagagcgugaagaacggcaccuacgacuaccccaaguacagcgaggaggccaagcugaacagagagaagaucgacggcgugaagcuggagagcaccagaaucuaccagauccuggccaucuacagcaccguggccagcagccuggugcugguggugagccugggcgccaucagcuucuggaugugcagcaacggcagccugcagugcagaaucugcaucuga

SEQ ID NO: 172445 - RNA, 1701 nt, Artificial Sequence; identical to SEQ ID NO: 170100
  derived and/or modified CDS sequence (opt4) from hemagglutinin__InfluenzaA__AIC73748

SEQ ID NO: 172446 - RNA, 1701 nt, Artificial Sequence
  derived and/or modified CDS sequence (opt4) from hemagglutinin__InfluenzaA__AIC73749
augaagaccaucaucgcccugagcuacauccugugccugguguucgcccagaagcugcccggcaacgacaacagcaccgccacccugugccugggccaccacgccgugcccaacggcaccaucgugaagaccaucaccaacgacagaaucgaggugaccaacgccaccgagcuggugcagaacagcagcaucggcgagaucugcgacagcccccaccagauccuggacggcaagaacugcacccugaucgacgcccugcugggcgacccccagugcgacggcuuccagaacaagagaugggaccuguucguggagagaagcaaggccuacagcaacugcuaccccuacgacgugcccgacuacgccagccugagaagccugguggccagcagcggcacccuggaguucaacgacgagagcuucaacugggccggcgugacccagaacggcaccagcagcgccugcaucagaggcagcaacagcagcuucuucagcagacugaacuggcugacccacagcaacuucaaguaccccgcccugaacgugaccaugcccaacaacgagcaguucgacaagcuguacaucuggggcgugcaccaccccggcaccgacaaggaccagaucuuccuguacgcccacagcagcggcagaaucaccgugagcaccaagagaagccagcaggccgugauccccaacaucggcagcagacccagaaucagaaacauccccagcagaaucagcaucuacuggaccaucgugaagcccggcgacauccugcugaucaacagcaccggcaaccugaucgcccccagaggcuacuucaagauccagagcggcaagagcagcaucaugagaagcgacgcccccaucggcaagugcaagagcgagugcaucacccccaacggcagcaucaccaacgacaagcccuuccagaacgugaacagaaucaccuacggcgccugccccagauacgugaagcagagcacccugaagcuggccaccggcaugagaaacgugcccgagaagcagaccagaggcaucuucggcgccaucgccggcuucaucgagaacggcugggagggcaugaaggacggcugguacggcuucagacaccagaacagcgagggcagaggccaggccgccgaccugaagagcacccaggccgccaucgaccagaucaacggcaagcugaacagacugaucggcaagaccaacgagaaguuccaccagaucgagaaggaguucagcgagguggagggcagaauccaggaccuggagaaguacguggaggacaccaagaucgaccuguggagcuacaacgccgagcugcugguggcccuggagaaccagcacaccaucgaccugaccgacagcgagaugaacaagcuguucgagaagaccaagaagcagcugagagagaacgccgaggacaugggcaacggcugcuucaagaucuaccacaagugcgacaacgccugcaucggcagcaucagaaacggcaccuacgaccacgacguguacagagacgaggcccugaacaacagauuccagaucaagggcguggagcugaagagcggcuacaaggacuggauccuguggaucagcuucgccaucagcugcuuccugcugugcguggcccugcugggcuucaucaugugggccugccagaagggcaacaucagaugcaacaucugcaucuga

SEQ ID NO: 172447 - RNA, 1701 nt, Artificial Sequence; identical to SEQ ID NO: 170100
  derived and/or modified CDS sequence (opt4) from hemagglutinin__InfluenzaA__AIC73750

SEQ ID NO: 172448 - RNA, 1701 nt, Artificial Sequence
  derived and/or modified CDS sequence (opt4) from hemagglutinin__InfluenzaA__AIC73754
augaaggccauccugguggugcugcuguacaccuucgccaccgccaacgccgacacccugugcaucggcuaccacgccaacaacagcaccgacaccguggacaccgugcuggagaagaacgugaccgugacccacagcgugaaccugcuggaggacaagcacaacggcaagcugugcaagcugagaggcguggccccccugcaccugggcaagugcaacaucgccggcuggauccugggcaaccccgagugcgagagccugagcaccgccagcagcuggagcuacaucguggagaccagcagcagcgacaacggcaccugcuaccccggcgacuucaucaacuacgaggagcugagagagcagcugagcagcgugagcagcuucgagagauucgagaucuuccccaagaccagcagcuggcccaaccacgacagcaacaagggcgugaccgccgccugcccccacgccggcgccaagagcuucuacaagaaccugaucuggcuggugaagaagggcaacagcuaccccaagcugagccagagcuacaucaacgacaagggcaaggaggugcuggugcuguggggcauccaccaccccagcaccaccgccgaccagcagagccuguaccagaacgccgacgccuacguguucgugggcaccagcagauacagcagaaaguucaagcccgagaucgccaucagacccaaggugagagaccaggagggcagaaugaacuacuacuggacccugguggagcccggcgacaagaucaccuucgaggccaccggcaaccugguggugcccagauacgccuucaccauggagagaaacgccggcagcggcaucaucaucagcgacacccccgugcacgacugcaacaccaccugccagacccccgagggcgccaucaacaccagccugcccuuccagaacauccaccccaucaccaucggcaagugccccaaguacgugaagagcaccaagcugagacuggccaccggccugagaaacgugcccagcauccagagcagaggccuguucggcgccaucgccggcuucaucgagggcggcuggaccggcaugguggacggcugguacggcuaccaccaccagaacgagcagggcagcggcuacgccgccgaccugaagagcacccagaacgccaucgacaagaucaccaacaaggugaacagcgugaucgagaagaugaacacccaguucaccgccgugggcaaggaguucaaccaccuggagaagagaaucgagaaccugaacaagaagguggacgacggcuuccuggacaucuggaccuacaacgccgagcugcuggugcugcuggagaacgagagaacccuggacuaccacgacagcaacgugaagaaccuguacgagaaggugagaaaccagcugaagaacaacgccaaggagaucggcaacggcugcuucgaguucuaccacaagugcgacaacaccugcauggagagcgugaagaacggcaccuacgacuaccccaaguacagcgaggaggccaagcugaacagagagaagaucgacggcgugaagcuggagagcaccagaaucuaccagauccuggccaucuacagcaccguggccagcagccuggugcugguggugagccugggcgccaucagcuucuggaugugcagcaacggcagccugcagugcagaaucugcaucuga

SEQ ID NO: 172449 - RNA, 1701 nt, Artificial Sequence; identical to SEQ ID NO: 170100
  derived and/or modified CDS sequence (opt4) from hemagglutinin__InfluenzaA__AIC73755

SEQ ID NO: 172450 - RNA, 1701 nt, Artificial Sequence; identical to SEQ ID NO: 170100
  derived and/or modified CDS sequence (opt4) from hemagglutinin__InfluenzaA__AIC73756

SEQ ID NO: 172451 - RNA, 1701 nt, Artificial Sequence; identical to SEQ ID NO: 170100
  derived and/or modified CDS sequence (opt4) from hemagglutinin__InfluenzaA__AIC73757

SEQ ID NO: 172452 - RNA, 1701 nt, Artificial Sequence
  derived and/or modified CDS sequence (opt4) from hemagglutinin__InfluenzaA__AIC73758
augaaggccauccugguggugcugcuguacaccuucgccaccgccaacgccgacacccugugcaucggcuaccacgccaacaacagcaccgacaccguggacaccgugcuggagaagaacgugaccgugacccacagcgugaaccugcuggaggacaagcacaacggcaagcugugcaagcugagaggcaucgccccccugcaccugggcaagugcaacaucgccggcuggauccugggcaaccccgagugcgagagccugagcaccgccagcagcuggagcuacaucguggagaccagcagcagcgacaacggcaccugcuaccccggcgacuucaucaacuacgaggagcugagagagcagcugagcagcgugagcagcuucgagagauucgagaucuuccccaagaccagcagcuggcccaaccacgacagcaacaagggcgugaccgccgccugcccccacgccggcgccaagagcuucuacaagaaccugaucuggcuggugaagaagggcaacagcuaccccaagcugagccagagcuacaucaacgacaagggcaaggaggugcuggugcuguggggcauccaccaccccagcaccaccgccgaccagcagagccuguaccagaacgccgacgccuacguguucgugggcaccagcagauacagcaagaaguucaagcccgagaucgccaucagacccaaggugagagaccaggagggcagaaugaacuacuacuggacccugguggagcccggcgacaagaucaccuucgaggccaccggcaaccugguggugcccagauacgccuucaccauggagagaaacgccggcagcggcaucaucaucagcgacacccccgugcacgacugcaacaccaccugccagacccccgagggcgccaucaacaccagccugcccuuccagaacauccaccccaucaccaucggcaagugccccaaguacgugaagagcaccaagcugagacuggccaccggccugagaaacgugcccagcauccagagcagaggccuguucggcgccaucgccggcuucaucgagggcggcuggaccggcaugguggacggcugguacggcuaccaccaccagaacgagcagggcagcggcuacgccgccgaccugaagagcacccagaacgccaucgacaagaucaccaacaaggugaacagcgugaucgagaagaugaacacccaguucaccgccgugggcaaggaguucaaccaccuggagaagagaaucgagaaccugaacaagaagguggacgacggcuuccuggacaucuggaccuacaacgccgagcugcuggugcugcuggagaacgagagaacccuggacuaccacgacagcaacgugaagaaccuguacgagaaggugagaaaccagcugaagaacaacgccaaggagaucggcaacggcugcuucgaguucuaccacaagugcgacaacaccugcauggagagcgugaagaacggcaccuacgacuaccccaaguacagcgaggaggccaagcugaacagagagaagaucgacggcgugaagcuggagagcaccagaaucuaccagauccuggccaucuacagcaccguggccagcagccuggugcugguggugagccugggcgccaucagcuucuggaugugcagcaacggcagccugcagugcagaaucugcaucuga

SEQ ID NO: 172453 - RNA, 1701 nt, Artificial Sequence
  derived and/or modified CDS sequence (opt4) from hemagglutinin__InfluenzaA__AIC73760
augaaggccauccugaucgugcugcuguacaccuucgccaccgccaacgccgacacccugugcaucggcuaccacgccaacaacagcaccgacaccguggacaccgugcuggagaagaacgugaccgugacccacagcgugaaccugcuggaggacaagcacaacggcaagcugugcaagcugagaggcguggccccccugcaccugggcaagugcaacaucgccggcuggauccugggcaaccccgagugcgagagccugagcaccgccagcagcuggagcuacaucguggagaccagcagcagcgacaacggcaccugcuaccccggcgacuucaucaacuacgaggagcugagagagcagcugagcagcgugagcagcuucgagagauucgagaucuuccccaagaccagcagcuggcccaaccacgacagcaacaagggcgugaccgccgccugcccccacgccggcgccaagagcuucuacaagaaccugaucuggcuggugaagaagggcaacagcuaccccaagcugagccagagcuacaucaacgacaagggcaaggaggugcuggugcuguggggcauccaccaccccagcaccaccgccgaccagcagagccuguaccagaacgccgacgccuacguguucgugggcaccagcagauacagcaagaaguucaagcccgagaucgccaucagacccaaggugagagaccaggagggcagaaugaacuacuacuggacccugguggagcccggcgacaagaucaccuucgaggccaccggcaaccugguggugcccagauacgccuucaccauggagagaaacgccggcagcggcaucaucaucagcgacacccccgugcacgacugcaacaccaccugccagacccccgagggcgccaucaacaccagccugcccuuccagaacauccaccccaucaccaucggcaagugccccaaguacgugaagagcaccaagcugagacuggccaccggccugagaaacgugcccagcauccagagcagaggccuguucggcgccaucgccggcuucaucgagggcggcuggaccggcaugguggacggcugguacggcuaccaccaccagaacgagcagggcagcggcuacgccgccgaccugaagagcacccagaacgccaucgacaagaucaccaacaaggugaacagcgugaucgagaagaugaacacccaguucaccgccgugggcaaggaguucaaccaccuggagaagagaaucgagaaccugaacaagaagguggacgacggcuuccuggacaucuggaccuacaacgccgagcugcuggugcugcuggagaacgagagaacccuggacuaccacgacagcaacgugaagaaccuguacgagaaggugagaaaccagcugaagaacaacgccaaggagaucggcaacggcugcuucgaguucuaccacaagugcgacaacaccugcauggagagcgugaagaacggcaccuacgacuaccccaaguacagcgaggaggccaagcugaacagagagaagaucgacggcgugaagcuggagagcaccagaaucuaccagauccuggccaucuacagcaccguggccagcagccuggugcugguggugagccugggcgccaucagcuucuggaugugcagcaacggcagccugcagugcagaaucugcaucuga

SEQ ID NO: 172454 - RNA, 1701 nt, Artificial Sequence; identical to SEQ ID NO: 172453
  derived and/or modified CDS sequence (opt4) from hemagglutinin__InfluenzaA__AIC73761

SEQ ID NO: 172455 - RNA, 1701 nt, Artificial Sequence; identical to SEQ ID NO: 171980
  derived and/or modified CDS sequence (opt4) from hemagglutinin__InfluenzaA__AIC73762

SEQ ID NO: 172456 - RNA, 1701 nt, Artificial Sequence
  derived and/or modified CDS sequence (opt4) from hemagglutinin__InfluenzaA__AIC73763
augaaggccauccugguggugcugcuguacaccuucgccaccgccaacgccgacacccugugcaucggcuaccacgccaacaacagcaccgacaccguggacaccgugcuggagaagaacgugaccgugacccacagcgugaaccugcuggaggacaagcacaacggcaagcugugcaagcugagaggcguggccccccugcaccugggcaagugcaacaucgccggcuggauccugggcaaccccgagugcgagagccugagcaccgccagcagcuggagcuacaucguggagaccagcagcagcgacaacggcaccugcuaccccggcgacuucaucaacuacgaggagcugagagagcagcugagcagcgugagcagcuucgagagauucgagaucuuccccaagaccagcagcuggcccaaccacgacagcaacaagggcgugaccgccgccugcccccacgccggcgccaagagcuucuacaagaaccugaucuggcuggugaagaagggcaacagcuaccccaagaucagccagagcuacaucaacgacaagggcaaggaggugcuggugcuguggggcauccaccaccccagcaccaccgccgaccagcagagccuguaccagaacgccgacgccuacguguucgugggcaccagcagauacagcaagaaguucaagcccgagaucgccaucagacccaaggugagagaccaggagggcagaaugaacuacuacuggacccugguggagcccggcgacaagaucaccuucgaggccaccggcaaccugguggugcccagauacgccuucaccauggagagaaacgccggcagcggcaucaucaucagcgacacccccgugcacgacugcaacaccaccugccagacccccgagggcgccaucaacaccagccugcccuuccagaacauccaccccaucaccaucggcaagugccccaaguacgugaagagcaccaagcugagacuggccaccggccugagaaacgugcccagcauccagagcagaggccuguucggcgccaucgccggcuucaucgagggcggcuggaccggcaugguggacggcugguacggcuaccaccaccagaacgagcagggcagcggcuacgccgccgaccugaagagcacccagaacgccaucgacaagaucaccaacaaggugaacagcgugaucgagaagaugaacacccaguucaccgccgugggcaaggaguucaaccaccuggagaagagaaucgagaaccugaacaagaagguggacgacggcuuccuggacaucuggaccuacaacgccgagcugcuggugcugcuggagaacgagagaacccuggacuaccacgacagcaacgugaagaaccuguacgagaaggugagaaaccagcugaagaacaacgccaaggagaucggcaacggcugcuucgaguucuaccacaagugcgacaacaccugcauggagagcgugaagaacggcaccuacgacuaccccaaguacagcgaggaggccaagcugaacagagagaagaucgacggcgugaagcuggagagcaccagaaucuaccagauccuggccaucuacagcaccguggccagcagccuggugcugguggugagccugggcgccaucagcuucuggaugugcagcaacggcagccugcagugcagaaucugcaucuga

SEQ ID NO: 172457 - RNA, 1701 nt, Artificial Sequence; identical to SEQ ID NO: 170100
  derived and/or modified CDS sequence (opt4) from hemagglutinin__InfluenzaA__AIC73765

SEQ ID NO: 172458 - RNA, 1701 nt, Artificial Sequence; identical to SEQ ID NO: 170100
  derived and/or modified CDS sequence (opt4) from hemagglutinin__InfluenzaA__AIC73766

SEQ ID NO: 172459 - RNA, 1701 nt, Artificial Sequence
  derived and/or modified CDS sequence (opt4) from hemagglutinin__InfluenzaA__AIC73767
augaaggccauccugguggugcugcuguacaccuucgccaccgccaacgccgacacccugugcaucggcuaccacgccaacaacagcaccgacaccguggacaccgugcuggagaagaacgugaccgugacccacagcgugaaccugcuggaggacaagcacaacggcaagcugugcaagcugagaggcguggccccccugcaccugggcaagugcaacaucgccggcuggauccugggcaaccccgagugcgagagccugagcaccgccagcagcuggagcuacaucguggagaccagcagcagcgacaacggcaccugcuaccccggcgacuucaucaacuacgaggagcugagagagcagcugagcagcgugagcagcuucgagagauucgagaucuuccccaagaccagcagcuggcccaaccacgacagcaacaagggcgugaccgccgccugcccccacgccggcgccaagagcuucuacaagaaccugaucuggcugaucaagaagggcaacagcuaccccaagcugagccagagcuacaucaacgacaagggcaaggaggugcuggugcuguggggcauccaccaccccagcaccaccgccgaccagcagagccuguaccagaacgccgacgccuacguguucgugggcaccagcagauacagcaagaaguucaagcccgagaucgccaucagacccaaggugagagaccaggagggcagaaugaacuacuacuggacccugguggagcccggcgacaagaucaccuucgaggccaccggcaaccugguggugcccagauacgccuucaccauggagagaaacgccggcagcggcaucaucaucagcgacacccccgugcacgacugcaacaccaccugccagacccccgagggcgccaucaacaccagccugcccuuccagaacauccaccccaucaccaucggcaagugccccaaguacgugaagagcaccaagcugagacuggccaccggccugagaaacauccccagcauccagagcagaggccuguucggcgccaucgccggcuucaucgagggcggcuggaccggcaugguggacggcugguacggcuaccaccaccagaacgagcagggcagcggcuacgccgccgaccugaagagcacccagaacgccaucgacaagaucaccaacaaggugaacagcgugaucgagaagaugaacacccaguucaccgccgugggcaaggaguucaaccaccuggagaagagaaucgagaaccugaacaagaagguggacgacggcuuccuggacaucuggaccuacaacgccgagcugcuggugcugcuggagaacgagagaacccuggacuaccacgacagcaacgugaagaaccuguacgagaagaucagaaaccagcugaagaacaacgccaaggagaucggcaacggcugcuucgaguucuaccacaagugcgacaacaugugcauggagagcgugaagaacggcaccuacgacuaccccaaguacagcgaggaggccaagcugaacagagagaagaucgacggcgugaagcuggagagcaccagaaucuaccagauccuggccaucuacagcaccguggccagcagccuggugcugguggugagccugggcgccaucagcuucuggaugugcagcaacggcagccugcagugcagaaucugcaucuga

SEQ ID NO: 172460 - RNA, 1701 nt, Artificial Sequence; identical to SEQ ID NO: 170100
  derived and/or modified CDS sequence (opt4) from hemagglutinin__InfluenzaA__AIC73768

SEQ ID NO: 172461 - RNA, 1701 nt, Artificial Sequence; identical to SEQ ID NO: 170100
  derived and/or modified CDS sequence (opt4) from hemagglutinin__InfluenzaA__AIC73769

SEQ ID NO: 172462 - RNA, 1701 nt, Artificial Sequence; identical to SEQ ID NO: 170100
  derived and/or modified CDS sequence (opt4) from hemagglutinin__InfluenzaA__AIC73770

SEQ ID NO: 172463 - RNA, 1701 nt, Artificial Sequence; identical to SEQ ID NO: 170100
  derived and/or modified CDS sequence (opt4) from hemagglutinin__InfluenzaA__AIC73771

SEQ ID NO: 172464 - RNA, 1701 nt, Artificial Sequence
  derived and/or modified CDS sequence (opt4) from hemagglutinin__InfluenzaA__AIC73772
augaaggccauccugguggugcugcuguacaccuucgccaccgccaacgccgacacccugugcaucggcuaccacgccaacaacagcaccgacaccguggacaccgugcuggagaagaacgugaccgugacccacagcgugaaccugcuggaggacaagcacaacggcaagcugugcaagcugagaggcguggccccccugcaccugggcaagugcaacaucgccggcuggauccugggcaaccccgagugcgagagccugagcaccgccagcagcuggagcuacaucguggagaccagcagcagcgacaacggcaccugcuaccccggcgacuucaucaacuacgaggagcugagagagcagcugagcagcgugagcagcuucgagagauucgagaucuuccccaagaccagcagcuggcccaaccacgacagcaacaagggcgugaccgccgccugcccccacgccggcgccaagagcuucuacaagaaccugaucuggcuggugaagaagggcaacagcuaccccaagcugagccagagcuacaucaacgacaagggcaaggaggugcuggugcuguggggcauccaccaccccagcaccaccgccgaccagcagagccuguaccagaacgccgacgccuacguguucgugggcaccagcagauacagcaagaaguucaagcccgagaucgccaucagacccaaggugagagaccaggagggcagaaugaacuacuacuggacccugguggagcccggcgacaagaucaccuucgaggccaccggcaaccugguggugcccagauacgccuucaccauggagagaaacgccggcagcggcaucaucaucagcgacacccccgugcacgacugcaacaccaccugccagacccccgagggcgccaucaacaccagccugcccuuccagaacauccaccccaucaccaucggcaagugccccaaguacgugaagagcaccaagcugagacuggccaccggccugagaaacgugcccagcauccagagcagaggccuguucggcgccaucgccggcuucaucgagggcggcuggaccggcaugguggacggcugguacggcuaccaccaccagaacgagcagggcagcggcuacgccgccgaccugaagagcacccagaacgccaucgacaagaucaccaacaaggugaacagcgugaucgagaagaugaacacccaguucaccgccgugggcaaggaguucaaccaccuggagaagagaaucgagaaccugaacaagaagguggacgacggcuuccuggacaucuggaccuacaacgccgagcugcuggugcugcuggagaacgagagaacccuggacuaccacgacagcaacgugaagaaccuguacgagaaggugagaaaccagcugaagaacaacgccaaggagaucggcaacggcugcuucgaguucuaccacaagugcgacaacaccugcauggagagcgugaagaacggcaccuacgacuaccccaaguacagcgaggaggccaagcugaacagagagaagaucgacggcgugaagcuggagagcaccagaguguaccagauccuggccaucuacagcaccguggccagcagccuggugcugguggugagccugggcgccaucagcuucuggaugugcagcaacggcagccugcagugcagaaucugcaucuga

SEQ ID NO: 172465 - RNA, 1701 nt, Artificial Sequence; identical to SEQ ID NO: 170100
  derived and/or modified CDS sequence (opt4) from hemagglutinin__InfluenzaA__AIC73773

SEQ ID NO: 172466 - RNA, 1701 nt, Artificial Sequence; identical to SEQ ID NO: 170100
  derived and/or modified CDS sequence (opt4) from hemagglutinin__InfluenzaA__AIC73775

SEQ ID NO: 172467 - RNA, 1701 nt, Artificial Sequence; identical to SEQ ID NO: 170100
  derived and/or modified CDS sequence (opt4) from hemagglutinin__InfluenzaA__AIC73776

SEQ ID NO: 172468 - RNA, 1701 nt, Artificial Sequence; identical to SEQ ID NO: 172464
  derived and/or modified CDS sequence (opt4) from hemagglutinin__InfluenzaA__AIC73777

SEQ ID NO: 172469 - RNA, 1701 nt, Artificial Sequence
  derived and/or modified CDS sequence (opt4) from hemagglutinin__InfluenzaA__AIC73778
augaagaccaucaucgcccugagcuacauccugugccugguguucgcccagaagcugcccggcaacgacaacagcaccgccacccugugccugggccaccacgccgugcccaacggcaccaucgugaagaccaucaccaacgacagaaucgaggugaccaacgccaccgagcuggugcagaacagcagcaucggcgagaucugcgacagcccccaccagauccuggacggcgagaacugcacccugaucgacgcccugcugggcgacccccagugcgacggcuuccagaacaagaagugggaccuguucguggagagaagcaaggcccacagcaacugcuaccccuacgacgugcccgacuacgccagccugagaagccugguggccagcagcggcacccuggaguucaacaacgagagcuucaacuggaccggcgugacccagaacggcaccagcagcgccugcaucagaagaagcaacagcagcuucuucagcagacugaacuggcugacccaccugaacuucaaguaccccgcccugaacgugaccaugcccaacaacgagcaguucgacaagcuguacaucuggggcgugcaccaccccggcaccgacaaggaccagaucuuccuguacgcccagagcagcggcagaaucaccgugagcaccaagagaagccagcaggccgugauccccaacaucggcagcagacccagaaucagaaacauccccagcagaaucagcaucuacuggaccaucgugaagcccggcgacauccugcugaucaacagcaccggcaaccugaucgcccccagaggcuacuucaagaucagaagcggcaagagcagcaucaugagaagcgacgcccccaucggcaagugcaagagcgagugcaucacccccaacggcagcauccccaacgacaagcccuuccagaacgugaacagaaucaccuacggcgccugccccagauacgugaagcagagcacccugaagcuggccaccggcaugagaaacgugcccgagaagcagaccagaggcaucuucggcgccaucgccggcuucaucgagaacggcugggagggcaugguggacggcugguacggcuucagacaccagaacagcgagggcagaggccaggccgccgaccugaagagcacccaggccgccaucgaccagaucaacggcaagcugaacagacugaucggcaagaccaacgagaaguuccaccagaucgagaaggaguucagcgagguggagggcagaauccaggaccuggagaaguacguggaggacaccaagaucgaccuguggagcuacaacgccgagcugcugguggcccuggagaaccagcacaccaucgaccugaccgacagcgagaugaacaagcuguucgagaagaccaagaagcagcugagagagaacgccgaggacaugggcaacggcugcuucaagaucuaccacaagugcgacaacgccugcaucggcagcaucagaaacggcaccuacgaccacaacguguacagagacgaggcccugaacaacagauuccagaucaagggcguggagcugaagagcggcuacaaggacuggauccuguggaucagcuucgccaucagcugcuuccugcugugcguggcccugcugggcuucaucaugugggccugccagaagggcaacaucagaugcaacaucugcaucuga

SEQ ID NO: 172470 - RNA, 1701 nt, Artificial Sequence; identical to SEQ ID NO: 172469
  derived and/or modified CDS sequence (opt4) from hemagglutinin__InfluenzaA__AIC73779

SEQ ID NO: 172471 - RNA, 1701 nt, Artificial Sequence; identical to SEQ ID NO: 172469
  derived and/or modified CDS sequence (opt4) from hemagglutinin__InfluenzaA__AIC73780

SEQ ID NO: 172472 - RNA, 1701 nt, Artificial Sequence; identical to SEQ ID NO: 171058
  derived and/or modified CDS sequence (opt4) from hemagglutinin__InfluenzaA__AIC73781

SEQ ID NO: 172473 - RNA, 1701 nt, Artificial Sequence; identical to SEQ ID NO: 172469
  derived and/or modified CDS sequence (opt4) from hemagglutinin__InfluenzaA__AIC73782

SEQ ID NO: 172474 - RNA, 1701 nt, Artificial Sequence; identical to SEQ ID NO: 172469
  derived and/or modified CDS sequence (opt4) from hemagglutinin__InfluenzaA__AIC73783

SEQ ID NO: 172475 - RNA, 1701 nt, Artificial Sequence; identical to SEQ ID NO: 172469
  derived and/or modified CDS sequence (opt4) from hemagglutinin__InfluenzaA__AIC73784

SEQ ID NO: 172476 - RNA, 1701 nt, Artificial Sequence; identical to SEQ ID NO: 170100
  derived and/or modified CDS sequence (opt4) from hemagglutinin__InfluenzaA__AIC73785

SEQ ID NO: 172477 - RNA, 1701 nt, Artificial Sequence; identical to SEQ ID NO: 172469
  derived and/or modified CDS sequence (opt4) from hemagglutinin__InfluenzaA__AIC73786

SEQ ID NO: 172478 - RNA, 1701 nt, Artificial Sequence; identical to SEQ ID NO: 170100
  derived and/or modified CDS sequence (opt4) from hemagglutinin__InfluenzaA__AIC73787

SEQ ID NO: 172479 - RNA, 1701 nt, Artificial Sequence; identical to SEQ ID NO: 170100
  derived and/or modified CDS sequence (opt4) from hemagglutinin__InfluenzaA__AIC73788

SEQ ID NO: 172480 - RNA, 1701 nt, Artificial Sequence
  derived and/or modified CDS sequence (opt4) from hemagglutinin__InfluenzaA__AIC73789
augaagaccaucaucgcccugagcuacauccugugccugguguucgcccagaagccccccggcaacgacaacagcaccgccacccugugccugggccaccacgccgugcccaacggcaccaucgugaagaccaucaccaacgacagaaucgaggugaccaacgccaccgagcuggugcagaacagcagcaucggcgagaucugcgacagcccccaccagauccuggacggcgagaacugcacccugaucgacgcccugcugggcgacccccagugcgacggcuuccagaacaagaagugggaccuguucguggagagaagcaaggccuacagcaacugcuaccccuacgacgugcccgacuacgccagccugagaagccugguggccagcagcggcacccuggaguucaacaacgagagcuucaacugggccggcgugacccagaacggcaccagcagcgccugcaucagaggcagcaacagcagcuucuucagcagacugaacuggcugacccaccugaacuucaaguaccccgcccugaacgugaccaugcccaacaacgagcaguucgacaagcuguacaucuggggcgugcaccaccccggcaccgacaaggaccagaucuuccuguacgcccagagcagcggcagaaucaccgugagcaccaagagaagccagcaggccgugauccccaacaucggcagcagacccagaaucagaaacauccccagcagaaucagcaucuacuggaccaucgugaagcccggcgacauccugcugaucaacagcaccggcaaccugaucgcccccagaggcuacuucaagaucagaagcggcaagagcagcaucaugagaagcgacgcccccaucggcaagugcaagagcgagugcaucacccccaacggcagcauccccaacgacaagcccuuccagaacgugaacagaaucaccuacggcgccugccccagauacgugaagcagagcacccugaagcuggccaccggcaugagaaacgugcccgagaagcagaccagaggcaucuucggcgccaucgccggcuucaucgagaacggcugggagggcaugguggacggcugguacggcuucagacaccagaacagcgagggcagaggccaggccgccgaccugaagagcacccaggccgccaucgaccagaucaacggcaagcugaacagacugaucggcaagaccaacgagaaguuccaccagaucgagaaggaguucagcgagguggagggcagaauccaggaccuggagaaguacguggaggacaccaagaucgaccuguggagcuacaacgccgagcugcugguggcccuggagaaccagcacaccaucgaccugaccgacagcgagaugaacaagcuguucgagaagaccaagaagcagcugagagagaacgccgaggacaugggcaacggcugcuucaagaucuaccacaagugcgacaacgccugcaucggcagcaucagaaacggcaccuacgaccacgacguguacagagacgaggcccugaacaacagauuccagaucaagggcguggagcugaagagcggcuacaaggacuggauccuguggaucagcuucgccaucagcugcuuccugcugugcguggugcugcugggcuucaucaugugggccugccagaagggcaacaucagaugcaacaucugcaucuga

SEQ ID NO: 172481 - RNA, 1701 nt, Artificial Sequence
  derived and/or modified CDS sequence (opt4) from hemagglutinin__InfluenzaA__AIC73790
augaaggccauccugguggugcugcuguacaccuucgccaccaccaacgccgacacccugugcaucggcuaccacgccaacaacagcaccgacaccguggacaccgugcuggagaagaacgugaccgugacccacagcgugaaccugcuggaggacaagcacaacggcaagcugugcaagcugagaggcguggccccccugcaccugggcaagugcaacaucgccggcuggauccugggcaaccccgagugcgagagccugagcaccgccagcagcuggagcuacaucguggagaccagcagcagcgacaacggcaccugcuaccccggcgacuucaucaacuacgaggagcugagagagcagcugagcagcgugagcagcuucgagagauucgagaucuuccccaagaccagcagcuggcccaaccacgacagcaacaagggcgugaccgccgccugcccccacgccggcgccaagagcuucuacaagaaccugaucuggcuggugaagaagggcaacagcuaccccaagcugagacagagcuacaucaacgacaagggcaaggaggugcuggugcuguggggcauccaccaccccagcaccaccaccgaccagcagagccuguaccagaacgccgacgccuacguguucgugggcaccagcagauacagcaagaaguucaagcccgagaucgccaucagacccaaggugagagaccaggagggcagaaugaacuacuacuggacccugguggagcccggcgacaagaucaccuucgaggccaccggcaaccugguggugcccagauacgccuucaccauggagagaaacgccggcagcggcaucaucaucagcgacacccccgugcacgacugcaacaccaccugccagacccccgagggcgccaucaacaccagccugcccuuccagaacauccaccccaucaccaucggcaagugccccaaguacgugaagagcaccaagcugagacuggccaccggccugagaaacgugcccagcauccagagcagaggccuguucggcgccaucgccggcuucaucgagggcggcuggaccggcaugguggacggcugguacggcuaccaccaccagaacgagcagggcagcggcuacgccgccgaccugaagagcacccagaacgccaucgacaagaucaccaacaaggugaacagcgugaucgagaagaugaacacccaguucaccgccgugggcaaggaguucaaccaccuggagaagagaaucgagaaccugaacaagaagguggacgacggcuuccuggacaucuggaccuacaacgccgagcugcuggugcugcuggagaacgagagaacccuggacuaccacgacagcaacgugaagaaccuguacgagaaggugagaaaccagcugaagaacaacgccaaggagaucggcaacggcugcuucgaguucuaccacaagugcgacaacaccugcauggagagcgugaagaacggcaccuacgacuaccccaaguacagcgaggaggccaagcugaacagagagaagaucgacggcgugaagcuggagagcaccagaaucuaccagauccuggccaucuacagcaccguggccagcagccuggugcugguggugagccugggcgccaucagcuucuggaugugcagcaacggcagccugcagugcagaaucugcaucuga

SEQ ID NO: 172482 - RNA, 1701 nt, Artificial Sequence
  derived and/or modified CDS sequence (opt4) from hemagglutinin__InfluenzaA__AIC73791
augaaggccauccugguggugcugcuguacaccuucgccaccgccaacgccgacacccugugcaucggcuaccacgccaacaacagcaccgacaccaucgacaccgugcuggagaagaacgugaccgugacccacagcgugaaccugcuggaggacaagcacaacggcaagcugugcaagcugagaggcguggccccccugcaccugggcaagugcaacaucgccggcuggauccugggcaaccccgagugcgagagccugagcaccgccagcagcuggagcuacaucguggagaccagcagcagcgacaacggcaccugcuaccccggcgacuucaucaacuacgaggagcugagagagcagcugagcagcgugagcagcuucgagagauucgagaucuuccccaagaccagcagcuggcccaaccacgacagcaacaagggcgugaccgccgccugcccccacgccggcgccaagagcuucuacaagaaccugaucuggcuggugaagaagggcaacagcuaccccaagcugagccagagcuacaucaacgacaagggcaaggaggugcuggugcuguggggcauccaccaccccagcaccaccgccgaccagcagagccuguaccagaacgccgacgccuacguguucgugggcaccagcagauacagcaagaaguucaagcccgagaucgccaucagacccaaggugagagaccaggagggcagaaugaacuacuacuggacccugguggagcccggcgacaagaucaccuucgaggccaccggcaaccugguggugcccagauacgccuucaccauggagagaaacgccggcagcggcaucaucaucagcgacacccccgugcacgacugcaacaccaccugccagacccccgagggcgccaucaacaccagccugcccuuccagaacauccaccccaucaccaucggcaagugccccaaguacgugaagagcaccaagcugagacuggccaccggccugagaaacgugcccagcauccagagcagaggccuguucggcgccaucgccggcuucaucgagggcggcuggaccggcaugguggacggcugguacggcuaccaccaccagaacgagcagggcagcggcuacgccgccgaccugaagagcacccagaacgccaucgacaagaucaccaacaaggugaacagcgugaucgagaagaugaacacccaguucaccgccgugggcaaggaguucaaccaccuggagaagagaaucgagaaccugaacaagaagguggacgacggcuuccuggacaucuggaccuacaacgccgagcugcuggugcugcuggagaacgagagaacccuggacuaccacgacagcaacgugaagaaccuguacgagaaggugagaaaccagcugaagaacaacgccaaggagaucggcaacggcugcuucgaguucuaccacaagugcgacaacaccugcauggagagcgugaagaacggcaccuacgacuaccccaaguacagcgaggaggccaagcugaacagagagaagaucgacggcgugaagcuggagagcaccagaaucuaccagauccuggccaucuacagcaccguggccagcagccuggugcugguggugagccugggcgccaucagcuucuggaugugcagcaacggcagccugcagugcagaaucugcaucuga

SEQ ID NO: 172483 - RNA, 1701 nt, Artificial Sequence; identical to SEQ ID NO: 170100
  derived and/or modified CDS sequence (opt4) from hemagglutinin__InfluenzaA__AIC73792

SEQ ID NO: 172484 - RNA, 1701 nt, Artificial Sequence; identical to SEQ ID NO: 172464
  derived and/or modified CDS sequence (opt4) from hemagglutinin__InfluenzaA__AIC73793

SEQ ID NO: 172485 - RNA, 1701 nt, Artificial Sequence
  derived and/or modified CDS sequence (opt4) from hemagglutinin__InfluenzaA__AIC73794
augaagaccaucaucggcgugagcuacauccugugccugguguucgcccagaagcugcccggcaacgacaacagcaccgccacccugugccugggccaccacgccgugcccaacggcaccaucgugaagaccaucaccaacgacagaaucgaggugaccaacgccaccgagcuggugcagaacagcagcaucggcgagaucugcgacagcccccaccagauccuggacggcgagaacugcacccugaucgacgcccugcugggcgacccccagugcgacggcuuccagaacaagaagugggaccuguucguggagagaagcaaggccuacagcaacugcuaccccuacgacgugcccgacuacgccagccugagaagccugguggccagcagcggcacccuggaguucaacaacgagagcuucaacugggccggcgugacccagaacggcaccagcagcagcugcaucagaggcagcaacagcagcuucuucagcagacugaacuggcugacccaccugaacagcaaguaccccgcccugaacgugaccaugcccaacaacgagcaguucgacaagcuguacaucuggggcgugcaccaccccggcaccgacaaggaccagaucuuccuguacgcccagagcagcggcagaaucaccgugagcaccaagagaagccagcaggccgugauccccaacaucggcagcagacccagaaucagagacauccccagcagaaucagcaucuacuggaccaucgugaagcccggcgacauccugcugaucaacagcaccggcaaccugaucgcccccagaggcuacuucaagaucagaagcggcaagagcagcaucaugagaagcgacgcccccaucggcaagugcaagagcgagugcaucacccccaacggcagcauccccaacgacaagcccuuccagaacgugaacagaaucaccuacggcgccugccccagauacgugaagcagagcacccugaagcuggccaccggcaugagaaacgugcccgagagacagaccagaggcaucuucggcgccaucgccggcuucaucgagaacggcugggagggcaugguggacggcugguacggcuucagacaccagaacagcgagggcagaggccaggccgccgaccugaagagcacccaggccgccaucgaccagaucaacggcaagcugaacagacugaucggcaagaccaacgagaaguuccaccagaucgagaaggaguucagcgagguggagggcagaauccaggaccuggagaaguacguggaggacaccaagaucgaccuguggagcuacaacgccgagcugcugguggcccuggagaaccagcacaccaucgaccugaccgacagcgagaugaacaagcuguucgagaagaccaagaagcagcugagagagaacgccgaggacaugggcaacggcugcuucaagaucuaccacaagugcgacaacgccugcaucggcagcaucagaaacggcaccuacgaccacgacguguacagagacgaggcccugaacaacagauuccagaucaagggcguggagcugaagagcggcuacaaggacuggauccuguggaucagcuucgccaucagcugcuuccugcugugcguggcccugcugggcuucaucaugugggccugccagaagggcaacaucagaugcaacaucugcaucuga

SEQ ID NO: 172486 - RNA, 1701 nt, Artificial Sequence; identical to SEQ ID NO: 170100
  derived and/or modified CDS sequence (opt4) from hemagglutinin__InfluenzaA__AIC73796

SEQ ID NO: 172487 - RNA, 1701 nt, Artificial Sequence
  derived and/or modified CDS sequence (opt4) from hemagglutinin__InfluenzaA__AIC73797
augaagaccaucaucgcccugagcuacauccugugccugguguucgcccagaagcugcccggcaacgacaacagcaccgccacccugugccugggccaccacgccgugcccaacggcaccaucgugaagaccaucaccaacgacagaaucgaggugaccaacgccaccgagcuggugcagaacagcagcaucggcgagaucugcgacagcccccaccagauccuggacggcgagaacugcacccugaucgacgcccugcugggcgacccccagugcgacggcuuccagaacaagaagugggaccuguucguggagagaagcaaggccuacagcaacugcuaccccuacgacgugcccgacuacgccagccugagaagccugguggccagcagcggcacccuggaguucaacaacgagagcuucaacugggccggcgugacccagaacggcaccagcagcagcugcaucagaggcagcaacagcagcuucuucagcagacugaacuggcugacccaccugaacagcaaguaccccgcccugaacgugaccaugcccaacaacgagcaguucgacaagcuguacaucuggggcgugcaccaccccggcaccgacaaggaccagaucuuccuguacgcccagagcagcggcagaaucaccgugagcaccaagagaagccagcaggccgugauccccaacaucggcagcagacccagaaucagagacauccccagcagaaucagcaucuacuggaccaucgugaagcccggcgacauccugcugaucaacagcaccggcaaccugaucgcccccagaggcuacuucaagaucagaagcggcaagagcagcaucaugagaagcgacgcccccaucggcaagugcaagagcgagugcaucacccccaacggcagcauccccaacgacaagcccuuccagaacgugaacagaaucaccuacggcgccugccccagauacgugaagcagagcacccugaagcuggccaccggcaugagaaacgugcccgagagacagaccagaggcaucuucggcgccaucgccggcuucaucgagaacggcugggagggcaugguggacggcugguacggcuucagacaccagaacagcgagggcagaggccaggccgccgaccugaagagcacccaggccgccaucgaccagaucaacggcaagcugaacagacugaucggcaagaccaacgagaaguuccaccagaucgagaaggaguucagcgagguggagggcagaauccaggaccuggagaaguacguggaggacaccaagaucgaccuguggagcuacaacgccgagcugcugguggcccuggagaaccagcacaccaucgaccugaccgacagcgagaugaacaagcuguucgagaagaccaagaagcagcugagagagaacgccgaggacaugggcaacggcugcuucaagaucuaccacaagugcgacaacgccugcaucggcagcaucagaaacggcaccuacgaccacgacguguacagagacgaggcccugaacaacagauuccagaucaagggcguggagcugaagagcggcuacaaggacuggauccuguggaucagcuucgccaucagcugcuuccugcugugcguggcccugcugggcuucaucaugugggccugccagaagggcaacaucagaugcaacaucugcaucuga

SEQ ID NO: 172488 - RNA, 1701 nt, Artificial Sequence; identical to SEQ ID NO: 172487
  derived and/or modified CDS sequence (opt4) from hemagglutinin__InfluenzaA__AIC73798

SEQ ID NO: 172489 - RNA, 1701 nt, Artificial Sequence; identical to SEQ ID NO: 172487
  derived and/or modified CDS sequence (opt4) from hemagglutinin__InfluenzaA__AIC73800

SEQ ID NO: 172490 - RNA, 1701 nt, Artificial Sequence; identical to SEQ ID NO: 172487
  derived and/or modified CDS sequence (opt4) from hemagglutinin__InfluenzaA__AIC73801

SEQ ID NO: 172491 - RNA, 1701 nt, Artificial Sequence; identical to SEQ ID NO: 172487
  derived and/or modified CDS sequence (opt4) from hemagglutinin__InfluenzaA__AIC73802

SEQ ID NO: 172492 - RNA, 1701 nt, Artificial Sequence; identical to SEQ ID NO: 172487
  derived and/or modified CDS sequence (opt4) from hemagglutinin__InfluenzaA__AIC73803

SEQ ID NO: 172493 - RNA, 1701 nt, Artificial Sequence; identical to SEQ ID NO: 172487
  derived and/or modified CDS sequence (opt4) from hemagglutinin__InfluenzaA__AIC73804

SEQ ID NO: 172494 - RNA, 1701 nt, Artificial Sequence; identical to SEQ ID NO: 172487
  derived and/or modified CDS sequence (opt4) from hemagglutinin__InfluenzaA__AIC73805

SEQ ID NO: 172495 - RNA, 1701 nt, Artificial Sequence; identical to SEQ ID NO: 172487
  derived and/or modified CDS sequence (opt4) from hemagglutinin__InfluenzaA__AIC73806

SEQ ID NO: 172496 - RNA, 1701 nt, Artificial Sequence
  derived and/or modified CDS sequence (opt4) from hemagglutinin__InfluenzaA__AIC73807
augaaggccauccugguggugcugcuguacaccuucgccaccgccaacgccgacacccugugcaucggcuaccacgccaacaacagcaccgacaccguggacaccgugcuggagaagaacgugaccgugacccacagcgugaaccugcuggaggacaagcacaacggcaagcugugcaagcugagaggcguggccccccugcaccugggcaagugcaacaucgccggcuggauccugggcaaccccgagugcgagagccugagcaccgccagcagcuggagcuacaucguggagaccagcagcagcgacaacggcaccugcuaccccggcgacuucaucaacuacgaggagcugagagagcagcugagcagcgugagcagcuucgagagauucgagaucuuccccaagaccagcagcuggcccaaccacgacagcaacaagggcgugaccgccgccugcccccacgccggcgccaagagcuucuacaagaaccugaucuggcuggugaagaagggcaacagcuaccccaagcugagccagagcuacaucaacaacaagggcaaggaggugcuggugcuguggggcauccaccaccccagcaccaccgccgaccagcagagccuguaccagaacgccgacgccuacguguucgugggcaccagcagauacagcaagaaguucaagcccgagaucgccaucagacccaaggugagagaccaggagggcagaaugaacuacuacuggacccugguggagcccggcgacaagaucaccuucgaggccaccggcaaccugguggugcccagauacgccuucaccauggagagaaacgccggcagcggcaucaucaucagcgacacccccgugcacgacugcaacaccaccugccagacccccgagggcgccaucaacaccagccugcccuuccagaacauccaccccaucaccaucggcaagugccccaaguacgugaagagcaccaagcugagacuggccaccggccugagaaacgugcccagcauccagagcagaggccuguucggcgccaucgccggcuucaucgagggcggcuggaccggcaugguggacggcugguacggcuaccaccaccagaacgagcagggcagcggcuacgccgccgaccugaagagcacccagaacgccaucgacaagaucaccaacaaggugaacagcgugaucgagaagaugaacacccaguucaccgccgugggcaaggaguucaaccaccuggagaagagaaucgagaaccugaacaagaagguggacgacggcuuccuggacaucuggaccuacaacgccgagcugcuggugcugcuggagaacgagagaacccuggacuaccacgacagcaacgugaagaaccuguacgagaaggugagaaaccagcugaagaacaacgccaaggagaucggcaacggcugcuucgaguucuaccacaagugcgacaacaccugcauggagagcgugaagaacggcaccuacgacuaccccaaguacagcgaggaggccaagcugaacagagagaagaucgacggcgugaagcuggagagcaccagaaucuaccagauccuggccaucuacagcaccguggccagcagccuggugcugguggugagccugggcgccaucagcuucuggaugugcagcaacggcagccugcagugcagaaucugcaucuga

SEQ ID NO: 172497 - RNA, 1701 nt, Artificial Sequence; identical to SEQ ID NO: 172487
  derived and/or modified CDS sequence (opt4) from hemagglutinin__InfluenzaA__AIC73808

SEQ ID NO: 172498 - RNA, 1701 nt, Artificial Sequence
  derived and/or modified CDS sequence (opt4) from hemagglutinin__InfluenzaA__AIC73809
augaaggccauccugguggugcugcuguacaccuucgccaccgccaacgccgacacccugugcaucggcuaccacgccaacaacagcaccgacaccguggacaccgugcuggagaagaacgugaccgugacccacagcgugaaccugcuggaggacaagcacaacggcaagcugugcaagcugagaggcguggccccccugcaccugggcaagugcaacaucgccggcuggauccugggcaaccccgagugcgagagccugagcaccgccagcagcuggagcuacaucguggagaccagcagcagcgacaacggcaccugcuaccccggcgacuucaucaacuacgaggagcugagagagcagcugagcagcgugagcagcuucgagagauucgagaucuuccccaagaccagcagcuggcccaaccacgacagcaacaagggcgugaccgccgccugcccccacgccggcgccaagagcuucuacaagaaccugaucuggcuggugaagaagggcaacagcuaccccaagcugagacagagcuacaucaacgacaagggcaaggaggugcuggugcuguggggcauccaccaccccagcaccaccaccgaccagcagagccuguaccagaacgccgacgccuacguguucgugggcaccagcagauacagcaagaaguucaagcccgagaucgccaucagacccaaggugagagaccaggagggcagaaugaacuacuacuggacccugguggagcccggcgacaagaucaccuucgaggccaccggcaaccugguggugcccagauacgccuucaccauggagagaaacgccggcagcggcaucaucaucagcgacacccccgugcacgacugcaacaccaccugccagacccccgagggcgccaucaacaccagccugcccuuccagaacauccaccccaucaccaucggcaagugccccaaguacgugaagagcaccaagcugagacuggccaccggccugagaaacgugcccagcauccagagcagaggccuguucggcgccaucgccggcuucaucgagggcggcuggaccggcaugguggacggcugguacggcuaccaccaccagaacgagcagggcagcggcuacgccgccgaccugaagagcacccagaacgccaucgacaagaucaccaacaaggugaacagcgugaucgagaagaugaacacccaguucaccgccgugggcaaggaguucaaccaccuggagaagagaaucgagaaccugaacaagaagguggacgacggcuuccuggacaucuggaccuacaacgccgagcugcuggugcugcuggagaacgagagaacccuggacuaccacgacagcaacgugaagaaccuguacgagaaggugagaaaccagcugaagaacaacgccaaggagaucggcaacggcugcuucgaguucuaccacaagugcgacaacaccugcauggagagcgugaagaacggcaccuacgacuaccccaaguacagcgaggaggccaagcugaacagagagaagaucgacgaggugaagcuggagagcaccagaaucuaccagauccuggccaucuacagcaccguggccagcagccuggugcugguggugagccugggcgccaucagcuucuggaugugcagcaacggcagccugcagugcagaaucugcaucuga

SEQ ID NO: 172499 - RNA, 1701 nt, Artificial Sequence
  derived and/or modified CDS sequence (opt4) from hemagglutinin__InfluenzaA__AIC73810
augaaggccauccugguggugcugcuguacaccuucgccaccgccaacgccgacacccugugcaucggcuaccacgccaacaacagcaccgacaccguggacaccgugcuggagaagaacgugaccgugacccacagcgugaaccugcuggaggacaagcacaacggcaagcugugcaagcugagaggcguggccccccugcaccugggcaagugcaacaucgccggcuggauccugggcaaccccgagugcgagagccugagcaccgccagcagcuggagcuacaucguggagaccagcagcagcgacaacggcaccugcuaccccggcgacuucaucaacuacgaggagcugagagagcagcugagcagcgugagcagcuucgagagauucgagaucuuccccaagaccagcagcuggcccaaccacgacagcaacaagggcgugaccgccgccugcccccacgccggcgccaagagcuucuacaagaaccugaucuggcuggugaagaagggcaacagcuaccccaagcugagccagagcuacaucaacgacaagggcaaggaggugcuggugcuguggggcauccaccaccccagcaccaccgccgaccagcagagccuguaccagaacgccgacgccuacguguucgugggcaccagcagauacagcaagaaguucaagcccgagaucgccaucagacccaaggugagagaccaggagggcagaaugaacuacuacuggacccugguggagcccggcgacaagaucaccuucgaggccaccggcaaccugguggugcccagauacgccuucaccauggagagaaacgccggcagcggcaucaucaucagcgacacccccgugcacgacugcaacaccaccugccagacccccgagggcgccaucaacaccagccugcccuuccagaacauccaccccaucaccaucggcaagugccccaaguacgugaagagcaccaagcugagacuggccaccggccugagaaacgugcccagcauccagagcagaggccuguucggcgccaucgccggcuucaucgagggcggcuggaccggcaugguggacggcugguacggcuaccaccaccagaacgagcagggcagcggcuacgccgccgaccugaagagcacccagaacgccaucgacaagaucaccaacaaggugaacagcgugaucgagaagaugaacacccaguucaccgccgugggcaaggaguucaaccaccuggagaagagaaucgagaaccugaacaagaagguggacgacggcuuccuggacaucuggaccuacaacgccgagcugcuggugcugcuggagaacgagagaacccuggacuaccacgacagcaacgugaagaaccuguacgagaaggugagaaaccagcugaagaacaacgccaaggagaucggcaacggcugcuucgaguucuaccacagaugcgacaacaccugcauggagagcgugaagaacggcaccuacgacuaccccaaguacagcgaggaggccaagcugaacagagagaagaucgacggcgugaagcuggagagcaccagaaucuaccagauccuggccaucuacagcaccguggccagcagccuggugcugguggugagccugggcgccaucagcuucuggaugugcagcaacggcagccugcagugcagaaucugcaucuga

SEQ ID NO: 172500 - RNA, 1701 nt, Artificial Sequence
  derived and/or modified CDS sequence (opt4) from hemagglutinin__InfluenzaA__AIC73813
augaaggccauccugguggugcugcuguacaccuucgccaccgccaacgccgacacccugugcaucggcuaccacgccaacaacagcaccgacaccguggacaccgugcuggagaagaacgugaccgugacccacagcgugaaccugcuggaggacaagcacaacggcaagcugugcaagcugagaggcguggccccccugcaccugggcaagugcaacaucgccggcuggauccugggcaaccccgagugcgagagccugagcaccgccagcagcuggagcuacaucguggagaccagcagcagcgacaacggcaccugcuaccccggcgacuucaucaacuacgaggagcugagagagcagcugagcagcgugagcagcuucgagagauucgagaucuuccccaagaccagcagcuggcccaaccacgacagcaacaagggcgugaccgccgccugcccccacgccggcgccaagagcuucuacaagaaccugaucuggcuggugaagaagggcaacagcuaccccaagcugagccagagcuacaucaacgacaagggcaaggaggugcuggugcuguggggcauccaccaccccagcaccaccgccgaccagcagagccuguaccagaacgccgacgccuacguguucgugggcaccagcagauacagcaagaaguucaagcccgagaucgccaucagacccaaggugagagaccaggagggcagaaugaacuacuacuggacccugguggagcccggcgacaagaucaccuucgaggccaccggcaaccugguggugcccagauacgccuucaccauggagagaaacgccggcagcggcaucaucaucagcgacacccccgugcacgacugcaacaccaccugccagacccccgagggcgccaucaacaccagccugcccuuccagaacauccaccccaucaccaucggcaagugccccaaguacgugaagagcaccaagcugagacuggccaccggccugagaaacgugcccagcauccagagcagaggccuguucggcgccaucgccggcuucaucgagggcggcuggaccggcaugguggacggcugguacggcuaccaccaccagaacgagcagggcagcggcuacgccgccgaccugaagagcacccagaacgccaucgacaagaucaccaacaaggugaacagcgugaucgagaagaugaacacccaguucaccgccgugggcaaggaguucaaccaccuggagaagagaaucgagaaccugaacaagaagguggacgacggcuuccuggacaucuggaccuacaacgccgagcugcuggugcugcuggagaacgagagaacccuggacuaccacgacagcaacgugaagaaccuguacgagaaggugagaaaccagcugaagaacaacgccaaggagaucggcaacggcugcuucgaguucuaccacaagugcgacaacaccugcauggagagcgugaagaacggcaccuacgacuaccccaaguacagcgaggaggccaagcugaacagagagaagaucgacggcgugaagcuggagagcaccagaaucuaccagauccuggccaucuacagcaccgccgccagcagccuggugcuggugaucagccugggcgccaucagcuucuggaugugcagcaacggcagccugcagugcagaaucugcaucuga

SEQ ID NO: 172501 - RNA, 1701 nt, Artificial Sequence
  derived and/or modified CDS sequence (opt4) from hemagglutinin__InfluenzaA__AIC73815
augaagaccaucaucgcccugagcuacauccugugccugguguucgcccagaagauccccggcaacgacaacagcaccgccacccugugccugggccaccacgccgugcccaacggcaccaucgugaagaccaucaccaacgacagaaucgaggugaccaacgccaccgagcuggugcagaacagcagcaucggcgagaucugcgacagcccccaccagauccuggacggcgagaacugcacccugaucgacgcccugcugggcgacccccagugcgacggcuuccagaacaagaagugggaccuguucguggagagaagcaaggccuacagcaacugcuaccccuacgacgugcccgacuacgccagccugagaagccugguggccagcagcggcacccuggaguucaacaacgagagcuucaacuggaccggcgugacccagaacggcaccagcagcgccugcaucagaagaagcagcagcagcuucuucagcagacugaacuggcugacccaccugaacuacaccuaccccgcccugaacgugaccaugcccaacaacgagcaguucgacaagcuguacaucuggggcgugcaccaccccggcaccgacaaggaccagaucuuccuguacgcccagagcagcggcagaaucaccgugagcaccaagagaagccagcaggccgugauccccaacaucggcagcagacccagaaucagagacauccccagcagaaucagcaucuacuggaccaucgugaagcccggcgacauccugcugaucaacagcaccggcaaccugaucgcccccagaggcuacuucaagaucagaagcggcaagagcagcaucaugagaagcgacgcccccaucggcaagugcaagagcgagugcaucacccccaacggcagcauccccaacgacaagcccuuccagaacgugaacagaaucaccuacggcgccugccccagauacgugaagcacagcacccugaagcuggccaccggcaugagaaacgugcccgagaagcagaccagaggcaucuucggcgccaucgccggcuucaucgagaacggcugggagggcaugguggacggcugguacggcuucagacaccagaacagcgagggcagaggccaggccgccgaccugaagagcacccaggccgccaucgaccagaucaacggcaagcugaacagacugaucggcaagaccaacgagaaguuccaccagaucgagaaggaguucagcgagguggagggcagaauccaggaccuggagaaguacguggaggacaccaagaucgaccuguggagcuacaacgccgagcugcugguggcccuggagaaccagcacaccaucgaccugaccgacagcgagaugaacaagcuguucgagaagaccaagaagcagcugagagagaacgccgaggacaugggcaacggcugcuucaagaucuaccacaagugcgacaacgccugcaucggcagcaucagaaacggcaccuacgaccacaacguguacagagacgaggcccugaacaacagauuccagaucaagggcguggagcugaagagcggcuacaaggacuggauccuguggaucagcuucgccaucagcugcuuccugcugugcguggcccugcugggcuucaucaugugggccugccagaagggcaacaucagaugcaacaucugcaucuga

SEQ ID NO: 172502 - RNA, 1701 nt, Artificial Sequence; identical to SEQ ID NO: 171980
  derived and/or modified CDS sequence (opt4) from hemagglutinin__InfluenzaA__AIC73817

SEQ ID NO: 172503 - RNA, 1701 nt, Artificial Sequence; identical to SEQ ID NO: 170100
  derived and/or modified CDS sequence (opt4) from hemagglutinin__InfluenzaA__AIC73819

SEQ ID NO: 172504 - RNA, 1701 nt, Artificial Sequence
  derived and/or modified CDS sequence (opt4) from hemagglutinin__InfluenzaA__AIC73820
augaagaccaucaucgcccugagcuacauccugugccugguguucgcccagaagauccccggcaacgacaacagcaccgccacccugugccugggccaccacgccgugcccaacggcaccaucgugaagaccaucaccaacgacagaaucgaggugaccaacgccaccgagcuggugcagaacagcagcaucggcgagaucugcgacagcccccaccagauccuggacggcgagaacugcacccugaucgacgcccugcugggcgacccccagugcgacggcuuccagaacaagaagugggaccuguucguggagagaagcaaggccuacagcaacugcuaccccuacgacgugcccgacuacgccagccugagaagccugguggccagcagcggcacccuggaguucaacaacgagagcuucaacuggaccggcgugacccagaacggcaccagcagcgccugcaucagaagaagcagcagcagcuucuucagcagacugaacuggcugacccaccugaacuacaccuaccccgcccugaacgugaccaugcccaacaacgagcaguucgacaagcuguacaucuggggcgugcaccaccccggcaccgacaaggaccagaucuuccuguacgcccagagcagcggcagaaucaccgugagcaccaagagaagccagcaggccgugauccccaacaucggcagcagacccagaaucagagacauccccagcagaaucagcaucuacuggaccaucgugaagcccggcgacauccugcugaucaacagcaccggcaaccugaucgcccccagaggcuacuucaagaucagaagcggcaagagcagcaucaugagaagcgacgcccccaucggcaagugcaagagcgagugcaucacccccaacggcagcauccccaacgacaagcccuuccagaacgugaacagaaucaccuacggcgccugccccagauacgugaagcacagcacccugaagcuggccaccggcaugagaaacgugcccgagaagcagaccagaggcaucuucggcgccaucgccggcuucaucgagaacggcugggagggcaugguggacggcugguacggcuucagacaccagaacagcgagggcagaggccaggccgccgaccugaagagcacccaggccgccaucgaccagaucaacggcaagcugaacagacugaucggcaagaccaacgagaaguuccaccagaucgagaaggaguucagcgagguggagggcagaauccaggaccuggagaaguacaucgaggacaccaagaucgaccuguggagcuacaacgccgagcugcugguggcccuggagaaccagcacaccaucgaccugaccgacagcgagaugaacaagcuguucgagaagaccaagaagcagcugagagagaacgccgaggacaugggcaacggcugcuucaagaucuaccacaagugcgacaacgccugcaucggcagcaucagaaacggcaccuacgaccacaacguguacagagacgaggcccugaacaacagauuccagaucaagggcguggagcugaagagcggcuacaaggacuggauccuguggaucagcuucgccaucagcugcuuccugcugugcguggcccugcugggcuucaucaugugggccugccagaagggcaacaucagaugcaacaucugcaucuga

SEQ ID NO: 172505 - RNA, 1701 nt, Artificial Sequence; identical to SEQ ID NO: 170100
  derived and/or modified CDS sequence (opt4) from hemagglutinin__InfluenzaA__AIC73821

SEQ ID NO: 172506 - RNA, 1701 nt, Artificial Sequence; identical to SEQ ID NO: 172464
  derived and/or modified CDS sequence (opt4) from hemagglutinin__InfluenzaA__AIC73824

SEQ ID NO: 172507 - RNA, 1701 nt, Artificial Sequence; identical to SEQ ID NO: 170100
  derived and/or modified CDS sequence (opt4) from hemagglutinin__InfluenzaA__AIC73825

SEQ ID NO: 172508 - RNA, 1701 nt, Artificial Sequence
  derived and/or modified CDS sequence (opt4) from hemagglutinin__InfluenzaA__AIC73827
augaaggccauccugguggugcugcuguacaccuucgccaccgccaacgccgacacccugugcaucggcuaccacgccaacaacagcaccgacaccguggacaccgugcuggagaagaacgugaccgugacccacagcgugaaccugcuggaggacaagcacaacggcaagcugugcaagcugagaggcguggccccccugcaccugggcaagugcaacaucgccggcuggauccugggcaaccccgagugcgagccccugagcaccgccagcagcuggagcuacaucguggagaccagcagcagcgacaacggcaccugcuaccccggcgacuucaucaacuacgaggagcugagagagcagcugagcagcgugagcagcuucgagagauucgagaucuuccccaagaccagcagcuggcccaaccacgacagcaacaagggcgugaccgccgccugcccccacgccggcgccaagagcuucuacaagaaccugaucuggcuggugaagaagggcaacagcuaccccaagcugagccagagcuacaucaacgacaagggcaaggaggugcuggugcuguggggcauccaccaccccagcaccaccgccgaccagcagagccuguaccagaacgccgacgccuacguguucgugggcaccagcagauacagcaagaaguucaagcccgagaucgccaucagacccaaggugagagaccaggagggcagaaugaacuacuacuggacccugguggagcccggcgacaagaucaccuucgaggccaccggcaaccugguggugcccagauacgccuucaccauggagagaaacgccggcagcggcaucaucaucagcgacacccccgugcacgacugcaacaccaccugccagacccccgagggcgccaucaacaccagccugcccuuccagaacauccaccccaucaccaucggcaagugccccaaguacgugaagagcaccaagcugagacuggccaccggccugagaaacgugcccagcauccagagcagaggccuguucggcgccaucgccggcuucaucgagggcggcuggaccggcaugguggacggcugguacggcuaccaccaccagaacgagcagggcagcggcuacgccgccgaccugaagagcacccagaacgccaucgacaagaucaccaacaaggugaacagcgugaucgagaagaugaacacccaguucaccgccgugggcaaggaguucaaccaccuggagaagagaaucgagaaccugaacaagaagguggacgacggcuuccuggacaucuggaccuacaacgccgagcugcuggugcugcuggagaacgagagaacccuggacuaccacgacagcaacgugaagaaccuguacgagaaggugagaaaccagcugaagaacaacgccaaggagaucggcaacggcugcuucgaguucuaccacaagugcgacaacaccugcauggagagcgugaagaacggcaccuacgacuaccccaaguacagcgaggaggccaagcugaacagagagaagaucgacggcgugaagcuggagagcaccagaaucuaccagauccuggccaucuacagcaccguggccagcagccugauccugguggugagccugggcgccaucagcuucuggaugugcagcaacggcagccugcagugcagaaucugcaucuga

SEQ ID NO: 172509 - RNA, 1701 nt, Artificial Sequence
  derived and/or modified CDS sequence (opt4) from hemagglutinin__InfluenzaA__AIC73828
augaaggccauccugguggugcugcuguacaccuucgccaccgccaacgccgacacccugugcaucggcuaccacgccaacaacagcaccgacaccguggacaccgugcuggagaagaacgugaccgugacccacagcgugaaccugcuggaggacaagcacaacggcaagcugugcaagcugagaggcguggccccccugcaccugggcaagugcaacaucgccggcuggauccugggcaaccccgagugcgagagccugagcaccgccagcagcuggagcuacaucguggagaccagcagcagcgacaacggcaccugcuaccccggcgacuucaucaacuacgaggagcugagagagcagcugagcagcgugagcagcuucgagagauucgagaucuuccccaagaccagcagcuggcccaaccacgacagcaacaagggcgugaccgccgccugcccccacgccggcgccaagagcuucuacaagaaccugaucuggcuggugaagaagggcaacagcuaccccaagcugagccagagcuacaucaacgacaagggcaaggaggugcuggugcuguggggcauccaccaccccagcaccaccgccgaccagcagagccuguaccagaacgccgacgccuacguguucgugggcaccagcagauacagcaagaaguucaagcccgagaucgccaucagacccaaggugagagaccaggagggcagaaugaacuacuacuggacccugguggagcccggcgacaagaucaccuucgaggccaccggcaaccugguggugcccagauacgccuucaccauggagagaaacgccggcagcggcaucaucaucagcgacacccccgugcacgacugcaacaccaccugccagacccccgagggcgccaucaacaccagccugcccuuccagaacauccaccccaucaccaucggcaagugccccaaguacgugaagagcaccaagcugagacuggccaccggccugagaaacgugcccagcauccagagcagaggccuguucggcgccaucgccggcuucaucgagggcggcuggaccggcaugguggacggcugguacggcuaccaccaccagaacgagcagggcagcggcuacgccgccgaccugaagagcacccagaacgccaucgacaagaucaccaacaaggugaacagcgugaucgagaagaugaacacccaguucaccgccgugggcaaggaguucaaccaccuggagaagagaaucgagaaccugaacaagaagguggacgacggcuuccuggacaucuggaccuacaacgccgagcugcuggugcugcuggagaacgagagaacccuggacuaccacgacagcaacgugaagaaccuguacgagaaggugagaaaccagcugaagaccaacgccaaggagaucggcaacggcugcuucgaguucuaccacaagugcgacaacaccugcauggagagcgugaagaacggcaccuacgacuaccccaaguacagcgaggaggccaagcugaacagagagaagaucgacggcgugaagcuggagagcaccagaaucuaccagauccuggccaucuacagcaccgccgccagcagccuggugcugguggugagccugggcgccaucagcuucuggaugugcagcaacggcagccugcagugcagaaucugcaucuga

SEQ ID NO: 172510 - RNA, 1701 nt, Artificial Sequence
  derived and/or modified CDS sequence (opt4) from hemagglutinin__InfluenzaA__AIC73830
augaaggccauccugguggugcugcuguacaccuucgccaccgccaacgccgacacccugugcaucggcuaccacgccaacaacagcaccgacaccguggacaccgugcuggagaagaacgugaccgugacccacagcgugaaccugcuggaggacaagcacaacggcaagcugugcaagcugaagggcguggccccccugcaccugggcaagugcaacaucgccggcuggauccugggcaaccccgagugcgagagccugagcaccgccagcagcuggagcuacaucguggagaccagcagcagcgacaacggcaccugcuaccccggcgacuucaucaacuacgaggagcugagagagcagcugagcagcgugagcagcuucgagagauucgagaucuuccccaagaccagcagcuggcccaaccacgacagcaacaagggcgugaccgccgccugcccccacgccggcgccaagagcuucuacaagaaccugaucuggcuggugaagaagggcaacagcuaccccaagcugagccagagcuacaucaacgacaagggcaaggaggugcuggugcuguggggcauccaccaccccagcaccaccgccgaccagcagagccuguaccagaacgccgacgccuacguguucgugggcaccagcagauacagcaagaaguucaagcccgagaucgccaucagacccaaggugagagaccaggagggcagaaugaacuacuacuggacccugguggagcccggcgacaagaucaccuucgaggccaccggcaaccugguggugcccagauacgccuucaccauggagagaaacgccggcagcggcaucaucaucagcgacacccccgugcacgacugcaacaccaccugccagacccccgagggcgccaucaacaccagccugcccuuccagaacauccaccccaucaccaucggcaagugccccaaguacgugaagagcaccaagcugagacuggccaccggccugagaaacgugcccagcauccagagcagaggccuguucggcgccaucgccggcuucaucgagggcggcuggaccggcaugguggacggcugguacggcuaccaccaccagaacgagcagggcagcggcuacgccgccgaccugaagagcacccagaacgccaucgacaagaucaccaacaaggugaacagcgugaucgagaagaugaacacccaguucaccgccgugggcaaggaguucaaccaccuggagaagagaaucgagaaccugaacaagaagguggacgacggcuuccuggacaucuggaccuacaacgccgagcugcuggugcugcuggagaacgagagaacccuggacuaccacgacagcaacgugaagaaccuguacgagaaggugagaaaccagcugaagaacaacgccaaggagaucggcaacggcugcuucgaguucuaccacaagugcgacaacaccugcauggagagcgugaagaacggcaccuacgacuaccccaaguacagcgaggaggccaagcugaacagagagaagaucgacggcgugaagcuggagagcaccagaaucuaccagauccuggccaucuacagcaccguggccagcagccuggugcugguggugagccugggcgccaucagcuucuggaugugcagcaacggcagccugcagugcagaaucugcaucuga

SEQ ID NO: 172511 - RNA, 1701 nt, Artificial Sequence
  derived and/or modified CDS sequence (opt4) from hemagglutinin__InfluenzaA__AIC73833
augaaggccauccugguggugcugcuguacaccuucgccaccgccaacgccgacacccugugcaucggcuaccacgccaacaacagcaccgacaccguggacaccgugcuggagaagaacgugaccgugacccacagcgugaaccugcuggaggacaagcacaacggcaagcugugcaagcugagaggcguggccccccugcaccugggcaagugcaacaucgccggcuggauccugggcaaccccgagugcgagagccugagcaccgccagcagcuggagcuacaucguggagaccagcagcagcgacaacggcaccugcuaccccggcgacuucaucaacuacgaggagcugagagagcagcugagcagcgugagcagcuucgagagauucgagaucuuccccaagaccagcagcuggcccaaccacgacagcaacaagggcgugaccgccgccugcccccacgccggcgccaagagcuucuacaagaaccugaucuggcuggugaagaagggcaacagcuaccccaagcugagccagagcuacaucaacgacaagggcaaggaggugcuggugcuguggggcauccaccaccccagcaccaccgccgaccagcagagccuguaccagaacgccgacgccuacguguucgugggcaccagcagauacagcaagaaguucaagcccgagaucgccaucagacccaaggugagagaccaggagggcagaaugaacuacuacuggacccugguggagcccggcgacaagaucaccuucgaggccaccggcaaccugguggugcccagauacgccuucaccauggagagaaacgccggcagcggcaucaucaucagcgacacccccgugcacgacugcaacaccaccugccagacccccgagggcgccaucaacaccagccugcccuuccagaacauccaccccaucaccaucggcaagugccccaaguacgugaagagcaccaagcugagacuggccaccggccugagaaacgugcccagcauccagagcagaggccuguucggcgccaucgccggcuucaucgagggcggcuggaccggcaugguggacggcugguacggcuaccaccaccagaacgagcagggcagcggcuacgccgccgaccugaagagcacccagaacgccaucgacaagaucaccaacaaggugaacagcgugaucgagaagaugaacacccaguucaccgccgugggcaaggaguucaaccaccuggagaagagaaucgagaaccugaacaagaagguggacgacggcuuccuggacaucuggaccuacaacgccgagcugcuggugcugcuggagaacgagagaacccuggacuaccacgacagcaacgugaagaaccuguacgagaaggugagaaaccagcugaagaacaacgccaaggagaucggcaacggcugcuucgaguucuaccacaagugcgacaacaccugcauggagagcgugaagaacggcaccuacgacuaccccaaguacagcgaggaggccaagcugaacagagagaagaucgacggcgugaagcuggagagcaccagaaucuaccagauccuggccaucuacagcaccgccgccagcagccuggugcugguggugagccugggcgccaucagcuucuggaugugcagcaacggcagccugcagugcagaaucugcaucuga

SEQ ID NO: 172512 - RNA, 1701 nt, Artificial Sequence
  derived and/or modified CDS sequence (opt4) from hemagglutinin__InfluenzaA__AIC73834
augaaggccauccugguggugcugcuguacaccuucgccaccgccaacgccgacacccugugcaucggcuaccacgccaacaacagcaccgacaccguggacaccgugcuggagaagaacgugaccgugacccacagcgugaaccugcuggaggacaagcacaacggcaagcugugcaagcugagaggcguggccccccugcaccugggcaagugcaacaucgccggcuggauccugggcaaccccgagugcgagagccugagcaccgccagcagcuggagcuacaucguggagaccagcagcagcgacaacggcaccugcuaccccggcgacuucaucaacuacgaggagcugagagagcagcugagcagcgugagcagcuucgagagauucgagaucuuccccaagaccagcagcuggcccaaccacgacagcaacaagggcgugaccgccgccugcccccacgacggcgccaagagcuucuacaagaaccugaucuggcuggugaagaagggcaacagcuaccccaagcugagccagagcuacaucaacgacaagggcaaggaggugcuggugcuguggggcauccaccaccccagcaccaccgccggccagcagagccuguaccagaacgccgacgccuacguguucgugggcaccagcagauacagcaagaaguucaagcccgagaucgccaucagacccaaggugagagaccaggagggcagaaugaacuacuacuggacccugguggagcccggcgacaagaucaccuucgaggccaccggcaaccugguggugcccagauacgccuucaccauggagagaaacgccggcagcggcaucaucaucagcgacacccccgugcacgacugcaacaccaccugccagacccccgagggcgccaucaacaccagccugcccuuccagaacauccaccccaucaccaucggcaagugccccaaguacgugaagagcaccaagcugagacuggccaccggccugagaaacgugcccagcauccagagcagaggccuguucggcgccaucgccggcuucaucgagggcggcuggaccggcaugguggacggcugguacggcuaccaccaccagaacgagcagggcagcggcuacgccgccgaccugaagagcacccagaacgccaucgacaagaucaccaacaaggugaacagcgugaucgagaagaugaacacccaguucaccgccgugggcaaggaguucaaccaccuggagaagagaaucgagaaccugaacaagaagguggacgacggcuuccuggacaucuggaccuacaacgccgagcugcuggugcugcuggagaacgagagaacccuggacuaccacgacagcaacgugaagaaccuguacgagaaggugagaaaccagcugaagaacaacgccaaggagaucggcaacggcugcuucgaguucuaccacaagugcgacaacaccugcauggagagcgugaagaacggcaccuacgacuaccccaaguacagcgaggaggccaagcugaacagagagaagaucgacggcgugaagcuggagagcaccagaaucuaccagauccuggccaucuacagcaccguggccagcagccuggugcugguggugagccugggcgccaucagcuucuggaugugcagcaacggcagccugcagugcagaaucugcaucuga

SEQ ID NO: 172513 - RNA, 1701 nt, Artificial Sequence
  derived and/or modified CDS sequence (opt4) from hemagglutinin__InfluenzaA__AIC73835
augaaggccauccugguggugcugcuguacaccuucgccaccgccaacgccgacacccugugcaucggcuaccacgccaacaacagcaccgacaccguggacaccgugcuggagaagaacgugaccgugacccacagcgugaaccugcuggaggacaagcacaacggcaagcugugcaagcugagaggcguggccccccugcaccugggcaagugcaacaucgccggcuggauccugggcaaccccgagugcgagagccugagcaccgccagcagcuggagcuacaucguggagaccagcagcagcgacaacggcaccugcuaccccggcgacuucaucaacuacgaggagcugagagagcagcugagcagcgugagcagcuucgagagauucgagaucuuccccaagaccagcagcuggcccaaccacgacagcaacaagggcgugaccgccgccugcccccacgccggcgccaagagcuucuacaagaaccugaucuggcuggugaagaagggcaacagcuaccccaagcugagccagagcuacaucaacgacaagggcaaggaggugcuggugcuguggggcauccaccaccccagcaccaccgccgaccagcagagccuguaccagaacgccgacgccuacguguucgugggcaccagcagauacagcaagaaguucaagcccgagaucgccaucagacccaaggugagagaccaggagggcagaaugaacuacuacuggacccugaucgagcccggcgacaagaucaccuucgaggccaccggcaaccugguggugcccagauacgccuucaccauggagagaaacgccggcagcggcaucaucaucagcgacacccccgugcacgacugcaacaccaccugccagacccccgagggcgccaucaacaccagccugcccuuccagaacauccaccccaucaccaucggcaagugccccaaguacgugaagagcaccaagcugagacuggccaccggccugagaaacgugcccagcauccagagcagaggccuguucggcgccaucgccggcuucaucgagggcggcuggaccggcaugguggacggcugguacggcuaccaccaccagaacgagcagggcagcggcuacgccgccgaccugaagagcacccagaacgccaucgacaagaucaccaacaaggugaacagcgugaucgagaagaugaacacccaguucaccgccgugggcaaggaguucaaccaccuggagaagagaaucgagaaccugaacaagaagguggacgacggcuuccuggacaucuggaccuacaacgccgagcugcuggugcugcuggagaacgagagaacccuggacuaccacgacagcaacgugaagaaccuguacgagaaggugagaaaccagcugaagaacaacgccaaggagaucggcaacggcugcuucgaguucuaccacaagugcgacaacaccugcauggagagcgugaagaacggcaccuacgacuaccccaaguacagcgaggaggccaagcugaacagagagaagaucgacggcgugaagcuggagagcaccagaaucuaccagauccuggccaucuacagcaccguggccagcagccuggugcugguggugagccugggcgccaucagccuguggaugugcagcaacggcagccugcagugcagaaucugcaucuga

SEQ ID NO: 172514 - RNA, 1701 nt, Artificial Sequence; identical to SEQ ID NO: 172456
  derived and/or modified CDS sequence (opt4) from hemagglutinin__InfluenzaA__AIC73836

SEQ ID NO: 172515 - RNA, 1701 nt, Artificial Sequence
  derived and/or modified CDS sequence (opt4) from hemagglutinin__InfluenzaA__AIC73837
augaagaccaucaucgcccugagcuacauccugugccugguguucgcccagaagcugcccggcaacgacaacagcaccgccacccugugccugggccaccacgccgugcccaacggcaccaucgugaagaccaucaccaacgacagaaucgaggugaccaacgccaccgagcuggugcagaacagcagcaucggcgagaucugcgacagcccccaccagauccuggacggcgagaacugcacccugaucgacgcccugcugggcgacccccagugcgacggcuuccagaacaagaagugggaccuguucguggagagaagcaaggccuacagcaacugcuaccccuacgacgugcccgacuacgccagccugagaagccugguggccagcagcggcacccuggaguucaacaacgagagcuucaacugggccggcgugacccagaacggcaccagcagcgccugcaucagaggcagcaacagcagcuucuucagcagacugaacuggcugacccaccugaacuucaaguaccccgcccugaacgugaccaugcccaacaacgagcaguucgacaagcuguacaucuggggcgugcaccaccccggcaccgacaaggaccagaucuuccuguacgcccagagcagcggcagaaucaccgugagcaccaagagaagccagcaggccgugauccccaacaucggcagcagacccagaaucagaaacauccccagcagaaucagcaucuacuggaccaucgugaagcccggcgacauccugcugaucaacagcaccggcaaccugaucgcccccagaggcuacuucaagaucagaagcggcaagagcagcaucaugagaagcgacgcccccaucggcaagugcaagagcgagugcaucacccccaacggcagcauccccaacgacaagcccuuccagaacgugaacagaaucaccuacggcgccugccccagauacgugaagcagagcacccugaagcuggccaccggcaugagaaacgugcccgagaagcagaccagaggcaucuucggcgccaucgccggcuucaucgagaacggcugggagggcaugaaggacggcugguacggcuucagacaccagaacagcgagggcagaggccaggccgccgaccugaagagcacccaggccgccaucgaccagaucaacggcaagcugaacagacugaucggcaagaccaacgagaaguuccaccagaucgagaaggaguucagcgagguggagggcagaauccaggaccuggagaaguacguggaggacaccaagaucgaccuguggagcuacaacgccgagcugcugguggcccuggagaaccagcacaccaucgaccugaccgacagcgagaugaacaagcuguucgagaagaccaagaagcagcugagagagaacgccgaggacaugggcaacggcugcuucaagaucuaccacaagugcgacaacgccugcaucggcagcaucagaaacggcaccuacgaccacgacguguacagagacgaggcccugaacaacagauuccagaucaagggcguggagcugaagagcggcuacaaggacuggauccuguggaucagcuucgccaucagcugcuuccugcugugcguggcccugcugggcuucaucaugugggccugccagaagggcaacaucagaugcaacaucugcaucuga

SEQ ID NO: 172516 - RNA, 1701 nt, Artificial Sequence
  derived and/or modified CDS sequence (opt4) from hemagglutinin__InfluenzaA__AIC73838
augaagaccaucaucgcccugagcuacauccugugccugguguucgcccagaagcugcccggcaacgacaacagcaccgccacccugugccugggccaccacgccgugcccaacggcaccaucgugaagaccaucaccaacgacagaaucgaggugaccaacgccaccgagcuggugcagaacagcagcaucggcgagaucugcaacagcccccaccagauccuggacggcgagaacugcacccugaucgacgcccugcugggcgacccccagugcgacggcuuccagaacaagaagugggaccuguucguggagagaagcaaggccuacagcaacugcuaccccuacgacgugcccgacuacgccagccugagaagccugguggccagcagcggcacccuggaguucaacaacgagagcuucaacugggccggcgugacccagaacggcaccagcagcgccugcaucagaggcagcaacagcagcuucuucagcagacugaacuggcugacccacagcaacuucaaguaccccgcccugaacgugaccaugcccaacaacgagcaguucgacaagcuguacaucuggggcgugcaccaccccggcaccgacaaggaccagaucuuccuguacgcccagagcagcggcagaaucaccgugagcaccaagagaagccagcaggccgugauccccaacaucggcagcagacccagaaucagaaacauccccagcagaaucagcaucuacuggaccaucgugaagcccggcgacauccugcugaucaacagcaccggcaaccugaucgcccccagaggcuacuucaagaucagaagcggcaagagcagcaucaugagaagcgacgcccccaucggcaagugcaagagcgagugcaucacccccaacggcagcauccccaacgacaagcccuuccagaacgugaacagaaucaccuacggcgccugccccagauacgugaagcagagcacccugaagcuggccaccggcaugagaaacgugcccgagaagcagaccagaggcaucuucggcgccaucgccggcuucaucgagaacggcugggagggcaugauggacggcugguacggcuucagacaccagaacagcgagggcagaggccaggccgccgaccugaagagcacccaggccgccaucgaccagaucaacggcaagcugaacagacugaucggcaagaccaacgagaaguuccaccagaucgagaaggaguucagcgagguggagggcagaauccaggaccuggagaaguacguggaggacaccaagaucgaccuguggagcuacaacgccgagcugcugguggcccuggagaaccagcacaccaucgaccugaccgacagcgagaugaacaagcuguucgagaagaccaagaagcagcugagagagaacgccgaggaccugggcaacggcugcuucaagaucuaccacaagugcgacaacgccugcaucggcagcaucagaaacggcaccuacgaccacgacguguacagagacgaggcccugaacaacagauuccagaucaagggcguggagcugaagagcggcuacaaggacuggauccuguggaucagcuucgccaucagcugcuuccugcugugcguggcccugcugggcuucaucaugugggccugccagaagggcaacaucagaugcaacaucugcaucuga

SEQ ID NO: 172517 - RNA, 1701 nt, Artificial Sequence
  derived and/or modified CDS sequence (opt4) from hemagglutinin__InfluenzaA__AIC73839
augaaggccauccugguggugcugcuguacaccuucgccaccgccaacgccgacacccugugcaucggcuaccacgccaacaacagcaccgacaccguggacaccgugcuggagaagaacgugaccgugacccacagcgugaaccugcuggaggacaagcacaacggcaagcugugcaagcugagaggcguggccccccugcaccugggcaagugcaacaucgccggcuggauccugggcaaccccgagugcgagagccugagcaccgccagcagcuggagcuacaucguggagaccagcagcagcgacaacggcaccugcuaccccggcgacuucaucaacuacgaggagcugagagagcagcugagcagcgugagcagcuucgagagauucgagaucuuccccaagaccagcagcuggcccgaccacgacagcaacaagggcgugaccgccgccugcccccacgccggcgccaagagcuucuacaagaaccugaucuggcuggugaagaagggcaacagcuaccccaagcugagccagagcuacaucaacgacaagggcaaggaggugcuggugcuguggggcauccaccaccccagcaccaccgccgaccagcagagccuguaccagaacgccgacgccuacguguucgugggcaccagcagauacagcaagaaguucaagcccgagaucgccaucagacccaaggugagagaccaggagggcagaaugaacuacuacuggacccugguggagcccggcgacaagaucaccuucgaggccaccggcaaccugguggugcccagauacgccuucaccauggagagaaacgccggcagcggcaucaucaucagcgacacccccgugcacgacugcaacaccaccugccagacccccgagggcgccaucaacaccagccugcccuuccagaacauccaccccaucaccaucggcaagugccccaaguacgugaagagcaccaagcugagacuggccaccggccugagaaacgugcccagcauccagagcagaggccuguucggcgccaucgccggcuucaucgagggcggcuggaccggcaugguggacggcugguacggcuaccaccaccagaacgagcagggcagcggcuacgccgccgaccugaagagcacccagaacgccaucgacaagaucaccaacaaggugaacagcgugaucgagaagaugaacacccaguucaccgccgugggcaaggaguucaaccaccuggagaagagaaucgagaaccugaacaagaagguggacgacggcuuccuggacaucuggaccuacaacgccgagcugcuggugcugcuggagaacgagagaacccuggacuaccacgacagcaacgugaagaaccuguacgagaaggugagaaaccagcugaagaacaacgccaaggagaccggcaacggcugcuucgaguucuaccacaagugcgacaacaccugcauggagagcgugaagaacggcaccuacgacuaccccaaguacagcgaggaggccaagcugaacagagagaagaucgacggcgugaagcuggagagcaccagaaucuaccagauccuggccaucuacagcaccguggccagcagccuggugcugguggugagccugggcgccaucagcuucuggaugugcagcaacggcagccugcagugcagaaucugcaucuga

SEQ ID NO: 172518 - RNA, 1701 nt, Artificial Sequence; identical to SEQ ID NO: 170100
  derived and/or modified CDS sequence (opt4) from hemagglutinin__InfluenzaA__AIC73840

SEQ ID NO: 172519 - RNA, 1701 nt, Artificial Sequence
  derived and/or modified CDS sequence (opt4) from hemagglutinin__InfluenzaA__AIC73841
augaaggccauccugguggugcugcuguacaccuucgccaccgccaacgccgacacccugugcaucggcuaccacgccaacaacagcaccgacaccguggacaccgugcuggagaagaacgugaccgugacccacagcgugaaccugcuggaggacaagcacaacggcaagcugugcaagcugagaggcguggccccccugcaccugggcaagugcaacaucgccggcuggauccugggcaaccccgagugcgagagccugagcaccgccagcagcuggagcuacaucguggagaccagcagcagcgacaacggcaccugcuaccccggcgacuucaucaacuacgaggagcugagagagcagcugagcagcgugagcagcuucgagagauucgagaucuuccccaagaccagcagcuggcccaaccacgacagcaacaagggcgugaccgccgccugcccccacgccggcgccaagagcuucuacaagaaccugaucuggcuggugaagaagggcaacagcuaccccaagcugagccagagcuacaucaacgacaagggcaaggaggugcuggugcuguggggcauccaccaccccagcaccaucgccgaccagcagagccuguaccagaacgccgacgccuacguguucgugggcaccagcagauacagcaagaaguucaagcccgagaucgccaucagacccaaggugagagaccaggagggcagaaugaacuacuacuggacccugguggagcccggcgacaagaucaccuucgaggccaccggcaaccugguggugcccagauacgccuucaccauggagagaaacgccggcagcggcaucaucaucagcgacacccccgugcacgacugcaacaccaccugccagacccccgagggcgccaucaacaccagccugcccuuccagaacauccaccccaucaccaucggcaagugccccaaguacgugaagagcaccaagcugagacuggccaccggccugagaaacauccccagcauccagagcagaggccuguucggcgccaucgccggcuucaucgagggcggcuggaccggcaugguggacggcugguacggcuaccaccaccagaacgagcagggcagcggcuacgccgccgaccugaagagcacccagaacgccaucgacaagaucaccaacaaggugaacagcgugaucgagaagaugaacacccaguucaccgccgugggcaaggaguucaaccaccuggagaagagaaucgagaaccugaacaagaagguggacgacggcuuccuggacaucuggaccuacaacgccgagcugcuggugcugcuggagaacgagagaacccuggacuaccacgacagcaacgugaagaaccuguacgagaaggugagaaaccagcugaagaacaacgccaaggagaucggcaacggcugcuucgaguucuaccacaagugcgacaacaccugcauggagagcgugaagaacggcaccuacgacuaccccaaguacagcgaggaggccaagcugaacagagagaagaucgacggcgugaagcuggagagcaccagaaucuaccagauccuggccaucuacagcaccguggccagcagccuggugcugguggugagccugggcgccaucagcuucuggaugugcagcaacggcagccugcagugcagaaucugcaucuga

SEQ ID NO: 172520 - RNA, 1701 nt, Artificial Sequence; identical to SEQ ID NO: 172515
  derived and/or modified CDS sequence (opt4) from hemagglutinin__InfluenzaA__AIC73842

SEQ ID NO: 172521 - RNA, 1707 nt, Artificial Sequence
  derived and/or modified CDS sequence (opt4) from hemagglutinin__InfluenzaA__AID48082
auggagaagaucgugcugcuguucgccaucgugagccuggugaagagcgaccagaucugcaucggcuaccacgccaacaacagcaccgagcagguggacaccaucauggagaagaacgugaccgugacccacgcccaggacauccuggagaagacccacaacggcaagcugugcgaccuggacggcgugaagccccugauccugagagacugcagcguggccggcuggcugcugggcaaccccaugugcgacgaguucaucaacgugcccgaguggagcuacaucguggagaaggccaaccccgugaacgaccugugcuaccccggcgacuucaacgacuacgaggagcugaagcaccugcugagcagaaucaaccacuucgagaagauccagaucauccccaagagcagcuggagcagccacgaggccagccugggcgugagcagcgccugccccuaccagggcaagagcagcuucuucagaaacgugguguggcugaucaagaagaacagcaccuaccccaccaucaagagaagcuacaacaacaccaaccaggaggaccugcuggugcuguggggcauccaccaccccaacgacgccgccgagcagaccaagcuguaccagaaccccaccaccuacaucagcgugggcaccagcacccugaaccagagacuggugcccagaaucgccaccagaagcaaggugaacggccagagcggcagaauggaguucuucuggaccauccugaagcccaacgacgccaucaacuucgagagcaacggcaacuucaucgcccccgaguacgccuacaagaucgugaagaagggcgacagcaccaucaugaagagcgagcuggaguacggcaacugcaacaccaagugccagacccccaugggcgccaucaacagcagcaugcccuuccacaacauccacccccugaccaucggcgagugccccaaguacgugaagagcaacagacuggugcuggccaccggccugagaaacagcccccagagagagagaagaagaaagaagagaggccuguucggcgccaucgccggcuucaucgagggcggcuggcagggcaugguggacggcugguacggcuaccaccacagcaacgagcagggcagcggcuacgccgccgacaaggagagcacccagaaggccaucgacggcgugaccaacaaggugaacagcaucaucgacaagaugaacacccaguucgaggccgugggcagagaguucaaccaccuggagagaagaaucgagaaccugaacaagaagauggaggacggcuuccuggacguguggaccuacaacgccgagcugcuggugcugauggagaacgagagaacccuggacuuccacgacagcaacgugaagaaccuguacgacaaggugagacugcagcugagagacaacgccaaggagcugggcaacggcugcuucgaguucuaccacaagugcgacgacgagugcauggagagcgugagaaacggcaccuacgacuacccccaguacagcgaggaggccagacugaagagagaggagaucagcggcgugaagcuggagagcaucggcaucuaccagauccugagcaucuacagcaccguggccagcagccuggcccuggccaucaugguggccggccugagccuguggaugugcagcaacggcagccugcagugcagaaucugcaucuga

SEQ ID NO: 172522 - RNA, 1701 nt, Artificial Sequence
  derived and/or modified CDS sequence (opt4) from hemagglutinin__InfluenzaA__AID70444
augaaggccgugcugguggugcugcuguacaccuucgccaccgccaacgccgacacccugugcaucggcuaccacgccaacaacagcaccgacaccguggacaccgugcuggagaagaacgugaccgugacccacagcgugaaccugcuggaggacaagcacaacggcaagcugugcaagcugagaggcguggccccccugcaccugggcaagugcaacaucgccggcuggauccugggcaaccccgagugcgagagccuggccaccgccagcagcuggagcuacaucguggagaccagcaacagcgacaacggcaccugcuaccccggcgacuucaucgacuacgaggagcugagagagcagcugagcagcgugagcagcuucgagagauucgagaucuuccccaagaccagcagcuggcccaaccacgacagcaacaagggcgugaccgccgccugcccccacgccggcgccaagagcuucuacaagaaccugaucuggcuggugaagaagggcaacagcuaccccaagcugagcaagagcuacaucaacgacaagggcagagaggugcuggugcuguggggcauccaccaccccagcaccagcgccgaccagcagagccuguaccagaacgccgacaccuacguguucgugggcaccagcagauacagcaagaaguucaagcccgagaucgccaucagacccaaggugagagaccaggagggcagaaugaacuacuacuggacccugguggagcccggcgacaagaucaccuucgaggccaccggcaaccugguggugcccagauacgccuucgccauggagagaaacgccggcagcggcaucaucaucagcgacacccccgugcacgacugcaacaccaccugccagacccccaagggcgccaucaacaccagccugcccuuccagaacauccaccccaucaccaucggcaagugccccaaguacgugaagagcaccaagcugagacuggccaccggccugagaaacgugcccagcauccagagcagaggccuguucggcgccaucgccggcuucaucgagggcggcuggaccggcaugguggacggcugguacggcuaccaccaccagaacgagcagggcagcggcuacgccgccgaccugaagagcacccagaacgccaucgacgagaucaccaacaaggugaacagcgugaucgagaagaugaacacccaguucaccgccgugggcaaggaguucaaccaccuggagaagagaaucgagaaccugaacaagaagguggacgacggcuuccuggacaucuggaccuacaacgccgagcugcugguggugcuggagaacgagagaacccuggaguaccacgacagcaacgugaagaaccuguacgagaaggugagaagccaggugaagaacaacgccaaggagaucggcaacggcugcuucgaguucuaccacaagugcgacaacaccugcauggagagcgugaagaacggcaccuacgacuaccccaaguacagcgaggaggccaagcugaacagagaggagaucgacggcgugaagcuggagagcaccagaaucuaccagauccuggccaucuacagcaccguggccagcagccuggugcugguggugagccugggcgccaucagcuucuggaugugcuucaacggcagccugcagugcagaaucuacaucuga

SEQ ID NO: 172523 - RNA, 1701 nt, Artificial Sequence
  derived and/or modified CDS sequence (opt4) from hemagglutinin__InfluenzaA__AID70445
augaaggccauccugguggugcugcuguacaccuucgccaccgccaacgccgacacccugugcaucggcuaccacgccaacaacagcaccgacaccguggacaccgugcuggagaagaacgugaccgugacccacagcgugaaccugcuggaggacaagcacaacggcaagcugugcaagcugagaggcguggccccccugcaccugggcaagugcaacaucgccggcuggauccugggcaaccccgagugcgagagccugagcaccgccagcagcuggagcuacaucguggagaccagcagcagcgacaacggcaccugcuaccccggcgacuucaucgacuacgaggagcugagagagcagcugagcagcgugagcagcuucgagagauucgagaucuuccccaagaccagcagcuggcccaaccacgacagcaacaagggcgugaccgccgccugcccccacgccggcgccaagagcuucuacaagaaccugaucuggcuggugaagaagggcaacagcuaccccaagcugagcaagagcuacaucaacgacaagggcaaggaggugcuggugcuguggggcauccaccaccccagcaccaccgccgaccagcagagccuguaccagaacgccgacaccuacguguucgugggcaccagcagauacagcaagaaguucaagcccgagaucgccaucagacccaaggugagagaccaggagggcagaaugaacuacuacuggacccugguggagcccggcgacaagaucaccuucgaggccaccggcaaccugguggugcccagauacgccuucgccauggagagaaacgccggcagcggcaucaucaucagcgacacccccgugcacgacugcaacaccaccugccagacccccaagggcgccaucaacaccagccugcccuuccagaacauccaccccaucaccaucggcaagugccccaaguacgugaagagcaccaagcugagacuggccaccggccugagaaacgugcccagcauccagagcagaggccuguucggcgccaucgccggcuucaucgagggcggcuggaccggcaugguggacggcugguacggcuaccaccaccagaacgagcagggcagcggcuacgccgccgaccugaagagcacccagaacgccaucgacaagaucaccaacaaggugaacagcgugaucgagaagaugaacacccaguucaccgccgugggcaaggaguucaaccaccuggagaagagaaucgagaaccugaacaagaagguggacgacggcuuccuggacaucuggaccuacaacgccgagcugcugguggugcuggagaacgagagaacccuggaguaccacgacagcaacgugaagaaccuguacgagaaggugagaaaccagcugaagaacaacgccaaggagaucggcaacggcugcuucgaguucuaccacaagugcgacaacaccugcauggagagcgugaagaacggcaucuacgacuaccccaaguacagcgaggaggccaagcugaacagagaggagaucgacggcgugaagcuggagagcaccagaaucuaccagauccuggccaucuacagcaccguggccagcagccuggugcagguggugagccugggcgccaucagcuucuggaugugcuucaacggcagccugcagugcagaaucugcaucuga

SEQ ID NO: 172524 - RNA, 1701 nt, Artificial Sequence
  derived and/or modified CDS sequence (opt4) from hemagglutinin__InfluenzaA__AID70446
augaaggccgugcugguggugcugcuguacaccuucgccaccgccaacgccgacacccugugcaucggcuaccacgccaacaacagcaccgacaccguggacaccgugcuggagaagaacgugaccgugacccacagcgugaaccugcuggaggacaagcacaacggcaagcugugcaagcugagaggcguggccccccugcaccugggcaagugcaacaucgccggcuggauccugggcaaccccgagugcgagagccugagcaccgccagcagcuggagcuacaucguggagaccagcagcagcgacaacggcaccugcuaccccggcgacuucaucgacuacgaggagcugagagagcagcugagcagcgugagcagcuucgagagauucgagaucuuccccaagaccagcagcuggcccaaccacgacagcaacaagggcgugaccgccgccugcccccacgccggcgccaagagcuucuacaagaaccugaucuggcuggugaagaagggcaacagcuaccccaagcugagcaagagcuacaucaacgacaagggcaaggagauccuggugcuguggggcauccaccaccccagcaccaccgccgaccagcagagccuguaccagaacgccgacaccuacguguucgugggcaccagcagauacagcaagaaguucaagcccgagaucgccaucagacccaaggugagagaccaggagggcagaaugaacuacuacuggacccugguggagcccggcgacaagaucaccuucgaggccaccggcaaccugguggugcccagauacgccuucgccauggagagaaacgccggcagcggcaucaucaucagcggcacccccgugcacgacugcaacaccaccugccagacccccaagggcgccaucaacaccagccugcccuuccagaacauccaccccaucaccaucggcaagugccccaaguacgugaagagcaccaagcugagacuggccaccggccugagaaacgugcccagcauccagagcagaggccuguucggcgccaucgccggcuucaucgagggcggcuggaccggcaugguggacggcugguacggcuaccaccaccagaacgagcagggcagcggcuacgccgccgaccugaagagcacccagaacgccaucgacaagaucaccaacaaggugaacagcgugaucgagaagaugaacacccaguucaccgccgugggcaaggaguucaaccaccuggagaagagaaucgagaaccugaacaagaagguggacgacggcuuccuggacaucuggaccuacaacgccgagcugcugguggugcuggagaacgagagaacccuggaguaccacgacagcaacgugaagaaccuguacgagaaggugagaaaccagcugaagaacaacgccaaggagaucggcaacggcugcuucgaguucuaccacaagugcgacaacaccugcauggagagcgugaagaacggcaucuacgacuaccccaaguacagcgaggaggccaagcugaacagagaggagaucgacggcgugaagcuggagagcaccagaaucuaccagauccuggccaucuacagcaccguggccagcagccuggugcagguggugagccugggcgccaucagcuucuggaugugcuucaacggcagccugcagugcagaaucugcaucuga

SEQ ID NO: 172525 - RNA, 1701 nt, Artificial Sequence
  derived and/or modified CDS sequence (opt4) from hemagglutinin__InfluenzaA__AID70447
augaaggccauccugguggugcugcuguacaccuucgccaccgccaacgccgacacccugugcaucggcuaccacgccaacaacagcaccgacaccguggacaccgugcuggagaagaacgugaccgugacccacagcgugaaccugcuggaggacaagcacaacggcaagcugugcaagcugagaggcguggccccccugcaccugggcaagugcaacaucgccggcuggauccugggcaaccccgagugcgagagccugagcaccgccagcagcuggagcuacaucguggagaccagcagcagcgacaacggcaccugcuaccccggcgacuucaucgacuacgaggagcugagagagcagcugagcagcgugagcagcuucgagagauucgagaucuuccccaagaccagcagcuggcccaaccacgacagcaacaagggcgugaccgccgccugcccccaggccggcgccaagggcuucuacaagaaccugcuguggcuggugaagaagggcaacagcuaccccaagcugagcaagagcuacaucaacgacaagggcaaggaggugcuggugcuguggggcauccaccaccccagcaccaccgccgaccagcagagccuguaccagaacgccgacaccuacguguucgugggcaccagcagauacagcaagaaguucaagcccgagaucgccaucagacccaaggugagagaccaggagggcagaaugaacuacuacuggacccugguggagcccggcgacaagaucaccuucgaggccaccggcaaccugguggugcccagauacgccuucgccauggagagaaacgccggcagcggcaucaucaucagcgacacccccgugcacgacugcaacaccaccugccagacccccaagggcgccaucaacaccagccugcccuuccagaacauccaccccaucaccaucggcaagugccccaaguacgugaagagcaccaagcugagacuggccaccggccugagaaacgugcccagcauccagagcagaggccuguucggcgccaucgccggcuucaucgagggcggcuggaccggcaugguggacggcugguacggcuaccaccaccagaacgagcagggcagcggcuacgccgccgaccugaagagcacccagaacgccaucgacaagaucaccaacaaggugaacagcgugaucgagaagaugaacacccaguucaccagcgugggcaaggaguucaaccaccuggagaagagaauggagaaccugaacaagaagguggacgacggcuuccuggacaucuggaccuacaacgccgagcugcugguggugcuggagaacgagagaacccuggaguaccacgacagcaacgugaagaaccuguacgagaaggugagaaaccagcugaagaacaacgccaaggagaucggcaacggcugcuucgaguucuaccacaagugcgacaacaccugcauggagagcgugaagaacggcaucuacgacuaccccaaguacagcgaggaggccaagcugaacagagaggagaucgacggcgugaagcuggagagcaccagaaucuaccagauccuggccaucuacagcaccguggccagcagccuggugcugguggugagccugggcgccaucagcuucuggaugugcuucaacggcagccugcagugcagaaucugcaucuga

SEQ ID NO: 172526 - RNA, 1701 nt, Artificial Sequence
  derived and/or modified CDS sequence (opt4) from hemagglutinin__InfluenzaA__AID70448
augaaggccauccugguggugcugcuguacaccuucgccaccgccaacgccgacacccugugcaucggcuaccacgccaacaacagcaccgacaccguggacaccgugcuggagaagaacgugaccgugacccacagcgugaaccugcuggaggacaagcacaacggcaagcugugcaagcugagaggcguggccccccugcaccugggcaagugcaacaucgccggcuggauccugggcaaccccgagugcgagagccugagcaccgccagcagcuggagcuacaucguggagaccagcagcagcgacaacggcaccugcuaccccggcgacuucaucgacuacgaggagcugagagagcagcugagcagcgugagcagcuucgagagauucgagaucuuccccaagaccagcagcuggcccaaccacgacagcaacaagggcgugaccgccgccugcccccacgccggcgccaagggcuucuacaagaaccugaucuggcuggugaagaagggcaacagcuaccccaagcugagcaagagcuacaucaacgacaagggcaaggaggugcuggugcuguggggcauccaccaccccagcaccaccgccgaccagcagagccuguaccagaacgccgacaccuacguguucgugggcaccagcagauacagcaagaaguucaagcccgagaucgccaucagacccaaggugagagaccaggagggcagaaugaacuacuacuggacccugguggagcccggcgacaagaucaccuucgaggccaccggcaaccugguggugcccagauacgccuucaccauggagagagacgccggcagcggcaucaucaucagcgacacccccgugcacgacugcaacaccaccugccagacccccaagggcgccaucaacaccagccugcccuuccagaacauccaccccaucaccaucggcaagugccccaaguacgugaagagcaccaagcugagacuggccaccggccugagaaacgugcccagcauccagagcagaggccuguucggcgccaucgccggcuucaucgagggcggcuggaccggcaugguggacggcugguacggcuaccaccaccagaacgagcagggcagcggcuacgccgccgaccugaagagcacccagaacgccaucgacaagaucaccaacaaggugaacagcgugaucgagaagaugaacacccaguucaccgccgugggcaaggaguucaaccaccuggagaagagaaucgagaaccugaacaagaagguggacgacggcuuccuggacaucuggaccuacaacgccgagcugcugguggugcuggagaacgagagaacccuggaguaccaggacagcaacgugaagaaccuguacgagaaggugagaaaccagcugaagaacaacgccaaggagaucggcaacggcugccuggaguucuaccacaaguucgacaacaccugcauggagagcgugaagaacggcaccuacgacuaccccaaguacagcgaggaggccaagcugaacagagagaagaucgacggcgugaagcuggagagcaccagaaucuaccagauccuggccaucuacagcaccguggccagcagccuggugcugguggugagccugggcaccaucagcuucuggaugugcuucaacggcagccugcagugcagaaucugcaucuga

SEQ ID NO: 172527 - RNA, 1701 nt, Artificial Sequence
  derived and/or modified CDS sequence (opt4) from hemagglutinin__InfluenzaA__AID70449
augaaggccauccugguggugcugcuguacaccuucgccaccgccaacgccgacacccugugcaucggcuaccacgccaacaacagcaccgacaccguggacaccgugcuggagaagaacgugaccgugacccacagcgugaaccugcuggaggacaagcacaacggcaagcugugcaagcugagaggcguggccccccugcaccugggcaagugcaacaucgccggcuggauccugggcaaccccgagugcgagagccugagcaccgccagcagcuggagcuacaucguggagaccagcagcagcgacaacggcaccugcuaccccggcgacuucaucgacuacgaggagcugagagagcagcugagcagcgugagcagcuucgagagauucgagaucuuccccaagaccagcagcuggcccaaccacgacagcaacaagggcgugaccgccgccugcccccacgccggcgccaagagcuucuacaagaaccugaucuggcuggugaagaagggcaacagcuaccccaagcugagcaagagcuacaucaacgacaagggcaaggaggugcuggugcuguggggcauccaccaccccagcaccaccgccgaccagcagagccuguaccagaacgccgacaccuacguguucgugggcaccagcagauacagcaagaaguucaagcccgagaucgccaucagacccaaggugagagaccaggagggcagaaugaacuacuacuggacccugguggagcccggcgacaagaucaccuucgaggccaccggcaaccugguggugcccagauacgccuucgccauggagagaaacgccggcagcggcaucaucaucagcgacacccccgugcacgacugcaacaccaccugccagacccccaagggcgccaucaacaccagccugcccuuccagaacauccaccccaucaccaucggcaagugccccaaguacgugaagagcaccaagcugagacuggccaccggccugagaaacgugcccagcauccagagcagaggccuguucggcgccaucgccggcuucaucgagggcggcuggaccggcaugguggacggcugguacggcuaccaccaccagaacgagcagggcagcggcuacgccgccgaccugaagagcacccagaacgccaucgacaagaucaccaacaaggugaacagcgugaucgagaagaugaacacccaguucaccgccgugggcaaggaguucaaccaccuggagaagagaaucgagaaccugaacaagaagguggacgacggcuuccuggacaucuggaccuacaacgccgagcugcugguggugcuggagaacgagagaacccuggaguaccacgacagcaacgugaagaaccuguacgagaaggugagaaaccagcugaagaacaacgccaaggagaucggcaacggcugcuucgaguucuaccacaagugcgacaacaccugcauggagagcgugaagaacggcaccuacgacuaccccaaguacagcgaggaggccaagcugaacagagaggagaucgacggcgugaagcuggagagcaccagaaucuaccagauccuggccaucuacagcaccguggccagcagccuggugcugguggugagccugggcgccaucagcuucuggaugugcuucaacggcagccugcagugcagaaucugcguguga

SEQ ID NO: 172528 - RNA, 1701 nt, Artificial Sequence
  derived and/or modified CDS sequence (opt4) from hemagglutinin__InfluenzaA__AID70450
augaaggccauccugguggugcugcuguacaccuucgccaccgccaacgccgacacccugugcaucggcuaccacgccaacaacagcaccgacaccguggacaccgugcuggagaagaacgugaccgugacccacagcgugaaccugcuggaggacaagcacaacggcaagcugugcaagcugagaggcguggccccccugcaccugggcaagugcaacaucgccggcuggauccugggcaaccccgagugcgagagccugagcaccgccagcagcuggagcuacaucguggagaccagcagcagcgacaacggcaccugcuaccccggcgacuucaucgacuacgaggagcugagagagcagcugagcagcgugagcagcuucgagagauucgagaucuuccccaagaccagcagcuggcccaaccacgacagcaacaagggcgugaccgccgccugcccccacgccggcgccaagggcuucuacaagaaccugaucuggcuggugaagaagggcaacagcuaccccaagcugagcaagagcuacaucaacgacaagggcaaggaggugcuggugcuguggggcauccaccaccccagcaccaccgccgaccagcagagccuguaccagaacgccgacaccuacguguucgugggcaccagcagauacagcaagaaguucaagcccgagaucgccaucagacccaaggugagagaccaggagggcagaaugaacuacuacuggacccugguggagcccggcgacaagaucaccuucgaggccaccggcaaccugguggugcccagauacgccuucgccauggagagagacgccggcagcggcaucaucaucagcgacacccccgugcacgacugcaacaccaccugccagaccagcaagggcgccaucaacaccagccugcccuuccagaacauccaccccaucaccaucggcaagugccccaaguacgugaagagcaccaagcugagacuggccaccggccugagaaacgugcccagcauccagagcagaggccuguucggcgccaucgccggcuucaucgagggcggcuggaccggcaugguggacggcugguacggcuaccaccaccagaacgagcagggcagcggcuacgccgccgaccugaagagcacccagaacgccaucgacaagaucaccaacaaggugaacagcgugaucgagaagaugaacacccaguucaccgccgugggcaaggaguucaaccaccuggagaagagaaucgagaaccugaacaagaagguggacgacggcuuccuggacaucuggaccuacaacgccgagcugcugguggugcuggagaacgagagaacccuggaguaccacgacagcaacgugaagaaccuguacgagaaggugagaaaccagcugaagaacaacgccaaggagaucggcaacggcugcuucgaguucuaccacaaguucgacaacaccugcauggagagcgugaagaacggcaccuacgacuaccccaaguacagcgaggaggccaagcugaacagagagaagaucgacggcgugaagcuggagagcaccagaaucuaccagauccuggccaucuacagcaccguggccagcagccuggugcagguggugagccugggcgccaucagcuucuggaugugcuucaacggcagccugcagugcagaaucugcaucuga

SEQ ID NO: 172529 - RNA, 1701 nt, Artificial Sequence
  derived and/or modified CDS sequence (opt4) from hemagglutinin__InfluenzaA__AID70451
augaaggccauccugguggugaugcuguacaccuucgccaccgccaacgccgacacccugugcaucggcuaccacgccaacaacagcaccgacaccguggacaccgugcuggagaagaacgugaccgugacccacagcgugaaccugcuggaggacaagcacaacggcaagcugugcaagcugagaggcguggccccccugcaccugggcaagugcaacaucgccggcuggauccugggcaaccccgagugcgagagccugagcaccgccagcagcuggagcuacaucguggagaccagcagcagcgacaacggcaccugcuaccccggcgacuucaucgacuacgaggagcugagagagcagcugagcagcgugagcagcuucgagagauucgagaucuuccccaagaccagcagcuggcccaaccacgacagcaacaagggcgugaccgccgccugcccccacgccggcgccaagggcuucuacaagaaccugaucuggcuggugaagaagggcaacagcuaccccaagcugagcaagagcuacaucaacgacaagggcaaggaggugcuggugcuguggggcauccaccaccccagcaccaccgccgaccagcagagccuguaccagaacgccgacaccuacguguucgugggcaccagcagauacagcaagaaguucaagcccgagaucgccaucagacccaaggugagagaccaggagggcagaaugaacuacuacuggacccugguggagcccggcgacaagaucaccuucgaggccaccggcaaccugguggugcccagauacgccuucgccauggagagaaacgccggcagcggcaucaucaucagcgacacccccgugcacgacugcaacaccaccugccagacccccaagggcgccaucaacaccagccugcccuuccagaacauccaccccaucaccaucggcaagugccccaaguacgugaagagcaccaagcugagacuggccaccggccugagaaacgugcccagcauccagagcagaggccuguucggcgccaucgccggcuucaucgagggcggcuggaccggcaugguggacggcugguacggcuaccaccaccagaacgagcagggcagcggcuacgccgccgaccugaagagcacccagaacgccaucgacaagaucaccaacaaggugaacagcgugaucgagaagaugaacacccaguucaccgccgugggcaaggaguucaaccaccuggagaagagaaucgagaaccugaacaagaagguggacgacggcuuccuggacaucuggaccuacaacgccgagcugcugguggugcuggagaacgagagaacccuggaguaccacgacagcaacgugaagaaccuguacgagaaggugagaaaccagcugaagaacaacgccaaggagaucggcaacggcugcuucgaguucuaccacaaguucgacaacaccugcauggagagcgugaagaacggcaccuacgacuaccccaaguacagcgaggaggccaagcugaacagagaggagaucgacggcgugaagcuggagagcaccagaaucuaccagauccuggccaucuacagcaccguggccagcagccuggugcugguggugagccugggcgccaucagcuucuggaugugcuucaacggcagccugcagugcagaaucugcaucuga

SEQ ID NO: 172530 - RNA, 1701 nt, Artificial Sequence
  derived and/or modified CDS sequence (opt4) from hemagglutinin__InfluenzaA__AID70452
augaaggccauccugguggugcugcuguacaccuucgccaccgccaacgccgacacccugugcaucggcuaccacgccaacaacagcaccgacaccguggacaccgugcuggagaagaacgugaccgugacccacagcgugaaccugcuggaggacaagcacaacggcaagcugugcaagcugagaggcguggccccccugcaccugggcaagugcaacaucgccggcuggauccugggcaaccccgagugcgagagccugagcaccgccagcagcuggagcuacaucguggagaccagcagcagcgacaacggcaccugcuaccccggcgacuucaucgacuacgaggagcugagagagcagcugggcagcgugagcagcuucaagagauucgagaucuuccccaagaccagcagcuggcccaaccacgacagcaacaagggcgugaccgccgccugcccccacgccggcgccaagggcuucuacaagaaccugaucuggcuggugaagaagggcaacagcuaccccaagcugagcaagagcuacaucaacgacaagggcaaggaggugcuggugcuguggggcauccaccaccccagcaccaccgccgaccagcagagccuguaccagaacgccgacaccuacguguucgugggcaccagcagauacagcaagaaguucaagcccgagaucgccaucagacccaaggugagagaccaggagggcagaaugaacuacuacuggacccugguggagcccggcgacaagaucaccuucgaggccaccggcaaccugguggugcccagauacgccuucgccauggagagagacgccggcagcggcaucaucaucagcgacacccccgugcacgacugcaacaccaccugccagacccccaagggcgccaucaacaccagccugcccuuccagaacauccaccccaucaccaucggcaagugccccaaguacgugaagagcaccaagcugagacuggccaccggccugagaaacgugcccagcauccagagcagaggccuguucggcgccaucgccggcuucaucgagggcggcuggaccggcaugguggacggcugguacggcuaccaccaccagaacgagcagggcagcggcuacgccgccgaccugaagagcacccagaacgccaucgacaagaucaccaacaaggugaacagcgugaucgagaagaugaacacccaguucaccgccgugggcaaggaguucaaccaccuggagaagagaaucgagaaccugaacaagaagguggacgacggcuuccuggacaucuggaccuacaacgccgagcugcugguggugcuggagaacgagagaacccuggaguaccacgacagcaacgugaagaaccuguacgagaaggugagaaaccagcugaagaacaacgccaaggagaucggcaacggcugcuucgaguucuaccacaagugcgacaacaccugcauggagagcgugaagaacggcaucuacgacuaccccaaguacagcgaggaggccaagcugaacagagagaagaucgacggcgugaagcuggagagcaccagaaucuaccagauccuggccaucuacagcaccguggccagcagccuggugcugguggugagccugggcgccaucagcuucuggaugagauucaacggcagccugcagugcagcaucugcaucuga

SEQ ID NO: 172531 - RNA, 1701 nt, Artificial Sequence
  derived and/or modified CDS sequence (opt4) from hemagglutinin__InfluenzaA__AID70453
augaaggccauccugguggugcugcuguacaccuucgccaccgccaacgccgacacccugugcaucggcuaccacgccaacaacagcaccgacaccguggacaccgugcuggagaagaacgugaccgugacccacagcgugaaccugcuggaggacaagcacaacggcaagcugugcaagcugagaggcguggccccccugcaccugggcaagugcaacaucgccggcuggauccugggcaaccccgagugcgagagccugagcaccgccagcagcuggagcuacaucguggagaccagcagcagcgacaacggcaccugcuaccccggcgacuucaucgacuacgaggagcugagagagcagcugagcagcgugagcagcuucgagagauucgagaucuuccccaagaccagcagcuggcccaaccacgacagcaacaagggcgugaccgccgccugcccccacgccggcgccaagggcuucuacaagaaccugaucuggcuggugaagaagggcaacagcuaccccaagcugagcaagagcuacaucaacgacaagggcaaggaggugcuggugcuguggggcauccaccaccccagcaccaccgccgaccagcagagccuguaccagaacgccgacaccuacguguucgugggcaccagcagauacagcaagaaguucaagcccgagaucgccaucagacccaaggugagagaccaggagggcagaaugaacuacuacuggacccugguggagcccggcgacaagaucaccuucgaggccaccggcaaccugguggugcccagauacgccuucgccauggagagagacgccggcagcggcaucaucaucagcgacacccccgugcaggacugcaacaccaccugccagacccccaagggcgccaucaacaccagccugcccuuccagaacauccaccccaucaccaucggcaagugccccaaguacgugaagagcaccaagcugagacuggugaccggccugagaaacgugcccagcauccagagcagaggccuguucggcgccaucgccggcuucaucgagggcggcuggaccggcaugguggacggcugguacggcuaccaccaccagaacgagcagggcagcggcuacgccgccgaccugaagagcacccagaacgccaucgacaagaucaccaacaaggugaacagcgugaucgagaagaugaacacccaguucaccgccgugggcaaggaguucaaccaccuggagaagagaaucgagaaccugaacaagaagguggacgacggcuuccuggacaucuggaccuacaacgccgagcugcugguggugcuggagaacgagagaacccuggaguaccacgacagcaaccugaagaaccuguacgagaaggugagaaaccagcugaagaacaacgccaaggagaucggcaacggcugcuucgaguucuaccacaaguucgacaacaccugcauggagagcgugaagaacggcaccuacgacuaccccaaguacagcgaggaggccaagcugaacagagaggagaucgacggcgugaagcuggagagcaccagaaucuaccagauccuggccaucuacagcaccguggccagcagccuggugcagguggugagccugggcgccaucagcuucuggaugagauucaacggcagccugcacugcagaaucugcaucuga

SEQ ID NO: 172532 - RNA, 1701 nt, Artificial Sequence
  derived and/or modified CDS sequence (opt4) from hemagglutinin__InfluenzaA__AID70454
augaaggccauccugguggugcugcuguacaccuucgccaccgccaacgccgacacccugugcaucggcuaccacgccaacaacagcaccgacaccguggacaccgugcuggagaagaacgugaccgugacccacagcgugaaccugcuggaggacaagcacaacggcaagcugugcaagcugagaggcguggccccccugcaccugggcaagugcaacaucgccggcuggauccugggcaaccccgagugcgagagccugagcaccgccagcagcuggagcuacaucguggagaccagcagcagcgacaacggcaccugcuaccccggcgacuucaucaacuacgaggagcugagagagcagcugagcagcgugagcagcuucgagagauucgagaucuuccccaagaccagcagcuggcccaaccacgacagcaacaagggcgugaccgccgccugcccccacgccggcgccaagagcuucuacaagaaccugaucuggcuggugaagaagggcaacagcuaccccaagcugagcaagagcuacaucaacgacaagggcaaggaggugcuggugcuguggggcauccaccaccccagcaccaccgccgaccagcagagccuguaccagaacgccgacgccuacguguucgugggcaccagcagauacagcaagaaguucaagcccgagaucgccaucagacccaaggugagagaccaggagggcagaaugaacuacuacuggacccugguggagcccggcgacaagaucaccuucgaggccaccggcaaccugguggugcccagauacgccuucgccauggagagaaacgccggcagcggcaucaucaucagcgacacccccgugcacgacugcaacaccaccugccagacccccaagggcgccaucaacaccagccugcccuuccagaacauccaccccaucaccaucggcaagugccccaaguacgugaagagcaccaagaugagacuggccaccggccugagaaacgugcccugcauccagagcagaggccuguucggcgccaucgccggcuucaucgagggcggcuggaccggcaugguggacggcugguacggcuaccaccaccagaacgagcagggcagcggcuacgccgccgaccugaagagcacccagaacgccaucgacaagaucaccaacaaggugaacagcgugaucgagaagaugaacacccaguucaccgccgugggcaaggaguucaaccaccuggagaagagaaucgagaaccugaacaagaagguggacgacggcuuccuggacaucuggaccuacaacgccgagcugcugguggugcuggagaacgagagaacccuggacuaccacgacagcaacgugaagaaccuguacgagaaggugagaaaccagcugaagaacaacgccaaggagaucggcaacggcugcuucgaguucuaccacaagugcgacaacaccugcauggagagcgugaagaacggcaccuacgacuaccccaaguacagcgaggaggccaagcugaacagagaggagaucgacggcgugaagcuggagagcaccagaaucuaccagauccuggccaucuacagcaccguggccagcagccuggugcugguggugagccugggcgccaucagcuucuggaugugcagcaacggcagccugcagugcagaaucugcaucuga

SEQ ID NO: 172533 - RNA, 1701 nt, Artificial Sequence
  derived and/or modified CDS sequence (opt4) from hemagglutinin__InfluenzaA__AID70455
augaaggccauccugguggugcugcuguacaccuucgccaccgccaacgccgacacccugugcaucggcuaccacgccaacaacagcaccgacaccguggacaccgugcuggagaagaacgugaccgugacccacagcgugaaccugcuggaggacaagcacaacggcaagcugugcaagcugggcggcguggccccccugcaccugggcaagugcaacaucgccggcuggauccugggcaaccccgagugcgagagccugagcaccgccagcagcuggagcuacaucguggagaccagcagcagcgacaacggcaccugcuaccccggcgacuucaucgacuacgaggagcugagagagcagcugagcagcgugagcagcuucgagagauucgagaucuuccccaagaccagcagcuggcccaaccacgacagcaacaagggcgugaccgccgccugcccccacgccggcgccaagggcuucuacaagaaccugaucuggcuggugaagaagggcaacagcuaccccaagaucagcaagagcuacaucaacgacaagggcaaggaggugcuggugcuguggggcauccaccaccccagcaccaccgccgaccagcagagccuguaccagaacgccgacaccuacaucuucgugggcaccagcagauacagcaagaaguucaagcccgagaucgccaucagacccaaggugagagaccaggagggcagaaugaacuacuacuggacccugguggagcccggcgacaagaucaccuucgaggccaccggcaaccugguggugcccagauacgccuucgccauggagagagacgccggcagcggcaucaucaucagcgacacccccgugcacgacugcaacaccaccugccagacccccaagggcgccaucaacaccagccugcccuuccagaacauccaccccaucaccaucggcaagugccccaaguacgugaagagcaccaagcugagacuggccaccggccugagaaacgugcccagcauccagagcagaggccuguucggcgccaucgccggcuucaucgagggcggcuggaccggcaugguggacggcugguacggcuaccaccaccagaacgagcagggcagcggcuacgccgccgaccugaagagcacccagaacgccaucgacaagaucaccaacaaggugaacagcgugaucaagaagaugaacacccaguucaccgccgugggcaaggaguucaaccaccuggagaagagaaucgagaaccugaacaagaagguggacgacggcuuccuggacaucuggaccuacaacgccgagcugcugguggugcuggagaacgagagaacccuggaguaccacgacagcaacgugaagaaccuguacgagaaggugagaaaccagcugaagaacaacgccaaggagaucggcaacggcugcuucgaguucuaccacaaguucgacaacaccugcauggagagcgugaagaacggcaccuacgacuaccccaaguacagcgaggaggccaagcugaacagagaggagaucgacggcgugaagcuggagagcaccagaaucuaccagauccuggccaucuacagcaccguggccagcagccuggugcugguggugagccugggcgccaucagcuucuggaugugcuucaacggcagccugcagugcagaaucugcaucuga

SEQ ID NO: 172534 - RNA, 1701 nt, Artificial Sequence
  derived and/or modified CDS sequence (opt4) from hemagglutinin__InfluenzaA__AID70456
augaaggccauccugguggugcugcuguacaccuucgccaccgccaacgccgacacccugugcaucggcuaccacgccaacaacagcaccgacaccguggacaccgugcuggagaagaacgugaccgugacccacagcgugaaccugcuggaggacaagcacaacggcaagcugugcaagcugagaggcguggccccccugcaccugggcaagugcaacaucgccggcuggauccugggcaaccccgagugcgagagccugagcaccgccagcagcuggagcuacaucguggagaccagcagcagcgacaacggcaccugcuaccccggcgacuucaucgacuacgaggagcugagagagcagcugagcagcgugagcagcuucgagagauucgagaucuuccccaagaccagcagcuggcccaaccacgacagcaacaagggcgugaccgccgccugcccccacgccggcgccaagagcuucuacaagaaccugaucuggcuggugaagaagggcaacagcuaccccaagcugagcaagagcuacaucaacgacaagggcaaggaggugcuggugcuguggggcauccaccaccccagcaccaccgccgaccagcagagccuguaccagaacgccgacaccuacguguucgugggcaccagcagauacagcaagaaguucaagcccgagaucgccaucagacccaaggugagagaccaggagggcagaaugaacuacuacuggacccugguggagcccggcgacaagaucaccuucgaggccaccggcaaccugguggugcccagauacgccuucgccauggagagaaacgccggcagcggcaucaucaucagcgacacccccgugcacgacugcaacaccaccugccagacccccaagggcgccaucaacaccagccugcccuuccagaacauccaccccaucaccaucggcaagugccccaaguacgugaagagcaccaagcugagacuggccaccggccugagaaacgugcccagcauccagagcagaggccuguucggcgccaucgccggcuucaucgagggcggcuggaccggcaugguggacggcugguacggcuaccaccaccagaacgagcagggcagcggcuacgccgccgaccugaagagcacccagaacgccaucgacaagaucaccaacaaggugaacagcgugaucgagaagaugaacacccaguucaccgccguggugaaggaguucaaccaccuggagaagagaaucgagaaccugaacaagaagguggacgacggcuuccuggacaucuggaccuacaacgccgagcugcugguggugcuggagaacgagagaacccuggaguaccacgacagcaaccugaagaaccuguacgagaaggugagaaaccagcugaagaacaacgccaaggagaucggcaacggcugcuucgaguucuaccacaaguucgacaacaccugcauggagagcgugaagaacggcaccuacgacuaccccaaguacagcgaggaggccaagcugaacagagaggagaucgacggcgugaagcuggagagcaccagaaucuaccagauccuggccaucuacagcaccguggccagcagccuggugcagguggugagccugggcgccaucagcuucuggaugugcuucaacggcagccugcagugcagaaucugcaucuga

SEQ ID NO: 172535 - RNA, 1701 nt, Artificial Sequence
  derived and/or modified CDS sequence (opt4) from hemagglutinin__InfluenzaA__AID70457
augaaggccauccugguggugcugcuguacaccuucgccaccgccaacgccgacacccugugcaucggcuaccacgccaacaacagcaccgacaccguggacaccgugcuggagaagaacgugaccgugacccacagcgugaaccugcuggaggacaagcacaacggcaagcugugcaagcugagaggcguggccccccugcaccugggcaagugcaacaucgccggcuggauccugggcaaccccgagugcgagagccugagcaccgccagcagcuggagcuacaucguggagaccagcagcagcgacaacggcaccugcuaccccggcgacuucaucgacuacgaggagcugagagagcagcugagcagcgugagcagcuucgagagauucgagaucuuccccaagaccagcagcuggcccaaccacgacagcaacaagggcgugaccgccgccugcccccacgccggcgccaagggcuucuacaagaaccugaucuggcuggugaagaagggcaacagcuaccccaagcugagcaagagcuacaucaacgacaagggcaaggaggugcuggugcuguggggcauccaccaccccagcaccaccgccgaccagcagagccuguaccagaacgccgacaccuacguguucgugggcaccagcagauacagcaagaaguucaagcccgagaucgccaucagacccaaggugagagaccaggagggcagaaugaacuacuacuggacccugguggagcccggcgacaagaucaccuucgaggccaccggcaaccugguggugcccagauacgccuucgccauggagagagacgccggcagcggcaucaucaucagcgacacccccgugcacgacugcaacaccaccugccagacccccaagggcgccaucaacaccagccugcccuuccagaacauccaccccaucaccaucggcaagugccccaaguacgugaagagcaccaagcugagacuggccaccggccugagaaacgugcccagcauccagagcagaggccuguucggcgccaucgccggcuucaucgagggcggcuggaccggcaugguggacggcugguacggcuaccaccaccagaacgagcagggcagcggcuacgccgccgaccugaagagcacccagaacgccaucgacaagaucaccaacaaggugaacagcgugaucgagaagaugaacacccaguucaccgccgugggcaaggaguucaaccaccuggagaagagaaucgagaaccugaacaagaagguggacgacggcuuccuggacaucuggaccuacaacgccgagcugcugguggugcuggagaacgagagaacccuggaguaccacgacagcaacgugaagaaccuguacgagaaggugagaaaccagcugaagaacaacgccaaggagaucggcaacggcugcuucgaguucuaccacaaguucgacaacaccugcauggagagcgugaagaacggcaccuacgacuaccccaaguacagcgaggaggccaagcugaacagagagaagaucgacggcgugaagcuggagagcaccagaaucuaccagauccuggccaucuacagcaccguggccagcagccuggugcagguggugagccugggcgccaucagcuucuggaagugcuucaacggcagccugcagugcagaaucugcagcuga

SEQ ID NO: 172536 - RNA, 1701 nt, Artificial Sequence
  derived and/or modified CDS sequence (opt4) from hemagglutinin__InfluenzaA__AID70458
augaagaccaucaucgcccugagcuacauccugugccugguguucgcccagaaguuccccggcaacgacaacagcauggccacccugugccugggccaccacgccgugcccaacggcaccauggugaagaccaucaccaacgaccagaucgaggugaccaacgccaccgagcuggugcagagcagcagcaccggcggcaucugcaacagcccccaccagauccuggacggcggcaacugcacccugaucgacgcccugcugggcgacccccagugcgacggcuuccagaacaagaagugggaccuguucguggagagaagcaaggccuacagcaacugcuaccccuacgacgugcccgacuacgccagccugagaagcaucguggccagcagcggcacccuggaguucaacaacgagagcuucaacuggaccggcgugacccagaacggcaagagcgccagcugcaagagaggcagcgacaacagcuucuucagcagacugaacuggcugacccaccugaacuacaaguaccccgcccugaaggugaccaugcccaacaacgagaaguucgacaagcuguacaucuggggcgugcaccaccccggcaccuacaacgaccagaucagccuguacgcccaggccagcggcaucaucaccgugagcaccaagagaaaccagcagaccgugauccccaacaucggcagcagacccagagugagagacauccccagcagaaucagcaucuacuggaccaucgugaagcccggcgacauccugcugaucaacagcaccggcaaccugaucgcccccagaggcuacuucaagauccagagcggcaagagcagcaucaugagaagcgacgcccccaucggcaagugcaacagcgagugcaucacccccaacggcagcauccccaacgacaagcccuuccagaacgugaacagaaucaccuacggcgccugccccagauacgugaagcagaacacccugaagcuggccaccggcaugagaaacgugcccgagaagcagaccagaggcaucuucggcgccaucgccggcuucaucgagaacggcugggagggcaugguggacggcugguacggcuucagacaccagaacagcgagggcaugggccaggccgccgaccugaagagcacccaggccgccaucaaccagaucaacggcaagcugaacagacugaucggcaagaccaucgagaaguuccaccagaucgagaaggaguucagcgagguggagggcagaauccaggaccuggagaaguacguggaggacaccaagaucgaccuguggagcuacaacgccgagcugcugguggcccuggagaaccagcacaccaucgaccugaccgacagcgagauggacaagcuguucgagagaaccaagaagcagaugagagagaacgccgaggacaugggcaacggcugcuucaagaucuaccacaagugcgacaacgccugcaucggcagcaucagaaacggcaucuacgacagagacaucuacagagacgaggcccugagcaacagauuccagaucaagggcguggagcugaaggccggcuacaaggacuggauccuguggaucagcuucgccaucagcugcuuccugcugugcguggugcugcugggcuucaucaugugggccugccagaagggcaaccugagaugcaacaucugcaucuga

SEQ ID NO: 172537 - RNA, 1701 nt, Artificial Sequence
  derived and/or modified CDS sequence (opt4) from hemagglutinin__InfluenzaA__AID70459
augaagaccaucaucgcccugagcuacauccugugccugguguucgcccagaaggugcccggcaacgacaacagcaccgccacccugugccugggccaccacgccgugcccaacggcaccaucgugaagaccaucaccaacgaccagaucgaggugaccaacgccaccgagcuggugcagagcagcagcaccggcgagaucugcaacagcccccaccagauccuggacggcgagaacugcacccugaucgacgcccugcugggcgacccccagugcgacggcuuccagaacaagaagugggaccuguucguggagagaagcaaggcccacagcaacugcuaccccuacgacgugcccgacuacgccagccugagaagccugguggccagcagcggcacccuggaguucaacaacgagagcuucaacuggaccggcgugacccagaacggcaccagcagcgccugcaucagaagaagcaacaacagcuucuucagcagacugaacuggcugacccaccugaacuucaaguaccccgcccugaacgugaccaugcccaacaacgagcaguucgacaagcuguacaucuggggcgugcaccaccccggcaccgacaaggaccagaucuuccuguacgcccaggccagcggcagaaucaccgugagcaccaagaagagccagcaggccgugauccccaacaucggcagcagacccagagugagaaacauccccagcagagugagcaucuacuggaccaucgugaagcccggcgacauccugcugaucaacagcaccggcaaccugaucgcccccagaggcuacuucaagaucagaagcggcaagagcagcaucaugagaagcgacgcccccaucggcaagugcaacagcgccugcaucacccccaacggcagcauccccaacgacaagcccuuccagaacgugaacagaaucaccuacggcgccugccccagauacgugaagcagaacacccugaagcuggcccccggcaugagaaacgugcccgagaagcagaccagaggcaucuucggcgccaucgccggcuucaucgagaacggcugggagggcaugguggacggcugguacggcuucagacaccagaacagcgagggcagaggccaggccgccgaccugaagagcacccaggccgccaucgaccagaucaacggcaagcugaacagacugaucggcaagaccaucgagaaguuccaccagaucgagaacgaguucagcgagguggagggcagaauccaggaccuggagaaguacguggaggacaccaagaucgaccuguggagcuacaucgccgagcugcugguggcccuggagaaccagcacaccaucgaccugaccgacagcgagaugaacaagcuguucgagaagaccaagaagcagcugagagagaacgccgaggacaugggcaacggcugcuucaagaucuaccacaagugcgacaacgccugcaucggcagcaucagaaacggcaucuacgaccacgacguguacagagacgaggcccugaacaacagauuccagaucaagggcguggagcugaagagcggcuacaaggacuggauccuguggaucagcuucgccaucagcugcuuccugcugugcguggcccugcugggcuucaucaugugggccugccagaagggcaacaucagaugcaacaucugcaucuga

SEQ ID NO: 172538 - RNA, 1701 nt, Artificial Sequence
  derived and/or modified CDS sequence (opt4) from hemagglutinin__InfluenzaA__AID70460
augaagaccaucaucgcccugagcuacauccugugccugguguucgcccagaagcugcccggcaacgacaacagcaccgccacccugugccugggccaccacgccgugcccaacggcaccaucgugaagaccaucaccaacgaccagaucgaggugaccaacgccaccgagcuggugcagagcagcagcaccggcgagaucugcaacagcccccaccagauccuggacggcgagaacugcacccugaucgacgcccugcugggcgacccccagugcgacggcuuccagaacaagaagugggaccuguucguggagagaagcaaggcccacagcaacugcuaccccuacgacgugcccgacuacgccagccugagaagccugguggccagcagcggcacccuggaguucaacaacgagagcuucaacuggaccggcgugacccagaacggcaccagcagcgccugcaucagaagaagcaacaacagcuucuucagcagacugaacuggcugacccaccugaacuucaaguaccccgcccugaacgugaccaugcccaacaacgagcaguucgacaagcuguacaucuggggcgugcaccaccccggcaccgacaaggaccagaucuuccuguacgcccaggccagcggcagaaucaccgugagcaccaagaagagccagcaggccgugauccccaacaucggcagcagacccagagugagaaacauccccagcagagugagcaucuacuggaccaucgugaagcccggcgacauccugcugaucaacagcaccggcaaccugaucgcccccagaggcuacuucaagaucagaagcggcaagagcagcaucaugagaagcgacgcccccaucggcaagugcaacagcgccugcaucacccccaacggcagcauccccaacgacaagcccuuccagaacgugaacagaaucaccuacggcgccugccccagauacgugaagcagaacacccugaagcuggccaccggcaugagaaacgugcccgagaagcagaccagaggcaucuucggcgccaucgccggcuucaucgagaacggcugggagggcaugguggacggcugguacggcuucagacaccagaacagcgagggcagaggccaggccgccgaccugaagagcacccaggccgccaucgaccagaucaacggcaagcugaacagacugaucggcaagaccaucgagaaguuccaccagaucgagaaggaguucagcgagguggagggcagaauccaggaccuggagaaguacguggaggacaccaagaucgaccuguggagcuacaacgccgagcugcugguggcccuggagaaccagcacaccaucgaccugaccgacagcgagaugaacaagcuguucgagaagaccaagaagcagcugagagagaacgccgaggacaugggcaacggcugcuucaagaucuaccacaagugcgacaacgccugcaucggcagcaucagaaacggcaucuacgaccacgacguguacagagacgaggcccugaacaacagauuccagaucaagggcguggagcugaagagcggcuacaaggacuggauccuguggaucagcuucgccaucagcugcuuccugcugugcguggcccugcugggcuucaucaugugggccugccagaagggcaacaucagaugcaacaucugcaucuga

SEQ ID NO: 172539 - RNA, 1701 nt, Artificial Sequence
  derived and/or modified CDS sequence (opt4) from hemagglutinin__InfluenzaA__AID70461
augaagaccaucaucgcccugagcuacauccugugccugguguucgcccagaagcugcccggcaacgacaacagcaccgccacccugugccugggccaccacgccgugcccaacggcaccaucgugaagaccaucaccaacgaccagaucgaggugaccaacgccaccgagcuggugcagagcagcagcaccggcgagaucugcaacagcccccaccagauccuggacggcgagaacugcacccugaucgacgcccugcugggcgacccccagugcgacggcuuccagaacaagaagugggaccuguucguggagagaagcaaggcccacagcaacugcuaccccuacgacgugcccgacuacgccagccugagaagccugguggccagcagcggcacccuggaguucaacaacgagagcuucaacuggaccggcgugacccagaacggcaccagcagcgccugcaucagaagaagcaacaacagcuucuucagcagacugaacuggcugacccaccugaacuucaaguaccccgcccugaacgugaccaugcccaacaacgagcaguucgacaagcuguacaucuggggcgugcaccaccccggcaccgacaaggaccagaucuuccuguacgcccaggccagcggcagaaucaccgugagcaccaagaagagccagcaggccgugauccccaacaucggcagcagacccagagugagaaacauccccagcagagugagcaucuacuggaccaucgugaagcccggcgacauccugcugaucaacagcaccggcaaccugaucgcccccagaggcuacuucaagaucagaagcggcaagagcagcaucaugagaagcgacgcccccaucggcaagugcaacagcgagugcaucacccccaacggcagcauccccaacgacaagcccuuccagaacgugaacagaaucaccuacggcgccugccccagauacgugaagcagaacacccugaagcuggccaccggcaugagaaacgugcccgagaagcagaccagaggcaucuucggcgccaucgccggcuucaucgagaacggcugggagggcaugguggacggcugguacggcuucagacaccagaacagcgagggcagaggccaggccgccgaccugaagagcacccaggccgccaucgaccagaucaacggcaagcugaacagacugaucggcaagaccaucgagaaguuccaccagaucgagaaggaguucagcgagguggagggcagaauccaggaccuggagaaguacaucgaggacaccaagaucgaccuguggagcuacaacgccgagcugcugguggcccuggagaaccagcacaccaucgaccugaccgacagcgagaugaacaagcuguucgagaagaccaagaagcagcugagagagaacgccgaggacaugggcaacggcugcuucaagaucuaccacaagugcgacaacgccugcaucggcagcaucagaaacggcaucuacgaccacgacguguacagagacgaggcccugaacaacagauuccagaucaagggcguggagcugaagagcggcuacaaggacuggauccuguggaucagcuucgccaucagcugcuuccugcugugcguggcccugcugggcuucaucaugugggccugccagaagggcaacaucagaugcaucaccugcaucuga

SEQ ID NO: 172540 - RNA, 1701 nt, Artificial Sequence
  derived and/or modified CDS sequence (opt4) from hemagglutinin__InfluenzaA__AID70463
augaagaccaucaucgcccugagcuacauccugugccugguguucgcccagaagauccccggcaacgacaacagcaccgccacccugugccugggccaccacgccgugcccaacggcaccaucgugaagaccaucaccaacgaccagaucgaggugaccaacgccaccgagcuggugcagagcagcagcaccggcgagaucugcaacagcccccaccagauccuggacggcgagaacugcacccugaucgacgcccugcugggcgacccccagugcgacggcuuccagaacaagaagugggaccuguucguggagagaagcaaggcccacagcaacugcuaccccuacgacgugcccgacuacgccagccugagaagccugguggccagcagcggcacccuggaguucaacaacgagagcuucaacuggaccggcgugacccagaacggcaccagcagcgccugcaucagaagaagcaacaacagcuucuucagcagacugaacuggcugacccaccugaacuucaaguaccccgcccugaacgugaccaugcccaacaacgagcaguucgacaagcuguacaucuggggcgugcaccaccccggcaccgacaaggaccagaucuuccuguacgcccaggccagcggcagaaucaccgugagcaccaagaagagccagcaggccgugauccccaacaucggcagcagacccagagugagaaacauccccagcagagugagcaucuacuggaccaucgugaagcccggcgacauccugcugaucaacagcaccggcaaccugaucgcccccagaggcuacuucaagaucagaagcggcaagagcagcaucaugagaagcgacgcccccaucggcaagugcaacagcgccugcaucacccccaacggcagcauccccaacgacaagcccuuccagaacgugaacagaaucaccuacggcgccugccccagauacgugaagcagaacacccugaagcuggccaccggcaugagaaacgugcccgagaagcagaccagaggcaucuucggcgccaucgccggcuucaucgagaacggcugggagggcaugguggacggcugguacggcuucagacaccagaacagcgagggcagaggccaggccgccgaccugaagagcacccaggccgccaucgaccagaucaacggcaagcugaacagacugaucggcaagaccaucgagaaguuccaccagaucgagaaggaguucagcgagguggagggcagaauccaggaccuggagaaguacguggaggacaccaagaucgaccuguggagcuacaacgccgagcugcugguggcccuggagaaccagcacaccaucgaccugaccgacagcgagaugaacaagcuguucgagaagaccaagaagcagcugagagagaacgccgaggacaugggcaacggcugcuucaagaucuaccacaagugcgacaacgccugcaucggcagcaucagaaacggcaucuacgaccacgacguguacagagacgaggcccugaacaacagauuccagaucaagggcguggagcugaagagcggcuacaaggacuggauccuguggaucagcuucgccaucagcugcuuccugcugugcguggcccugcugggcuucaucaugugggccugccagaagggcaacaucagaugcaacaucugcaucuga

SEQ ID NO: 172541 - RNA, 1701 nt, Artificial Sequence
  derived and/or modified CDS sequence (opt4) from hemagglutinin__InfluenzaA__AID70464
augaagaccaucaucgcccugagcuacauccugugccugguguucgcccagaagcugcccggcgacgacaacagcaccgccacccugugccugggccaccacgccgugcccaacggcaccaucgugaagaccaucaccaacgaccagaucgaggugaccaacgccaccgagcuggugcagagcagcagcaccggcgagaucugcaacagcccccaccagauccuggacggcgagaacugcacccugaucgacgcccugcugggcgacccccagugcgacggcuuccagaacaagaagugggaccuguucguggagagaagcaaggcccacagcaacugcuaccccuacgacgugcccgacuacgccagccugagaagccugguggccagcagcggcacccuggaguucaacaacgagagcuucaacuggaccggcgugacccagaacggcaccagcagcgccugcaucagaagaagcaacaacagcuucuucagcagacugaacuggcugacccaccugaacuucaaguaccccgcccugaacgugaccaugcccaacaacgagcaguucgacaagcuguacaucuggggcgugcaccaccccggcaccgacaaggaccagaucuuccuguacgcccaggccagcggcagaaucaccgugagcaccaagaagagccagcaggccgugauccccaacaucggcagcagacccagagugagaaacauccccagcagagugagcaucuacuggaccaucgugaagcccggcgacauccugcugaucaacagcaccggcaaccugaucgcccccagaggcuacuucaagaucagaagcggcaagagcagcaucaugagaagcgacgcccccaucggcaagugcaacagcgccugcaucacccccaacggcagcauccccaacgacaagcccuuccagaacgugaacagaaucaccuacggcgccugccccagauacgugaagcagaacacccugaagcuggccaccggcaugagaaacgugcccgagaagcagaccagaggcaucuucggcgccaucgccggcuucaucgagaacggcugggagggcaugguggacggcugguacggcuucagacaccagaacagcgagggcagaggccaggccgccgaccugaagagcacccaggccgccaucgaccagaucaacggcaagcugaacagacugaucggcaagaccaucgagaaguuccaccagaucgagaaggaguucagcgagguggagggcagaauccaggaccuggagaaguacguggaggacaccaagaucgaccuguggagcuacaacgccgagcugcugguggcccuggagaaccagcacaccaucgaccugaccgacagcgagaugaacaagcuguucgagaagaccaagaagcagcugagagagaacgccgaggacaugggcaacggcugcuucaagaucuaccacaagugcgacaacgccugcaucggcagcaucagaaacggcaccuacgaccacgacguguacagagacgaggcccugaacaacagauuccagaucaagggcguggagcugaagagcggcuacaaggacuggauccuguggaucagcuucgccaucagcugcuuccugcugugcguggcccugcugggcuucaucaugugggccugccagaagggcaacaucagaugcaacaucugcaucuga

SEQ ID NO: 172542 - RNA, 1701 nt, Artificial Sequence
  derived and/or modified CDS sequence (opt4) from hemagglutinin__InfluenzaA__AID70465
augaagaccaucaucgcccugagcuacauccugugccugguguucgcccagaagcugcccggcgacgacaacagcaccgccacccugugccugggccaccacgccgugcccaacggcaccaucgugaagaccaucaccaacgaccagaucgaggugaccaacgccaccgagcuggugcagagcagcagcaccggcgagaucugcaacagcccccaccagauccuggacggcgagaacugcacccugaucgacgcccugcugggcgacccccagugcgacggcuuccagaacaagaagugggaccuguucguggagagaagcaaggcccacagcaacugcuaccccuacgacgugcccgacuacgccagccugagaagccugguggccagcagcggcacccuggaguucaacaacgagagcuucaacuggaccggcgugacccagaacggcaccagcagcgccugcaucagaagaagcaacaacagcuucuucagcagacugaacuggcugacccaccugaacuucaaguaccccgcccugaacgugaccaugcccaacaacgagcaguucgacaagcuguacaucuggggcgugcaccaccccggcaccgacaaggaccagaucuuccuguacgcccaggccagcggcagaaucaccgugagcaccaagaagagccagcaggccgugauccccaacaucggcagcagacccagagugagaaacauccccagcagagugagcaucuacuggaccaucgugaagcccggcgacauccugcugaucaacagcaccggcaaccugaucgcccccagaggcuacuucaagaucagaagcggcaagagcagcaucaugagaagcgacgcccccaucggcaagugcaacagcgccugcaucacccccaacggcagcauccccaacgacaagcccuuccagaacgugaacagaaucaccuacggcgccugccccagauacgugaagcagaacacccugaagcuggccaccggcaugagaaacgugcccgagaagcagaccagaggcaucuucggcgccaucgccggcuucaucgagaacggcugggagggcaugguggacggcugguacggcuucagacaccagaacagcgagggcagaggccaggccgccgaccugaagagcacccaggccgccaucgaccagaucaacggcaagcugaacagacugaucggcaagaccaucgagaaguuccaccagaucgagaaggaguucagcgagguggagggcagaauccaggaccuggagaaguacguggaggacaccaagaucgaccuguggagcuacaacgccgagcugcugguggcccuggagaaccaccacgccaucgaccugaccgacagcgagaugaacaagcuguucgagaagaccaagaagcagaugagagagaacgccgaggacaugggcaacggcugcuucaagaucuaccugaagugcgacaacgccugcaucggcagcaucagaaacggcaucuacgaccacgacguguacagagacgaggcccugaacaacagauuccagaucaagggcguggagcugaagagcggcuacaaggacuggauccuguggaucagcuucaccgagagcugcuuccugcugugcguggcccugcugggcuucaucaugugggccugccagaagggcaacaucagaugcaacaucugcaucuga

SEQ ID NO: 172543 - RNA, 1701 nt, Artificial Sequence
  derived and/or modified CDS sequence (opt4) from hemagglutinin__InfluenzaA__AID70466
augaagaccaucaucgcccugagcuacauccugugccugguguucgcccagaagcugcccggcaacgacaacagcaccgccacccugugccugggccaccacgccgugcccaacggcaccaucgugaagaccaucaccaacgaccagaucgaggugaccaacgccaccgagcuggugcagagcagcagcaccggcgagaucugcaacagcccccaccagauccuggacggcgagaacugcacccugaucgacgcccugcugggcgacccccagugcgacggcuuccagaacaagaagugggaccuguucguggagagaagcaaggcccacagcaacugcuaccccuacgacgugcccgacuacgccagccugagaagccugguggccagcagcggcacccuggaguucaacaacgagagcuucaacuggaccggcgugacccagaacggcaccagcagcgccugcaucagaagaagcaacaacagcuucuucagcagacugaacuggcugacccaccugaacuucaaguaccccgcccugaacgugaccaugcccaacaacgagcaguucgacaagcuguacaucuggggcgugcaccaccccggcaccgacaaggaccagaucuuccuguacgcccaggccagcggcagaaucaccgugagcaccaagaagagccagcaggccgugauccccaacaucggcagcagacccagagugagaaacauccccagcagagugagcaucuacuggaccaucgugaagcccggcgacauccugcugaucaacagcaccggcaaccugaucgcccccagaggcuacuucaagaucagaagcggcaagagcagcaucaugagaagcgacgcccccaucggcaagugcaacagcgccugcaucacccccaacggcagcauccccaacgacaagcccuuccagaacgugaacagaaucaccuacggcgccugccccagauacgugaagcagaacacccugaagcuggccaccggcaugagaaacgugcccgagaagcagaccagaggcaucuucggcgccaucgccggcuucaucgagaacggcugggagggcaugguggacggcugguacggcuucagacaccagaacagcgagggcagaggccaggccgccgaccugaagagcacccaggccgccaucgaccagaucaacggcaagcugaacagacugaucggcaagaccaucgagaaguuccaccagaucgagaacgaguucagcgagguggagggcagaauccaggaccuggagaaguacguggaggacaccaagaucgaccuguggagcuacaucggcgagcugcugguggcccuggagaaccagcacaccaucgaccugaccgacagcgagaugaacaagcuguucgagaagaccaagaagcagcugagagagaacgccgaggacaugggcaacggcugcuucaagaucuaccacaagugcgacaacgccugcaucggcagcaucagaaacggcaucuacgaccacgacguguacagagacgaggcccugaacaacagauuccagaucaagggcguggagcugaagagcggcuacaaggacuggauccuguggaucagcuucgccaucagcugcuuccugcugugcguggcccugcugggcuucaucaugugggccugccagaagggcaacaucagaugcaacaucugcaucuga

SEQ ID NO: 172544 - RNA, 1701 nt, Artificial Sequence
  derived and/or modified CDS sequence (opt4) from hemagglutinin__InfluenzaA__AID70467
augaagaccaucaucgcccugagcuacauccugugccugguguucgcccagaagcugcccggcaacgacaacagcaccgccacccugugccugggccaccacgccgugcccaacggcaccaucgugaagaccaucaccaacgaccagaucgaggugaccaacgccaccgagcuggugcagagcagcagcaccggcgagaucugcaacagcccccaccagauccuggacggcgagaacugcacccugaucgacgcccugcugggcgacccccagugcgacggcuuccagaacaagaagugggaccuguucguggagagaagcaaggcccacagcaacugcuaccccuacgacgugcccgacuacgccagccugagaagccugguggccagcagcggcacccuggaguucaacaacgagagcuucaacuggaccggcgugacccagaacggcaccagcagcgccugcaucagaagaagcaacaacagcuucuucagcagacugaacuggcugacccaccugaacuucaaguaccccgcccugaacgugaccaugcccaacaacgagcaguucgacaagcuguacaucuggggcgugcaccaccccggcaccgacaaggaccagaucuuccuguacgcccaggccagcggcagaaucaccgugagcaccaagaagagccagcaggccgugauccccaacaucggcagcagacccagagugagaaacauccccagcagagugagcaucuacuggaccaucgugaagcccggcgacauccugcugaucaacagcaccggcaaccugaucgcccccagaggcuacuucaagaucagaagcggcaagagcagcaucaugagaagcgacgcccccaucggcaagugcaacagcgccugcaucacccccaacggcagcauccccaacgacaagcccuuccagaacgugaacagaaucaccuacggcgccugccccagauacgugaagcagaacacccugaagcuggccaccggcaugagaaacgugcccgagaagcagaccagaggcaucuucggcgccaucgccggcuucaucgagaacggcugggagggcaugguggacggcugguacggcuucagacaccagaacugcgagggcagaggccaggccgccgaccugaagagcacccaggccgccaucgaccagaucaacggcaagcugaacagacugaucggcaagaccaucgagaaguuccaccagaucgagaacgaguucagcgagguggagggcagaauccagggccuggagaaguacguggaggacaccaagaucgaccuguggagcuacaucgccgagcugaucguggcccuggagaaccagcacaccaucgaccugaccgacagcgagaugaacaagcuguucgagaagaccaagaagcagaugagagagaacgccgaggacaugggcaacggcugcuucaagaucuaccacaagugcgacaacgccugcaucggcagcaucagaaacggcaucuacgaccacgacguguacagagacgaggcccugaacaacagauuccagaucaagggcguggagcugaagagcggcuacaaggacuggauccuguggaucagcuucgccaucagcugcuuccugcugugcguggcccugcugggcuucaucaugugggccugccagaagggcaacaucagaugcaacaucugcaucuga

SEQ ID NO: 172545 - RNA, 1701 nt, Artificial Sequence
  derived and/or modified CDS sequence (opt4) from hemagglutinin__InfluenzaA__AID70468
augaagaccaucaucgcccugagcuacauccugugccugguguucgcccagaagcugcccggcaacgacaacagcaccgccacccugugccugggccaccacgccgugcccaacggcaccaucgugaagaccaucaccaacgaccagaucgaggugaccaacgccaccgagcuggugcagagcagcagcaccggcgagaucugcaacagcccccaccagauccuggacggcgagaacugcacccugaucgacgcccugcugggcgacccccagugcgacggcuuccagaacaagaagugggaccuguucguggagagaagcaaggcccacagcaacugcuaccccuacgacgugcccgacuacgccagccugagaagccugguggccagcagcggcacccuggaguucaacaacgagagcuucaacuggaccggcgugacccagaacggcaccagcagcgccugcaucagaagaagcaacaacagcuucuucagcagacugaacuggcugacccaccugaacuucaaguaccccgcccugaacgugaccaugcccaacaacgagcaguucgacaagcuguacaucuggggcgugcaccaccccggcaccgacaaggaccagaucuuccuguacgcccaggccagcggcagaaucaccgugagcaccaagagaagccagcaggccgugauccccaacaucggcagcagacccagagugagaaacauccccagcagagugagcaucuacuggaccaucgugaagcccggcgacauccugcugaucaacagcaccggcaaccugaucgcccccagaggcuacuucaagaucagaagcggcaagagcagcaucaugagaagcgacgcccccaucggcaagugcaacagcgccugcaucacccccaacggcagcauccccaacgacaagcccuuccagaacgugaacagaaucaccuacggcgccugccccagauacgugaagcagaacacccugaagcuggccaccggcaugagaaacgugcccgagaagcagaccagaggcaucuucggcgccaucgccggcuucaucgagaacggcugggagggcaugguggacggcugguacggcuucagacaccagaacugcgagggcagaggccaggccgccgaccugaagagcacccaggccgccaucgaccagaucaacggcaagcugaacagacugaugggcaagagcaucgagaaguuccaccagaucgagaacgaguucagcgagguggagggcagaauccagggccuggagaaguacguggaggacaccaagaucgaccuguggagcuacaacggcgagcugaucguggcccuggagaaccagcacgccaucgaccugaccgacagcgagaugaacaagcuguucgagaagaccaagaagcagaugagagagaacgccgaggacaugggcaacggcugcuucaagaucuaccugaagugcgacaacgccugcaucggcagcaucagaaacggcaucuacgaccacgacguguacagagacgaggcccugaacaacagauuccagaucaagggcguggagcugaagagcggcuacaaggacuggauccuguggaucagcuucaccaucagcugcuuccugcugugcguggcccugcugggcuucaucaugugggccagacagaagggcaacaucagaugcaacaucugcaucuga

SEQ ID NO: 172546 - RNA, 1701 nt, Artificial Sequence
  derived and/or modified CDS sequence (opt4) from hemagglutinin__InfluenzaA__AID70469
augaagaccaucaucgcccugagcuacauccugugccugguguucgcccagaaggugcccggcaacgagaacagcaccgccacccugugccugggccaccacgccgugcccaacggcaccaucgugaagaccaucaccaacgaccagaucgaggugaccaacgccaccgagcuggugcagagcagcagcaccggcgagaucugcaacagcccccaccagauccuggacggcgagaacugcacccugaucgacgcccugcugggcgacccccagugcgacggcuuccagaacaagaagugggaccuguucguggagagaagcaaggcccacagcaacugcuaccccuacgacgugcccgacuacgccagccugagaagccugguggccagcagcggcacccuggaguucaacaacgagagcuucaacuggaccggcgugacccagaacggcaccagcagcgccugcaucagaagaagcaacaacagcuucuucagcagacugaacuggcugacccaccugaacuucaaguaccccgcccugaacgugaccaugcccaacaacgagcaguucgacaagcuguacaucuggggcgugcaccaccccggcaccgacaaggaccagaucuuccuguacgcccaggccagcggcagaaucaccgugagcaccaagagaagccagcaggccgugauccccaacaucggcagcagacccagagugagaaacauccccagcagagugagcaucuacuggaccaucgugaagcccggcgacauccugcugaucaacagcaccggcaaccugaucgcccccagaggcuacuucaagaucagaagcggcaagagcagcaucaugagaagcgacgcccccaucggcaagugcaacagcgccugcaucacccccaacggcagcauccccaacgacaagcccuuccagaacgugaacagaaucaccuacggcgccugccccagauacgugaagcagaacacccugaagcuggccaccggcaugagaaacgugcccgagaagcagaccagaggcaucuucggcgccaucgccggcuucaucgagaacggcugggagggcaugguggacggcugguacggcuucagacaccagaacugcgagggcagaggccaggccgccgaccugaagagcacccaggccgccaucgaccagaucaacggcaagcugaacagacugaucggcaagaccaucgagaaguuccaccagaucgagaaggaguucagcgagguggagggcagaauccagggccuggagaaguacguggaggacaccaagaucgaccuguggagcuacaacgccgagcugcugguggcccuggagaaccagcacaccaucgaccugaccgacagcgagaugaacaagcuguucgagaagaccaagaagcagaugagagagaacgccgaggacaugggcaacggcugcuucaagaucuaccacaagugcgacaacgccugcaucggcagcaucagaaacggcaucuacgaccacgacguguacagagacgaggcccugaacaacagauuccagaucaagggcguggagcugaagagcggcuacaaggacuggauccuguggaucagcuucaccaucagcugcuuccugcugugcguggcccugcugggcuucaucaugugggccugccagaagggcaacaucagaugcaacaucugcaucuga

SEQ ID NO: 172547 - RNA, 1701 nt, Artificial Sequence
  derived and/or modified CDS sequence (opt4) from hemagglutinin__InfluenzaA__AID70470
augaagaccaucaucgcccugagcuacauccugugccugguguucgcccagaaggugcccggcaacgagaacagcaccgccacccugugccugggccaccacgccgugcccaacggcaccaucgugaagaccaucaccaacgaccagaucgaggugaccaacgccaccgagcuggugcagagcagcagcaccggcgagaucugcaacagcccccaccagauccuggacggcgagaacugcacccugaucgacgcccugcugggcgacccccagugcgacggcuuccagaacaagaagugggaccuguucguggagagaagcaaggcccacagcaacugcuaccccuacgacgugcccgacuacgccagccugagaagccugguggccagcagcggcacccuggaguucaacaacgagagcuucaacuggaccggcgugacccagaacggcaccagcagcgccugcaucagaagaagcaacaacagcuucuucagcagacugaacuggcugacccaccugaacuucaaguaccccgcccugaacgugaccaugcccaacaacgagcaguucgacaagcuguacaucuggggcgugcaccaccccggcaccgacaaggaccagaucuuccuguacgcccaggccagcggcagaaucaccgugagcaccaagagaagccagcaggccgugauccccaacaucggcagcagacccagagugagaaacauccccagcagagugagcaucuacuggaccaucgugaagcccggcgacauccugcugaucaacagcaccggcaaccugaucgcccccagaggcuacuucaagaucagaagcggcaagagcagcaucaugagaagcgacgcccccaucggcaagugcaacagcgccugcaucacccccaacggcagcauccccaacgacaagcccuuccagaacgugaacagaaucaccuacggcgccugccccagauacgugaagcagaacacccugaagcuggccaccggcaugagaaacgugcccgagaagcagaccagaggcaucuucggcgccaucgccggcuucaucgagaacggcugggagggcaugguggacggcugguacggcuucagacaccagaacugcgagggcagaggccaggccgccgaccugaagagcacccaggccgccaucgaccagaucaacggcaagcugaacagacugaucggcaagaccaucgagaaguuccaccagaucgagaaggaguucagcgagguggagggcagaauccagggccuggagaaguacguggaggacaccaagaucgaccuguggagcuacaacggcgagcugcugguggcccuggagaaccaccacaccaucgaccugaccgacagcgagaugaacaagcuguucgagaagaccaagaagcagaugagagagaacgccgaggacaugggcaacggcugcuucaagaucuaccacaagugcgacaacgccugcaucggcagcaucagaaacggcaucuacgaccacgacguguacagagacgaggcccugaacaacagauuccagaucaagggcguggagcugaagagcggcuacaaggacuggauccuguggaucagcuucaccaucagcugcuuccugcugugcguggcccugcugggcuucaucaugugggccugccagaagggcaacaucagaugcaacaucugcaucuga

SEQ ID NO: 172548 - RNA, 1701 nt, Artificial Sequence
  derived and/or modified CDS sequence (opt4) from hemagglutinin__InfluenzaA__AID70471
augaagaccaucaucgcccugagcuacauccugugccugguguucacccagaagcugcccggcaacgacaacagcaccgccacccugugccugggccaccacgccgugcccaacggcaccaucgugaagaccaucaccaacgaccagaucgaggugaccaacgccaccgagcuggugcagagcagcagcaccggcgagaucugcaacagcccccaccagauccuggacggcgagaacugcacccugaucgacgcccugcugggcgacccccagugcgacggcuuccagaacaagaagugggaccuguucguggagagaagcaaggcccacagcaacugcuaccccuacgacgugcccgacuacgccagccugagaagccugguggccagcagcggcacccuggaguucaacaacgagagcuucaacuggaccggcgugacccagaacggcaccagcagcgccugcaucagaagaagcaacaacagcuucuucagcagacugaacuggcugacccaccugaacuucaaguaccccgcccugaacgugaccaugcccaacaacgagcaguucgacaagcuguacaucuggggcgugcaccaccccggcaccgacaaggaccagaucuuccuguacgcccaggccagcggcagaaucaccgugagcaccaagaagagccagcaggccgugauccccaacaucggcagcagacccagagugagaaacauccccagcagagugagcaucuacuggaccaucgugaagcccggcgacauccugcugaucaacagcaccggcaaccugaucgcccccagaggcuacuucaagaucagaagcggcaagagcagcaucaugagaagcgacgcccccaucggcaagugcaacagcgccugcaucacccccaacggcagcauccccaacgacaagcccuuccagaacgugaacagaaucaccuacggcgccugccccagauacgugaagcagaacacccugaagcuggccaccggcaugagaaacgugcccgagaagcagaccagaggcaucuucggcgccaucgccggcuucaucgagaacggcugggagggcaugguggacggcugguacggcuucagacaccagaacagcgagggcagaggccaggccgccgaccugaagagcacccaggccgccaucgaccagaucaacggcaagcugaacagacugaucggcaagaccaucgagaaguuccaccagaucgagaacgaguucagcgagguggagggcagaauccaggaccuggagaaguacguggaggacaccaagaucgaccuguggagcuacaacgccgagcugaucguggcccuggagaaccaccacaccaucgaccugaccgacagcgagaugaacaagcuguucgagaagaccaagaagcagaugagagagaacgccgaggacaugggcaacggcugcuucaagaucuaccacaagugcgacaacgccugcaucggcagcaucagaaacggcaucuacgaccacgacguguacagagacgaggcccugaacaacagauuccagaucaagggcguggagcugaagagcggcuacaaggacuggauccuguggaucagcuucgccaucagcugcuuccugaucugcguggcccugcugggcuucaucaugugggccugccagaagggcaaccugagaugcaacaucugcaucuga

SEQ ID NO: 172549 - RNA, 1701 nt, Artificial Sequence
  derived and/or modified CDS sequence (opt4) from hemagglutinin__InfluenzaA__AID70472
augaagaccaucaucgcccugagcuacauccugugccugguguucgcccagaagcugcccggcaacgacaacagcaccgccacccugugccugggccaccacgccgugcccaacggcaccaucgugaagaccaucaccaacgaccagaucgaggugaccaacgccaccgagcuggugcagagcagcagcaccggcgagaucugcaacagcccccaccagauccuggacggcgagaacugcacccugaucgacgcccugcugggcgacccccagugcgacggcuuccagaacaagaagugggaccuguucguggagagaagcaaggcccacagcaacugcuaccccuacgacgugcccgacuacgccagccugagaagccugguggccagcagcggcacccuggaguucaacaacgagagcuucaacuggaccggcgugacccagaacggcaccagcagcgccugcaucagaagaagcaacaacagcuucuucagcagacugaacuggcugacccaccugaacuucaaguaccccgcccugaacgugaccaugcccaacaacgagcaguucgacaagcuguacaucuggggcgugcaccaccccggcaccgacaaggaccagaucuuccuguacgcccaggccagcggcagaaucaccgugagcaccaagaagagccagcaggccgugauccccaacaucggcagcagacccagagugagaaacauccccagcagagugagcaucuacuggaccaucgugaagcccggcgacauccugcugaucaacagcaccggcaaccugaucgcccccagaggcuacuucaagaucagaagcggcaagagcagcaucaugagaagcgacgcccccaucggcaagugcaacagcgccugcaucacccccaacggcagcauccccaacgacaagcccuuccagaacgugaacagaaucaccuacggcgccugccccagauacgugaagcagaacacccugaagcuggccaccggcaugagaaacgugcccgagaagcagaccagaggcaucuucggcgccaucgccggcuucaucgagaacggcugggagggcaugguggacggcugguacggcuucagacaccagaacagcgagggcagaggccaggccgccgaccugaagagcacccaggccgccaucgaccagaucaacggcaagcugaacagacugaucggcaagaccaucgagaaguuccaccagaucgagaaggaguucagcgagguggagggcagaauccaggaccuggagaaguacguggaggacaccaagaucgaccuguggagcuacaacgccgagcugcugguggcccuggagaaccaccacaccaucgaccugaccgacagcgagaugaacaagcuguucgagaagaccaagaagcagaugagagagaacgccgaggacaugggcaacggcugcuucaagaucuaccacaagugcgacaacgccugcaucggcagcaucagaaacggcaucuacgaccacgacguguacagagacgaggcccugaacaacagauuccagaucaagggcguggagcugaagagcggcuacaaggacuggauccuguggaucagcuucgccaucagcugcuuccugcugugcguggcccugcugggcuucaucaugugggccugccagaagggcaacaucagaugcaacaucugcaucuga

SEQ ID NO: 172550 - RNA, 1701 nt, Artificial Sequence
  derived and/or modified CDS sequence (opt4) from hemagglutinin__InfluenzaA__AID70473
augaagaccaucaucgcccugagcuacauccugugccugguguucgcccagaagcugcccggcaacgacaacagcaccgccacccugugccugggccaccacgccgugcccaacggcaccaucgugaagaccaucaccaacgaccagaucgaggugaccaacgccaccgagcuggugcagagcagcagcaccggcgagaucugcaacagcccccaccagauccuggacggcgagaacugcacccugaucgacgcccugcugggcgacccccagugcgacggcuuccagaacaagaagugggaccuguucguggagagaagcaaggcccacagcaacugcuaccccuacgacgugcccgacuacgccagccugagaagccugguggccagcagcggcacccuggaguucaacaacgagagcuucaacuggaccggcgugacccagaacggcaccagcagcgccugcaucagaagaagcaacaacagcuucuucagcagacugaacuggcugacccaccugaacuucaaguaccccgcccugaacgugaccaugcccaacaacgagcaguucgacaagcuguacaucuggggcgugcaccaccccggcaccgacaaggaccagaucuuccuguacgcccaggccagcggcagaaucaccgugagcaccaagaagagccagcaggccgugauccccaacaucggcagcagacccagagugagaaacauccccagcagagugagcaucuacuggaccaucgugaagcccggcgacauccugcugaucaacagcaccggcaaccugaucgcccccagaggcuacuucaagaucagaagcggcaagagcagcaucaugagaagcgacgcccccaucggcaagugcaacagcgccugcaucacccccaacggcagcauccccaacgacaagcccuuccagaacgugaacagaaucaccuacggcgccugccccagauacgugaagcagaacacccugaagcuggccaccggcaugagaaacgugcccgagaagcagaccagaggcaucuucggcgccaucgccggcuucaucgagaacggcugggagggcaugguggacggcugguacggcuucagacaccagaacugcgagggcagaggccaggccgccgaccugaagagcacccaggccgccaucgaccagaucaacggcaagcugaacagacugaucggcaagaccaucgagaaguuccaccagaucgagaaggaguucagcgagguggagggcagaauccagggccuggagaaguacguggaggacaccaagaucgaccuguggagcuacaacgccgagcugcugguggcccuggagaaccagcacaccaucgaccugaccgacagcgagaugaacaagcuguucgagaagaccaagaagcagaugagagagaacgccgaggacaugggcaacggcugcuucaagaucuaccacaagugcgacaacgccugcaucggcagcaucagaaacggcaucuacgaccacgacguguacagagacgaggcccugaacaacagauuccagaucaagggcguggagcugaagagcggcuacaaggacuggauccuguggaucagcuucgccaucagcugcuuccugcugugcguggcccugcugggcuucaucaugugggccugccagaagggcaacaucagaugcaacaucugcaucuga

SEQ ID NO: 172551 - RNA, 1701 nt, Artificial Sequence
  derived and/or modified CDS sequence (opt4) from hemagglutinin__InfluenzaA__AID70474
augaagaccaucaucgcccugagcuacauccugugccugguguucgcccagaagcugcccggcaacgacaacagcaccgccacccugugccugggccaccacgccgugcccaacggcaccaucgugaagaccaucaccaacgaccagaucgaggugaccaacgccaccgagcuggugcagagcagcagcaccggcgagaucugcaacagcccccaccagauccuggacggcgagaacugcacccugaucgacgcccugcugggcgacccccagugcgacggcuuccagaacaagaagugggaccuguucguggagagaagcaaggcccacagcaacugcuaccccuacgacgugcccgacuacgccagccugagaagccugguggccagcagcggcacccuggaguucaacaacgagagcuucaacuggaccggcgugacccagaacggcaccagcagcgccugcaucagaagaagcaacaacagcuucuucagcagacugaacuggcugacccaccugaacuucaaguaccccgcccugaacgugaccaugcccaacaacgagcaguucgacaagcuguacaucuggggcgugcaccaccccggcaccgacaaggaccagaucuuccuguacgcccaggccagcggcagaaucaccgugagcaccaagaagagccagcaggccgugauccccaacaucggcagcagacccagagugagaaacauccccagcagagugagcaucuacuggaccaucgugaagcccggcgacauccugcugaucaacagcaccggcaaccugaucgcccccagaggcuacuucaagaucagaagcggcaagagcagcaucaugagaagcgacgcccccaucggcaagugcaacagcgccugcaucacccccaacggcagcauccccaacgacaagcccuuccagaacgugaacagaaucaccuacggcgccugccccagauacgugaagcagaacacccugaagcuggccaccggcaugagaaacgugcccgagaagcagaccagaggcaucuucggcgccaucgccggcuucaucgagaacgugugggagggcaugguggacggcugguucggcuucagacaccagaucugcgagggcagaggccaggccgccggccuggagagcacccaggccgccaucgaccagaucaacggcaagaugaacagacugaugggcaagaccaucggcaaguuccaccagaucgugaacgaguucagcgagguggagggcagaauccaggaccuggagaaguacguggaggacaccaagaucgaccuguggagcuacaucggcgagcugcugguggcccuggagaaccaccacgccaucgaccugaccgacagcgagaugaacaagcuguucgagaagaccaagaagcagaugagagagaacgccgaggacaugggcaacggcugcuucaagaucuaccacaagugcgacaacgccugcaucggcagcaucagaaacggcaucuacgacagagacguguacagagacgaggcccugaacaacagauuccacaucaagggcguggagcugaagagcggcuacaaggacuggaucaucuggaucagcagcaccgagagcugcuuccugcugugcguggcccugcugggcuucaucaugugggccugccagaagggcaacaucagaagcaacaucugcaucuga

SEQ ID NO: 172552 - RNA, 1701 nt, Artificial Sequence
  derived and/or modified CDS sequence (opt4) from hemagglutinin__InfluenzaA__AID70475
augaagaccaucaucgcccugagcuacaugcugugccugguguucgcccagaagcugcccggcaacgacaacagcaccgccacccugugccugggccaccacgccgugcccaacggcaccaucgugaagaccaucaccaacgaccagaucgaggugaccaacgccaccgagcuggugcagagcagcagcaccggcgagaucugcaacagcccccaccagauccuggacggcgagaacugcacccugaucgacgcccugcugggcgacccccagugcgacggcuuccagaacaagaagugggaccuguucguggagagaagcaaggcccacagcaacugcuaccccuacgacgugcccgacuacgccagccugagaagccugguggccagcagcggcacccuggaguucaacaacgagagcuucaacuggaccggcgugacccagaacggcaccagcagcgccugcaucagaagaagcaacaacagcuucuucagcagacugaacuggcugacccaccugaacuucaaguaccccgcccugaacgugaccaugcccaacaacgagcaguucgacaagcuguacaucuggggcgugcaccaccccggcaccgacaaggaccagaucuuccuguacgcccaggccagcggcagaaucaccgugagcaccaagaagagccagcaggccgugauccccaacaucggcagcagacccagagugagaaacauccccagcagagugagcaucuacuggaccaucgugaagcccggcgacauccugcugaucaacagcaccggcaaccugaucgcccccagaggcuacuucaagaucagaagcggcaagagcagcaucaugagaagcgacgcccccaucggcaagugcaacagcgccugcaucacccccaacggcagcauccccaacgacaagcccuuccagaacgugaacagaaucaccuacggcgccugccccagauacgugaagcagaacacccugaagcuggccaccggcaugagaaacgugcccgagaagcagaccagaggcaucuucggcgccaucgccggcuucaucgagaacgugugggagggcaugguggacggcugguacggcuucagacaccagaacugcgagggcagaggccaggccgccgaccugaagagcgcccaggccgccaucgaccccaucaacggcaagcugaacagacugaugggcaagaccaucggcaaguuccaccagaucgagaaggaguucagcgagguggagggcagaauccaggaccuggagaaguacguggaggacaccaagaucgaccuguggagcuacaacggcgagcugcugguggcccuggagaaccagcacgccaucgaccugaccgacagcgagaugaacaagguguucgagaagaccaagaagcagcugagagagaacgccgaggacaugggcaacggcugcuucaagaucuaccacaagugcgacaacgccugcaucggcagcaucagaaacggcaucuacgaccacgacguguacagaaacgaggcccugaacaacagauuccagaucaagggcguggagcugaagagcggcuacaaggacuggauccuguggaucagcuucgccaucagcugcuuccugcugagcguggccagccugggcuucaucaugugggccuaccagaagggcaacaucagaugcaacaucugcaucuga

SEQ ID NO: 172553 - RNA, 1701 nt, Artificial Sequence
  derived and/or modified CDS sequence (opt4) from hemagglutinin__InfluenzaA__AID70476
augaagaccaucaucgcccugagcuacauccugugccugguguucgcccagaagcugcccggcaacgagaacagcaccgccacccugggccugggccaccacgccgugcccaacggcaccaucgugaagaccaucaccaacgaccagaucgaggugaccaacgccaccgagcuggugcagagcagcagcaccggcgagaucugcaacagcccccaccagauccuggacggcgagaacugcacccugaucgacgcccugcugggcgacccccagugcgacgacuuccagaacaagaagugggaccuguucguggagagaagcaaggcccacagcaacugcuaccccuacgacgugcccgacuacgccagccugagaagccugguggccagcagcggcacccuggaguucaacaacgagagcuucaacuggaccggcgugacccagaacggcaccagcagcgccugcaucagaagaagcaacaacagcuucuucagcagacugaacuggcugacccaccugaacuucaaguaccccgcccugaacgugaccaugcccaacaacgagcaguucgacaagcuguacaucuggggcgugcaccaccccggcaccgacaaggaccagaucuuccuguacgcccaggccagcggcagaaucaccgugagcaccaagaagagccagcaggccgugauccccaacaucggcagcagacccagagugagaaacauccccagcagagugagcaucuacuggaccaucgugaagcccggcgacauccugcugaucaacagcaccggcaaccugaucgcccccagaggcuacuucaagaucagaagcggcaagagcagcaucaugagaagcgacgcccccaucggcaagugcaacagcgccugcaucacccccaacggcagcauccccaacgacaagcccuuccagaacgugaacagaaucaccuacggcgccugccccagauacgugaagcagaacaaccugaagcuggccaccggcaugagaaacgugcccgagaagcagaccagaggcaucuucggcgccaucgccggcuucaucgagaacggcugggagggcaugguggacggcugguacggcuucagacaccagaacagcgagggcagaggccaggccgccgaccugaagagcacccaggccgccaucgaccagaucaacggcaagcugaacagacugaucggcaagaccaucgagaaguuccaccagaucgagaaggaguucagcgagguggagggcagaauccagggcagagagaaguacguggaggacaccaagaucgaccuguggagcuacaucggcgaguucaucguggcccuggagaaccagcacaccaucgaccugaccgacagcgagaugaacaagcuguucgagaagaccaagaagcagaugagagagaacgccgaggacaugggcaacggcugcuucaagaucuaccacaagugcgacaacgccugcaucggcagcaucagaaacggcaucuacgaccacgacguguacagagacgaggcccugaacaacagauuccagaucaagggcguggagcugaagagcggcuacaaggacuggauccuguggaucagcuucgccaucagcugcuuccugcugugcguggcccugcugggcuucaucaugugggccugccagaagggcaacaucagaugcaacaucugcaucuga

SEQ ID NO: 172554 - RNA, 1701 nt, Artificial Sequence
  derived and/or modified CDS sequence (opt4) from hemagglutinin__InfluenzaA__AID70477
augaagaccaucaucgcccugagcuacauccugugccugguguucgcccagaagcugcccggcaacgacagcagcaccggcacccugugccugggccaccacgccgugcccaacggcaccaucgugaagaccaucaccaacgaccagaucgaggugaccaacgccaccgagcuggugcagagcagcagcaccggcgagaucugcaacagaccccaccagauccuggacggcgagaacugcacccugaucgacgcccugcugggcgacccccagugcgacggcuuccagaacaagaagugggaccuguucguggagagaagcaaggcccacagcaacugcuaccccuacgacgugcccgacuacgccagccugagaagccugguggccagcagcggcacccuggaguucaacaacgagagcuucaacuggaccggcgugacccagaacggcaccagcagcgccugcaucagaagaagcaacaacagcuucuucagcauccugaacuggcugacccaccugaacuucaaguaccccgcccugaacgugaccaugcccaacaacgagcaguucgacaagcuguacaucuggggcgugcaccaccccggcaccgacaaggaccagaucuuccuguacgcccaggccagcggcagaaucaccgugagcaccaagaagagccagcaggccgugauccccaacaucggcagcagacccagagugagaaacauccccagcagagugagcaucuacuggaccaucgugaagcccggcgagauccugcugaucaacagcaccggcaaccugaucgcccccagaggcuacuucaagaucagaagcggcaagagcagcaucaugagaagcgacgcccccaucggcaagugcuacagcgccugcaucacccccaacggcagcauccccaacgacaagcccuuccagaacgugaacagaaucaccuacggcgccugccccagauacgugaagcagcacccccugaagcuggccaccggcaugagaaacgugcccgagaagcagaccagaggcaucuucggcgccaucgccggcuucaucgagaacggcugggagggcaugguggacggcugguacggcuucagacaccagaucugcgagggcagaggccaggccgccgaccugaagagcacccaggccgccaucgaccagaucaacggcaagcugaacagacugaucggcaagaccaucgagaaguuccaccagaucgagaaggaguucagcgagguggaguggagaauccagggccuggagaaguacguggaggacaccaagguggaccuguggagcuacaacggcgagcugaucguggcccuggagaaccaccacaccaucgaccugaccgacagcgagaugaacaagcuguucgagaagaccaagaagcagaugagagagaacgccgaggacaugggcaacggcugcuucaagaucuaccugaagugcgacaacgccugcaucggcagcaucagaaacggcaucuacgaccacgacguguacagagacgaggcccugaacaacagauuccagaucaagggcguggagcugaagagcggcuacaaggacuggauccuguggaucagcuucaccgagagcugcuuccugcugagcguggcccugcugggcuucaucaugugggccugccagaagggcaacaucagaugcaacaucugcaucuga

SEQ ID NO: 172555 - RNA, 1701 nt, Artificial Sequence
  derived and/or modified CDS sequence (opt4) from hemagglutinin__InfluenzaA__AID70478
augaagaccaucaucgcccugagcuacauccugugccugguguucgcccagaagcugcccggcaacgacaacagcaccgccacccugugccugggccaccacgccgugcccaacggcaccaucgugaagaccaucaccaacgaccagaucgaggugaccaacgccaccgagcuggugcagagcagcagcaccggcgagaucugcaacagcccccaccagauccuggacggcgagaacugcacccugaucgacgcccugcugggcgacccccagugcgacggcuuccagaacaagaagugggaccuguucguggagagaagcaaggcccacagcaacugcuaccccuacgacgugcccgacuacgccagccugagaagccugguggccagcagcggcacccuggaguucaacaacgagagcuucaacuggaccggcgugacccagaacggcaccagcagcgccugcaucagaagaagcaacaacagcuucuucagcagacugaacuggcugacccaccugaacuucaaguaccccgcccugaacgugaccaugcccaacaacgagcaguucgacaagcuguacaucuggggcgugcaccaccccggcaccgacaaggaccagaucuuccuguacgcccaggccagcggcagaaucaccgugagcaccaagaagagccagcaggccgugauccccaacaucggcagcagacccagagugagaaacauccccagcagagugagcaucuacuggaccaucgugaagcccggcgacauccugcugaucaacagcaccggcaaccugaucgcccccagaggcuacuucaagaucagaagcggcaagagcagcaucaugagaagcgacgcccccaucggcaagugcaacagcgccugcaucacccccaacggcagcauccccaacgacaagcccuuccagaacgugaacagaaucaccuacggcgccugccccagauacgugaagcagaacacccugaagcuggccaccggcaugagaaacgugcccgagaagcagaccagaggcaucuucggcgccaucgccggcuucaucgagaacggcugggagggcaugguggacggcugguacggcuucagacaccagaacugcgagggcagaggccaggccgccgaccuggagagcacccaggccgccaucgaccagaucaacggcaagaugaacagacugaugggcaagaccaucgagaaguuccaccagaucgagaaggaguucagcgagguggagggcagaauccagggcagagagaaguacguggaggacaccaagaucgaccuguggagcuacaacggcgagcugcugguggaccuggagaaccagcacaccaucgaccugaccgacagcgagaugaacaagguguucgagaagaccaagaagcagaugagagagaacgccgaggacaugggcaacggcugcuucaagaucuaccacaagugcgacaacgccugcaucggcagcaucagaaacggcaucuacgaccacgacguguacagagacgaggcccugaacaacagauuccagaucaagggcguggagcugaagagcggcuacaaggacuggauccaguggaucagcuucaccaucagcugcuuccugcugugcgugagccugcugggcuucaucaugugggccugccagaagggcaacaucagaugcaacaucugcaucuga

SEQ ID NO: 172556 - RNA, 1701 nt, Artificial Sequence; identical to SEQ ID NO: 170100
  derived and/or modified CDS sequence (opt4) from hemagglutinin__InfluenzaA__AID70632

SEQ ID NO: 172557 - RNA, 1683 nt, Artificial Sequence
  derived and/or modified CDS sequence (opt4) from hemagglutinin__InfluenzaA__AID70634
augaacacccagauccugguguucgcccugaucgccaucauccccaccaacgccgacaagaucugccugggccaccacgccgugagcaacggcaccaaggugaacacccugaccgagagaggcguggagguggugaacgccaccgagaccguggagagaaccaacauccccagaaucugcagcaagggcaagagaaccguggaccugggccagugcggccugcugggcaccaucaccggccccccccagugcgaccaguuccuggaguucagcgccgaccugaucaucgagagaagagagggcagcgacgugugcuaccccggcaaguucgugaacgaggaggcccugagacagauccugagagagagcggcggcaucgacaaggaggccaugggcuucaccuacagcggcaucagaaccaacggcgccaccagcgccugcagaagaagcggcagcagcuucuacgccgagaugaaguggcugcugagcaacaccgacaacgccgccuucccccagaugaccaagagcuacaagaacaccagaaagagccccgcccugaucguguggggcauccaccacagcgugagcaccgccgagcagaccaagcuguacggcagcggcaacaagcuggugaccgugggcagcagcaacuaccagcagagcuucgugcccagccccggcgccagaccccaggugaacggccugagcggcagaaucgacuuccacuggcugaugcugaaccccaacgacaccgugaccuucagcuucaacggcgccuucaucgcccccgacagagccagcuuccugagaggcaagagcaugggcauccagagcggcgugcagguggacgccaacugcgagggcgacugcuaccacagcggcggcaccaucaucagcaaccugcccuuccagaacaucgacagcagagccgugggcaagugccccagauacgugaagcagagaagccugcugcuggccaccggcaugaagaacgugcccgagauccccaagggcagaggccuguucggcgccaucgccggcuucaucgagaacggcugggagggccugaucgacggcugguacggcuucagacaccagaacgcccagggcgagggcaccgccgccgacuacaagagcacccagagcgccaucgaccagaucaccggcaagcugaacagaaucaucgagaagaccaaccagcaguucgagcugaucgacaacgaguucaacgagguggagaagcagaucagcaacgugaucaacuggaccagagacagcaucaccgagguguggagcuacaacgccgagcugcugguggccauggagaaccagcacaccaucgaccuggccgacagcgagauggacaagcuguacgagagagugaagagacagcugagagagaacgccgaggaggacggcaccggcugcuucgagaucuuccacaagugcgacgacgacugcauggccagcaucagaaacaacaccuacgaccacagcaaguacagagaggaggccaugcagaacagaauccagaucgaccccgugaagcugagcagcggcuacaaggacgugauccugugguucagcuucggcgccagcugcuucauccugcuggccaucgugaugggccugguguucaucugcgugaagaacggcaacaugagaugcaccaucugcaucuga

SEQ ID NO: 172558 - RNA, 1701 nt, Artificial Sequence
  derived and/or modified CDS sequence (opt4) from hemagglutinin__InfluenzaA__AIF72902
augaagaccaucaucgcccugagcuacauccugugccugguguucgcccagaagcugcccggcaacgacaacagcaccgccacccugugccugggccaccacgccgugcccaacggcaccaucgugaagaccaucaccaacgaccagaucgaggugaccaacgccaccgagcuggugcagagcagcagcgccggcgagaucugcgacagcccccaccagauccuggacggcgagaacugcacccugaucgacgcccugcugggcgacccccagugcgacggcuuccagaacaagaagugggaccuguucguggagagaagcagagccuacagcaacugcuaccccuacgacgugcccgacuacgccagccugagaagccugguggccagcagcggcacccuggaguucaacaacgagagcuucaacuggaccggcgugacccagaacggcaccagcagcgccugcaucagaagaagcaacaacagcuucuucagcagacugaacuggcugacccaccugaacuucaaguaccccgcccugaacgugaccaugcccaacaacgagcaguucgacaagcuguacaucuggggcgugcaccaccccggcaccgacaaggaccagaucuuccuguacgcccaggccagcggcagaaucaccgugagcaccaagagaagccagcaggccgugauccccaacaucggcagcagacccagagugagaaacauccccagcagaaucagcaucuacuggaccaucgugaagcccggcgacauccugcugaucaacagcaccggcaaccugaucgcccccagaggcuacuucaagaucagaagcggcaagagcagcaucaugagaagcgacgcccccaucggcaagugcaacagcgagugcaucacccccaacggcagcauccccaacgacaagcccuuccagaacgugaacagaaucaccuacggcgccugccccagauacgugaagcagagcacccugaagcuggccaccggcaugagaaacgugcccgagaagcagaccagaggcaucuucggcgccaucgccggcuucaucgagaacggcugggagggcaugguggacggcugguacggcuucagacaccagaacagcgagggcagaggccaggccgccgaccugaagagcacccaggccgccaucgaccagaucaacggcaagcugaacagacugaucggcaagaccaacgagaaguuccaccagaucgagaaggaguucagcgagguggagggcagaauccaggaccuggagaaguacguggaggacaccaagaucgaccuguggagcuacaacgccgagcugcugguggcccuggagaaccagcacaccaucgaccugaccgacagcgagaugaacaagcuguucgagaagaccaagaagcagcugagagagaacgccgaggacaugggcaacggcugcuucaagaucuaccacaagugcgacaacgccugcaucggcagcaucagaaacggcaccuacgaccacgacguguacagagacgaggcccugaacaacagauuccagaucaagggcguggagcugaagagcggcuacaaggacuggauccuguggaucagcuucgccaucagcugcuuccugcugugcguggcccugcugggcuucaucaugugggccugccagaagggcaacaucagaugcaacaucugcaucuga

SEQ ID NO: 172559 - RNA, 1701 nt, Artificial Sequence
  derived and/or modified CDS sequence (opt4) from hemagglutinin__InfluenzaA__AIF72903
augaagaccaucaucgcccugagcuacauccugugccugguguucgcccaggagcugcccggcaacgacaacagcaccgccacccugugccugggccaccacgccgugcccaacggcaccaucgugaagaccaucaccaacgaccagaucgaggugaccaacgccaccgagcuggugcagagcagcagcgccggcgagaucugcgacagcccccaccagauccuggacggcgagaacugcacccugaucgacgcccugcugggcgacccccagugcgacggcuuccagaacaagaagugggaccuguucguggagagaagcagagccuacagcaacugcuaccccuacgacgugcccgacuacgccagccugagaagccugguggccagcagcggcacccuggaguucaacaacgagagcuucaacuggaccggcgugacccagaacggcaccagcagcgccugcaucagaagaagcaacaacagcuucuucagcagacugaacuggcugacccaccugaacuucaaguaccccgcccugaacgugaccaugcccaacaacgagcaguucgacaagcuguacaucuggggcgugcaccaccccggcaccgacaaggaccagaucuuccuguacgcccaggccagcggcagaaucaccgugagcaccaagagaagccagcaggccgugauccccaacaucggcagcagacccagagugagaaacauccccagcagaaucagcaucuacuggaccaucgugaagcccggcgacauccugcugaucaacagcaccggcaaccugaucgcccccagaggcuacuucaagaucagaagcggcaagagcagcaucaugagaagcgacgcccccaucggcaagugcaacagcgagugcaucacccccaacggcagcauccccaacgacaagcccuuccagaacgugaacagaaucaccuacggcgccugccccagauacgugaagcagagcacccugaagcuggccaccggcaugagaaacgugcccgagaagcagaccagaggcaucuucggcgccaucgccggcuucaucgagaacggcugggagggcaugguggacggcugguacggcuucagacaccagaacagcgagggcagaggccaggccgccgaccugaagagcacccaggccgccaucgaccagaucaacggcaagcugaacagacugaucggcaagaccaacgagaaguuccaccagaucgagaaggaguucagcgagguggagggcagaauccaggaccuggagaaguacguggaggacaccaagaucgaccuguggagcuacaacgccgagcugcugguggcccuggagaaccagcacaccaucgaccugaccgacagcgagaugaacaagcuguucgagaagaccaagaagcagcugagagagaacgccgaggacaugggcaacggcugcuucaagaucuaccacaagugcgacaacgccugcaucggcagcaucagaaacggcaccuacgaccacgacguguacagagacgaggcccugaacaacagauuccagaucaagggcguggagcugaagagcggcuacaaggacugggugcuguggaucagcuucgccaucagcugcuuccugcugugcguggcccugcugggcuucaucaugugggccugccagaagggcaacaucagaugcaacaucugcaucuga

SEQ ID NO: 172560 - RNA, 1701 nt, Artificial Sequence
  derived and/or modified CDS sequence (opt4) from hemagglutinin__InfluenzaA__AIF72904
augaagaccaucaucgcccugagcuacauccugugccugguguucgcccaggagcugcccggcaacgacaacagcaccgccacccugugccugggccaccacgccgugcccaacggcaccaucgugaagaccaucaccaacgaccagaucgaggugaccaacgccaccgagcuggugcagagcagcagcgccggcgagaucugcgacagcccccaccagauccuggacggcgagaacugcacccugaucgacgcccugcugggcgacccccagugcgacggcuuccagaacaagaagugggaccuguucguggagagaagcagagccuacagcaacugcuaccccuacgacgugcccgacuacgccagccugagaagccugguggccagcagcggcacccuggaguucaacaacgagagcuucaacuggaccggcgugacccagaacggcaccagcagcgccugcaucagaagaagcaacaacagcuucuucagcagacugaacuggcugacccaccugaacuucaaguaccccgcccugaacgugaccaugcccaacaacgagcaguucgacaagcuguacaucuggggcgugcaccaccccggcaccgacaaggaccagaucuuccuguacgcccaggccagcggcagaaucaccgugagcaccaagagaagccagcaggccgugauccccaacaucggcagcagacccagagugagaaacauccccagcagaaucagcaucuacuggaccaucgugaagcccggcgacauccugcugaucaacagcaccggcaaccugaucgcccccagaggcuacuucaagaucagaagcggcaagagcagcaucaugagaagcgacgcccccaucggcaagugcaacagcgagugcaucacccccaacggcagcauccccaacgacaagcccuuccagaacgugaacagaaucaccuacggcgccugccccagauacgugaagcagagcacccugaagcuggccaccggcaugagaaacgugcccgagaagcagaccagaggcaucuucggcgccaucgccggcuucaucgagaacggcugggagggcaugauggacggcugguacggcuucagacaccagaacagcgagggcagaggccaggccgccgaccugaagagcacccaggccgccaucgaccagaucaacggcaagcugaacagacugaucggcaagaccaacgagaaguuccaccagaucgagaaggaguucagcgagguggagggcagaauccaggaccuggagaaguacguggaggacaccaagaucgaccuguggagcuacaacgccgagcugcugguggcccuggagaaccagcacaccaucgaccugaccgacagcgagaugaacaagcuguucgagaagaccaagaagcagcugagagagaacgccgaggacaugggcaacggcugcuucaagaucuaccacaagugcgacaacgccugcaucggcagcaucagaaacggcaccuacgaccacgacguguacagagacgaggcccugaacaacagauuccagaucaagggcguggagcugaagagcggcuacaaggacugggugcuguggaucagcuucgccaucagcugcuuccugcugugcguggcccugcugggcuucaucaugugggccugccagaagggcaacaucagaugcaacaucugcaucuga

SEQ ID NO: 172561 - RNA, 1701 nt, Artificial Sequence
  derived and/or modified CDS sequence (opt4) from hemagglutinin__InfluenzaA__AIF72905
augaagaccaucaucgcccugagcuacauccugugccugguguucgcccagaagcugcccggcaacgacaacagcaccgccacccugugccugggccaccacgccgugcccaacggcaccaucgugaagaccaucaccaacgaccagaucgaggugaccaacgccaccgagcuggugcagagcagcagcgccggcgagaucugcgacagcccccaccagauccuggacggcgagaacugcacccugaucgacgcccugcugggcgacccccagugcgacggcuuccagaacaagaagugggaccuguucguggagagaagcagagccuacagcaacugcuaccccuacgacgugcccgacuacgccagccugagaagccugguggccagcagcggcacccuggaguucaagaacgagagcuucaacuggaccggcgugacccagaacggcaccagcagcgccugcaucagaagaagcaacaacagcuucuucagcagacugaacuggcugacccacagcaacuucaaguaccccgcccugaacgugaccaugcccaacaacgagcaguucgacaagcuguacaucuggggcgugcaccaccccggcaccgacaaggaccagaucuuccuguacgcccaggccagcggcagaaucaccgugagcaccaagagaagccagcaggccgugauccccaacaucggcagcagacccagagugagaaacauccccagcagaaucagcaucuacuggaccaucgugaagcccggcgacauccugcugaucaacagcaccggcaaccugaucgcccccagaggcuacuucaagaucagaagcggcaagagcagcaucaugagaagcgacgcccccaucggcaagugcaacagcgagugcaucacccccaacggcagcauccccaacgacaagcccuuccagaacgugaacagaaucaccuacggcgccugccccagauacgugaagcagagcacccugaagcuggccaccggcaugagaaacgugcccgagaagcagaccagaggcaucuucggcgccaucgccggcuucaucgagaacggcugggagggcaugauggacggcugguacggcuucagacaccagaacagcgagggcagaggccaggccgccgaccugaagagcacccaggccgccaucgaccagaucaacggcaagcugaacagacugaucggcaagaccaacgagaaguuccaccagaucgagaaggaguucagcgagguggagggcagaauccaggaccuggagaaguacguggaggacaccaagaucgaccuguggagcuacaacgccgagcugcugguggcccuggagaaccagcacaccaucgaccugaccgacagcgagaugaacaagcuguucgagaagaccaagaagcagcugagagagaacgccgaggacaugggcaacggcugcuucaagaucuaccacaagugcgacaacgccugcaucggcagcaucagaaacggcaccuacgaccacgacguguacagagacgaggcccugaacaacagauuccagaucaagggcguggagcugaagagcggcuacaaggacuggauccuguggaucagcuucgccaucagcugcuuccugcugugcguggcccugcugggcuucaucaugugggccugccagaagggcaacaucagaugcaacaucugcaucuga

SEQ ID NO: 172562 - RNA, 1701 nt, Artificial Sequence; identical to SEQ ID NO: 163471
  derived and/or modified CDS sequence (opt4) from hemagglutinin__InfluenzaA__AIF72906

SEQ ID NO: 172563 - RNA, 1701 nt, Artificial Sequence; identical to SEQ ID NO: 163471
  derived and/or modified CDS sequence (opt4) from hemagglutinin__InfluenzaA__AIF72907

SEQ ID NO: 172564 - RNA, 1701 nt, Artificial Sequence; identical to SEQ ID NO: 163471
  derived and/or modified CDS sequence (opt4) from hemagglutinin__InfluenzaA__AIF72908

SEQ ID NO: 172565 - RNA, 1701 nt, Artificial Sequence
  derived and/or modified CDS sequence (opt4) from hemagglutinin__InfluenzaA__AIF72909
augaagaccaucaucgcccugagcuacauccugugccugguguucgcccagaagcugcccggcaacgacaacagcaccgccacccugugccugggccaccacgccgugcccaacggcaccaucgugaagaccaucaccaacgaccagaucgaggugaccaacgccaccgagcuggugcagagcagcagcgccggcgagaucugcgacggcccccaccagauccuggacggcgagaacugcacccugaucgacgcccugcugggcgacccccagugcgacggcuuccagaacaagaagugggaccuguucguggagagaagcagagccuacagcaacugcuaccccuacgacgugcccgacuacgccagccugagaagccugguggccagcagcggcacccuggaguucaacaacgagagcuucaacuggaccggcaccacccagaacggcaccagcagcgccugcaucagaagaagcaacaacagcuucuucagcagacugaacuggcugacccaccugaacuucaaguaccccgcccugaacgugaccaugcccaacaacgagcaguucgacaagcuguacaucuggggcgugcaccaccccggcaccgacaaggaccagaucuuccuguacgcccaggccagcggcagaaucaccgugagcaccaagagaagccagcaggccgugauccccaacaucggcagcagacccagagugagaaacauccccagcagaaucagcaucuacuggaccaucgugaagcccggcgacauccugcugaucaacagcaccggcaaccugaucgcccccagaggcuacuucaagaucagaagcggcaagagcagcaucaugagaagcgacgcccccaucggcaagugcaacagcgagugcaucacccccaacggcagcauccccaacgacaagcccuuccagaacgugaacagaaucaccuacggcgccugccccagauacgugaagcagagcacccugaagcuggccaccggcaugagaaacgugcccgagaagcagaccagaggcaucuucggcgccaucgccggcuucaucgagaacggcugggagggcaugguggacggcugguacggcuucagacaccagaacagcgagggcagaggccaggccgccgaccugaagagcacccaggccgccaucgaccagaucaacggcaagcugaacagacugaucggcaagaccaacgagaaguuccaccagaucgagaaggaguucagcgagguggagggcagaauccaggaccuggagaaguacguggaggacaccaagaucgaccuguggagcuacaacgccgagcugcugguggcccuggagaaccagcacaccaucgaccugaccgacagcgagaugaacaagcuguucgagaagaccaagaagcagcugagagagaacgccgaggacaugggcaacggcugcuucaagaucuaccacaagugcgacaacgccugcaucggcagcaucagaaacggcaccuacgaccacgacguguacagagacgaggcccugaacaacagauuccagaucaagggcguggagcugaagagcggcuacaaggacuggauccuguggaucagcuucgccaucagcugcuuccugcugugcguggcccugcugggcuucaucaugugggccugccagaagggcaacaucagaugcaacaucugcaucuga

SEQ ID NO: 172566 - RNA, 1701 nt, Artificial Sequence; identical to SEQ ID NO: 163471
  derived and/or modified CDS sequence (opt4) from hemagglutinin__InfluenzaA__AIF72910

SEQ ID NO: 172567 - RNA, 1701 nt, Artificial Sequence; identical to SEQ ID NO: 163471
  derived and/or modified CDS sequence (opt4) from hemagglutinin__InfluenzaA__AIF72911

SEQ ID NO: 172568 - RNA, 1701 nt, Artificial Sequence; identical to SEQ ID NO: 172558
  derived and/or modified CDS sequence (opt4) from hemagglutinin__InfluenzaA__AIF72912

SEQ ID NO: 172569 - RNA, 1701 nt, Artificial Sequence; identical to SEQ ID NO: 163471
  derived and/or modified CDS sequence (opt4) from hemagglutinin__InfluenzaA__AIF72913

SEQ ID NO: 172570 - RNA, 1701 nt, Artificial Sequence
  derived and/or modified CDS sequence (opt4) from hemagglutinin__InfluenzaA__AIF72914
augaagaccaucaucgcccugagcuacauccugugccugguguucgcccagaagcugcccggcaacgacaacagcaccgccacccugugccugggccaccacgccgugcccaacggcaccaucgugaagaccaucaccaacgaccagaucgaggugaccaacgccaccgagcuggugcagagcagcagcaccggcgagaucugcgacagcccccaccagauccuggacggcgagaacugcacccugaucgacgcccugcugggcgacccccagugcgacggcuuccagaacaagaagugggaccuguucguggagagaagcaaggccuacagcaacugcuaccccuacgacgugcccgacuacgccagccugagaagccugguggccagcagcggcacccuggaguucaacaacgagagcuucaacuggaccggcgugacccagaacggcaccagcagcgccugcaucagaagaagcaacaacagcuucuucagcagacugaacuggcugacccaccugaacuucaaguaccccgcccugaacgugaccaugcccaacaacgagcaguucgacaagcuguacaucuggggcgugcaccaccccggcaccgacaaggaccagaucuuccuguacgcccaggccagcggcagaaucaccgugagcaccaagagaagccagcaggccgugauccccaacaucggcagcagacccagagugagaaacauccccagcagaaucagcaucuacuggaccaucgugaagcccggcgacauccugcugaucaacagcaccggcaaccugaucgcccccagaggcuacuucaagaucagaggcggcaagagcagcaucaugagaagcgacgcccccaucggcaagugcaacagcgagugcaucacccccaacggcagcauccccaacgacaagcccuuccagaacgugaacagaaucaccuacggcgccugccccagauacgugaagcagaacacccugaagcuggccaccggcaugagaaacgugcccgagaagcagaccagaggcaucuucggcgccaucgccggcuucaucgagaacggcugggagggcaugguggacggcugguacggcuucagacaccagaacagcgagggcagaggccaggccgccgaccugaagagcacccaggccgccaucgaccagaucaacggcaagcugaacagacugaucggcaagaccaacgagaaguuccaccagaucgagaaggaguucagcgagguggagggcagaauccacgaccuggagaaguacguggaggacacccuguucgaccuguggguguacaacagcgagcugcugguggcccugcagaaccagcacaccaucgaccugcccgacagcgagaugaacaagcuguucgagaagaccaagaagcagcugagagagaacgccgaggacaugggcaacggcugcuucaagaucuaccacaagugcgacaacgccugcaucggcagcaucagaaacggcaccuacgaccacgacguguacagagacgaggcccugaacaacagauuccagaucaagggcguggagcugaagagcggcuacaaggacuggauccuguggaucagcuucgccaucagcugcuuccugcugugcguggcccugcugggcuucaucaugugggccugccagaagggcaacaucagaugcaacaucugcaucuga

SEQ ID NO: 172571 - RNA, 1701 nt, Artificial Sequence
  derived and/or modified CDS sequence (opt4) from hemagglutinin__InfluenzaA__AIF72915
augaagaccaucaucgcccugagcuacauccugugccugguguucgcccagaagcugcccggcaacgacaacagcaccgccacccugugccugggccaccacgccgugcccaacggcaccaucgugaagaccaucaccaacgaccagaucgaggugaccaacgccaccgagcuggugcagagcagcagcaccggcgagaucugcgacagcccccugcagauccuggacggcgagaacugcacccugaucgacgcccugcugggcgacccccagugcgacggcuuccagaacaagaagugggaccuguucguggagagaagcaaggccuacagcaacugcuaccccuacgacgugcccgacuacgccagccugagaagccugguggccagcagcggcacccuggaguucaacaacgagagcuucaacuggaccggcgugacccagaacggcaccagcagcgccugcaucagaagaagcaacaacagcuucuucagcagacugaacuggcugacccaccugaacuucaaguaccccgcccugaacgugaccaugcccaacaacgagcaguucgacaagcuguacaucuggggcgugcaccaccccggcaccgacaaggaccagaucuuccuguacgcccaggccagcggcagaaucaccgugagcaccaagagaagccagcaggccgugauccccaacaucggcagcagacccagagugagaaacauccccagcagaaucagcaucuacuggaccaucgugaagcccggcgacauccugcugaucaacagcaccggcaaccugaucgcccccagaggcuacuucaagaucagaagcggcaagagcagcaucaugagaagcaacgcccccaucggcaagugcaacagcgagugcaucacccccaacggcagcauccccaacgacaagcccuuccagaacgugaacagaaucaccuacggcgccugccccagauacgugaagcagaacacccugaagcuggccaccggcaugagaaacgugcccgagaagcagaccagaggcaucuucggcgccaucgccggcuucaucgagaacggcugggagggcaugguggacggcugguacggcuucagacaccagaacagcgagggcagaggccaggccgccgaccugaagagcacccaggccgccaucgaccagaucaacggcaagcugaacagacugaucggcaagaccaacgagaaguuccaccagaucgagaaggaguucagcgagguggagggcagaauccaggaccuggagaaguacguggaggacaccaagaucgaccuguggagcuacaacgccgagcugcugguggcccuggagaaccagcacaccaucgaccugaccgacagcgagaugaacaagcuguucgagaagaccaagaagcagcugagagagaacgccgaggacaugggcaacggcugcuucaagaucuaccacaagugcgacaacgccugcaucggcagcaucagaaacggcaccuacgaccacgacguguacagagacgaggcccugaacaacagauuccagaucaagggcguggagcugaagagcggcuacaaggacuggauccuguggaucagcuucgccaucagcugcuuccugcugugcguggcccugcugggcuucaucaugugggccugccagaagggcaacaucagaugcaacaucugcaucuga

SEQ ID NO: 172572 - RNA, 1701 nt, Artificial Sequence; identical to SEQ ID NO: 163471
  derived and/or modified CDS sequence (opt4) from hemagglutinin__InfluenzaA__AIF72916

SEQ ID NO: 172573 - RNA, 1701 nt, Artificial Sequence
  derived and/or modified CDS sequence (opt4) from hemagglutinin__InfluenzaA__AIF72917
augaagaccaucaucgcccugagcuacauccugugccugguguucgcccagaagcugcccagaaacgacaacagcaccgccacccugugccugggccaccacgccgugcccaacggcaccaucgugaagaccaucaccaacgaccagaucgaggugaccaacgccaccgagcuggugcagagcagcagcaccggcgagaucugcgacagcccccaccagauccuggacggcgagaacugcacccugaucgacgcccugcugggcgacccccagugcgacggcuuccagaacaagaagugggaccuguucguggagagaagcaaggccuacagcaacugcuaccccuacgacgugcccgacuacgccagccugagaagccugguggccagcagcggcacccuggaguucaagaacgagagcuucaacuggaccggcgugacccagaacggcaccagcagcgccugcaucagaagaagcaacaacagcuucuucagcagacugaacuggcugacccaccugaacuucaaguaccccgcccugaacgugaccaugcccaacaacgagcaguucgacaagcuguacaucuggggcgugcaccaccccggcaccgacaaggaccagaucuuccuguacgcccaggccagcggcagaaucaccgugagcaccaagagaagccagcaggccgugauccccaacaucggcagcagacccagagugagaaacauccccagcagaaucagcaucuacuggaccaucgugaagcccggcgacauccugcugaucaacagcaccggcaaccugaucgcccccagaggcuacuucaagaucagaagcggcaagagcagcaucaugagaagcgacgcccccaucggcaagugcaacagcgagugcaucacccccaacggcagcauccccaacgacaagcccuuccagaacgugaacagaaucaccuacggcgccugccccagauacgugaagcagaacacccugaagcuggccaccggcaugagaaacgugcccgagaagcagaccagaggcaucuucggcgccaucgccggcuucaucgagaacggcugggagggcaugguggacggcugguacggcuucagacaccagaacagcgagggcagaggccaggccgccgaccugaagagcacccaggccgccaucgaccagaucaacggcaagcugaacagacugaucggcaagaccaacgagaaguuccaccagaucgagaaggaguucagcgagguggagggcagaauccaggaccuggagaaguacguggaggacaccaagaucgaccuguggagcuacaacgccgagcugcugguggcccuggagaaccagcacaccaucgaccugaccgacagcgagaugaacaagcuguucgagaagaccaagaagcagcugagagagaacgccgaggacaugggcaacggcugcuucaagaucuaccacaagugcgacaacgccugcaucggcagcaucagaaacggcaccuacgaccacgacguguacagagacgaggcccugaacaacagauuccagaucaagggcguggagcugaagagcggcuacaaggacuggauccuguggaucagcuucgccaucagcugcuuccugcugugcguggcccugcugggcuucaucaugugggccugccagaagggcaacaucagaugcgacaucugcaucuga

SEQ ID NO: 172574 - RNA, 1683 nt, Artificial Sequence
  derived and/or modified CDS sequence (opt4) from hemagglutinin__InfluenzaA__AIG44693
auggagaccgccagccugaucaccauccugcugguggugaccgugagcaacgccgacaagaucugcaucggcuaccagagcaccaacagcaccgagaccguggacacccugaccgagaacaacgugcccgugacccacgccaaggagcugcugcacaccgagcacaacggcaugcugugcgccaccagccugggccagccccugauccuggacaccugcaccaucgagggccugaucuacggcaaccccagcugcgaccugcugcugggcggcagagaguggagcuacaucguggagagacccagcgccgugaacggccugugcuaccccggcaacguggagaaccuggaggagcugagaagccuguucagcagcgccagaagcuaccagagaauccagaucuuccccgacaccaucuggaacgugagcuacagcggcaccagcaaggccugcagcgacagcuucuacagaagcaugagauggcugacccagaaggacaacgccuaccccauccaggacgcccaguacaccaacaaccaggagaagaacauccuguucauguggggcaucaaccacccccccaccgacaccgcccagaccaaccuguacaccagaaccgacaccaccaccagcguggccaccgaggagaucaacagaaccuucaagccccugaucggccccagaccccuggugcacggccugaugggcagaaucaacuacuacuggagcgugcugaagcccggccagacccugagaaucaagagcaacggcaaccugaucgcccccugguacggccacauccugagcggcaagagccacggcagaauccugaagaccgaccugaagagaggcaacugcaccgugcagugccagaccgagaagggcggccugaacaccacccugcccuuccagaacgugagcaaguacgccuucggcaacugcagcaaguacaucggcaucaagagccugaagcuggccgugggccugagaaacgugcccagcagaagcagcagaggccuguucggcgccaucgccggcuucaucgagggcggcuggagcggccugguggccggcugguacggcuuccagcacagcaacgaccagggcgugggcauggccgccgacagagacagcacccagaaggccaucgacaagaucaccagcaaggugaacaacaucguggacaagaugaacaagcaguacgagaucaucgaccacgaguucagcgagguggagaccagacugaacaugaucaacaacaagaucgacgaccagauccaggacaucugggccuacaacgccgagcugcuggugcugcuggagaaccagaagacccuggacgagcacgacgccaacgugaacaaccuguacaacaaggugaagagagcccugggcagcaacgccguggaggacggcaagggcugcuucgagcuguaccacaagugcgacgaccagugcauggagaccaucagaaacggcaccuacaacagaagaaaguaccaggaggagagcaagcuggagaagcagaagaucgagggcgugaagcuggagagcgagggcaccuacaagauccugaccaucuacagcaccguggccagcagccuggugaucgccaugggcuucgccgccuuccuguucugggccaugagcaacggcagcugcagaugcaacaucugcaucuga

SEQ ID NO: 172575 - RNA, 1701 nt, Artificial Sequence; identical to SEQ ID NO: 167042
  derived and/or modified CDS sequence (opt4) from hemagglutinin__InfluenzaA__AIJ10728

SEQ ID NO: 172576 - RNA, 1701 nt, Artificial Sequence
  derived and/or modified CDS sequence (opt4) from hemagglutinin__InfluenzaA__AIJ10729
augaagaccaucaucgcccugagcuacauccugugccugguguucgcccagaagcugcccggccacgacaacagcaccgccacccugugccugggccaccacgccgugcccaacggcaccaucgugaagaccaucaccaacgaccagaucgaggugaccaacgccaccgagcuggugcagagcagcagcaccggcgagaucugcaacagcccccaccagauccuggacggcgagaacugcacccugaucgacgcccugcugggcgacccccagugcgacggcuuccagaacaagaagugggaccuguucguggagagaagcaaggcccacagcaacugcuaccccuacgacgugcccgacuacgccagccugagaagccugguggccagcagcggcacccuggaguucaacaacgagagcuucaacuggaccggcgugacccagaacggcaccagcagcgccugcaucagaagaagcaacaacagcuucuucagcagacugaacuggcugacccaccugaacuucaaguaccccgcccugaacgugaccaugcccaacaacgagcaguucgacaagcuguacaucuggggcgugcaccaccccggcaccgacaaggaccagaucuuccuguacgcccaggccagcggcagaaucaccgugagcaccaagagaagccagcaggccgugauccccaacaucggcagcagacccagagugagaaacauccccagcagagugagcaucuacuggaccaucgugaagcccggcgacauccugcugaucaacagcaccggcaaccugaucgcccccagaggcuacuucaagaucagaagcggcaagagcagcaucaugagaagcgacgcccccaucggcaagugcaacagcgccugcaucacccccaacggcagcauccccaacgacaagcccuuccagaacgugaacagaaucaccuacggcgccugccccagauacgugaagcagaacacccugaagcuggccaccggcaugagaaacgugcccgagaagcagaccaagggcaucuucggcgccaucgccggcuucaucgagaacggcugggagggcaugguggacggcugguacggcuucagacaccagaacagcgagggcagaggccaggccgccgaccugaagagcacccaggccgccaucgaccagaucaacggcaagcugaacagacugaucggcaagaccaacgagaaguuccaccagaucgagaaggaguucagcgagguggagggcagaauccaggaccuggagaaguacguggaggacaccaagaucgaccuguggagcuacaacgccgagcugcugguggcccuggagaaccagcacaccaucgaccugaccgacagcgagaugaacaagcuguucgagaagaccaagaagcagcugagagagaacgccgaggacaugggcaacggcugcuucaagaucuaccacaagugcgacaacgccugcaucggcagcaucagaaacggcaccuacgaccacgacguguacagagacgaggcccugaacaacagauuccagaucaagggcguggagcugaagagcggcuacaaggacuggauccuguggaucagcuucgccaucagcugcuuccugcugugcguggcccugcugggcuucaucaugugggccugccagaagggcaacaucagaugcaacaucugcaucuga

SEQ ID NO: 172577 - RNA, 1701 nt, Artificial Sequence; identical to SEQ ID NO: 167042
  derived and/or modified CDS sequence (opt4) from hemagglutinin__InfluenzaA__AIJ10730

SEQ ID NO: 172578 - RNA, 1701 nt, Artificial Sequence; identical to SEQ ID NO: 167042
  derived and/or modified CDS sequence (opt4) from hemagglutinin__InfluenzaA__AIJ10731

SEQ ID NO: 172579 - RNA, 1701 nt, Artificial Sequence
  derived and/or modified CDS sequence (opt4) from hemagglutinin__InfluenzaA__AIJ10732
augaagaccaucaucgcccugagcuacauccugugccugguguucgcccaggagcugcccggcaacgacaacagcaccgccacccugugccugggccaccacgccgugcccaacggcaccaucgugaagaccaucaccaacgaccagaucgaggugaccaacgccaccgagcuggugcagagcagcagcaccggcgagaucugcaacagcccccaccagauccuggacggcgagaacugcacccugaucgacgcccugcugggcgacccccagugcgacggcuuccagaacaagaagugggaccuguucguggagagaagcaaggcccacagcaacugcuaccccuacgacgugcccgacuacgccagccugagaagccugguggccagcagcggcacccuggaguucaacaacgagagcuucaacuggaccggcgugacccagaacggcaccagcagcgccugcaucagaagaagcaacaacagcuucuucagcagacugaacuggcugacccaccugaacuucagauaccccgcccugaacgugaccaugcccaacaacgagcaguucgacaagcuguacaucuggggcgugcaccaccccggcaccgacaaggaccagaucuuccuguacgcccaggccagcggcagaaucaccgugagcaccaagagaagccagcaggccgugauccccaacaucggcagcagacccagagugagaaacauccccagcagagugagcaucuacuggaccaucgugaagcccggcgacauccugcugaucaacagcaccggcaaccugaucgcccccagaggcuacuucaagaucagaagcggcaagagcagcaucaugagaagcgacgcccccaucggcaagugcaacagcgccugcaucacccccaacggcagcauccccaacgacaagcccuuccagaacgugaacagaaucaccuacggcgccugccccagauacgugaagcagaacacccugaagcuggccaccggcaugagaaacgugcccgagaagcagaccagaggcaucuucggcgccaucgccggcuucaucgagaacggcugggagggcaugguggacggcugguacggcuucagacaccagaacagcgagggcagaggccaggccgccgaccugaagagcacccaggccgccaucgaccagaucaacggcaagcugaacagacugaucggcaagaccaacgagaaguuccaccagaucgagaaggaguucagcgagguggagggcagaauccaggaccuggagaaguacguggaggacaccaagaucgaccuguggagcuacaacgccgagcugcugguggcccuggagaaccagcacaccaucgaccugaccgacagcgagaugaacaagcuguucgagaagaccaagaagcagcugagagagaacgccgaggacaugggcaacggcugcuucaagaucuaccacaagugcgacaacgccugcaucggcagcaucagaaacggcaccuacgaccacgacguguacagagacgaggcccugaacaacagauuccagaucaagggcguggagcugaagagcggcuacaaggacuggauccuguggaucagcuucgccaucagcugcuuccugcugugcguggcccugcugggcuucaucaugugggccugccagaagggcaacaucagaugcaacaucugcaucuga

SEQ ID NO: 172580 - RNA, 1701 nt, Artificial Sequence
  derived and/or modified CDS sequence (opt4) from hemagglutinin__InfluenzaA__AIJ10733
augaagaccaucaucgcccugagcuacauccugugccugguguucgcccaggagcugcccggcaacgacaacagcaccgccacccugugccugggccaccacgccgugcccaacggcaccaucgugaagaccaucaccaacgaccagaucgaggugaccaacgccaccgagcuggugcagagcagcagcaccggcgagaucugcaacagcccccaccagauccuggacggcgagaacugcacccugaucgacgcccugcugggcgacccccagugcgacggcuuccagaacaagaagugggaccuguucguggagagaagcaaggcccacagcaacugcuaccccuacgacgugcccgacuacgccagccugagaagccugguggccagcagcggcacccuggaguucaacaacgagagcuucaacuggaccggcgugacccagaacggcaccagcagcgccugcaucagaagaagcaacaacagcuucuucagcagacugaacuggcugacccaccugaacuucagauaccccgcccugaacgugaccaugcccaacaacgagcaguucgacaagcuguacaucuggggcgugcaccaccccggcaccgacaaggaccagaucuuccuguacgcccaggccagcggcagaaucaccgugagcaccaagagaagccagcaggccgugauccccaacaucggcagcagacccagagugagaaacauccccagcagagugagcaucuacuggaccaucgugaagcccggcgacauccugcugaucaacagcaccggcaaccugaucgcccccagaggcuacuucaagaucagaagcggcaagagcagcaucaugagaagcgacgcccccaucggcaagugcaagagcgccugcaucacccccaacggcagcauccccaacgacaagcccuuccagaacgugaacagaaucaccuacggcgccugccccagauacgugaagcagaacacccugaagcuggccaccggcaugagaaacgugcccgagaagcagaccagaggcaucuucggcgccaucgccggcuucaucgagaacggcugggagggcaugguggacggcugguacggcuucagacaccagaacagcgagggcagaggccaggccgccgaccugaagagcacccaggccgccaucgaccagaucaacggcaagcugaacagacugaucggcaagaccaacgagaaguuccaccagaucgagaaggaguucagcgagguggagggcagaauccaggaccuggagaaguacguggaggacaccaagaucgaccuguggagcuacaacgccgagcugcugguggcccuggagaaccagcacaccaucgaccugaccgacagcgagaugaacaagcuguucgagaagaccaagaagcagcugagagagaacgccgaggacaugggcaacggcugcuucaagaucuaccacaagugcgacaacgccugcaucggcagcaucagaaacggcaccuacgaccacgacguguacagagacgaggcccugaacaacagauuccagaucaagggcguggagcugaagagcggcuacaaggacuggauccuguggaucagcuucgccaucagcugcuuccugcugugcguggcccugcugggcuucaucaugugggccugccagaagggcaacaucagaugcaacaucugcaucuga

SEQ ID NO: 172581 - RNA, 1701 nt, Artificial Sequence
  derived and/or modified CDS sequence (opt4) from hemagglutinin__InfluenzaA__AIJ10734
augaagaccaucaucgcccugagcuacauccugugccugguguucgcccagaagcugcccgagaacgacaacagcaccgccacccugugccugggccaccacgccgugcccaacggcaccaucgugaagaccaucaccaacgaccagaucgaggugaccaacgccaccgagcuggugcagagcagcagcaccggcgagaucugcaacagcccccaccagauccuggacggcgagaacugcacccugaucgacgcccugcugggcgacccccagugcgacggcuuccagaacaagaagugggaccuguucguggagagaagcaaggcccacagcaacugcuaccccuacgacgugcccgacuacgccagccugagaagccugguggccagcagcggcacccuggaguucaacaacgagagcuucaacuggaccggcgugacccagaacggcaccagcagcgccugcaucagaagaagcaacaacagcuucuucagcagacugaacuggcugacccaccugaacuucaaguaccccgcccugaacgugaccaugcccaacaacgagcaguucgacaagcuguacaucuggggcgugcaccaccccggcaccgacaaggaccagaucuuccuguacgcccaggccagcggcagaaucaccgugagcaccaagagaagccagcaggccgugauccccaacaucggcagcagacccagagugagaaacauccccagcagaaucagcaucuacuggaccaucgugaagcccggcgacauccugcugaucaacagcaccggcaaccugaucgcccccagaggcuacuucaagaucagaagcggcaagagcagcaucaugagaagcgacgcccccaucggcaagugcaacagcaccugcaucacccccaacggcagcauccccaacgacaagcccuuccagaacgugaacagaaucaccuacggcgccugccccagauacgugaagcagaacacccugaagcuggccaccggcaugagaaacgugcccgagaagcagaccagaggcaucuucggcgccaucgccggcuucaucgagaacggcugggagggcaugguggacggcugguacggcuucagacaccagaacagcgagggcagaggccaggccgccgaccugaagagcacccaggccgccaucgaccagaucaacggcaagcugaacagacugaucggcaagaccaacgagaaguuccaccagaucgagaaggaguucagcgagguggagggcagaauccaggaccuggagaaguacguggaggacaccaagaucgaccuguggagcuacaacgccgagcugcugguggcccuggagaaccagcacaccaucgaccugaccgacagcgagaugaacaagcuguucgagaagaccaagaagcagcugagagagaacgccgaggacaugggcaacggcugcuucaagaucuaccacaagugcgacaacgccugcaucggcagcaucagaaacggcaccuacgaccacgacguguacagagacgaggcccugaacaacagauuccagaucaagggcguggagcugaagagcggcuacaaggacuggauccuguggaucagcuucgccaucagcugcuuccugcugugcguggcccugcugggcuucaucaugugggccugccagaagggcaacaucagaugcaacaucugcaucuga

SEQ ID NO: 172582 - RNA, 1701 nt, Artificial Sequence
  derived and/or modified CDS sequence (opt4) from hemagglutinin__InfluenzaA__AIJ10735
augaagaccaucaucgcccugagcuacauccugugccugaucuucgcccagaagcugcccgagaacgacaacagcaccgccacccugugccugggccaccacgccgugcccaacggcaccaucgugaagaccaucaccaacgaccagaucgaggugaccaacgccaccgagcuggugcagagcagcagcaccggcgagaucugcaacagcccccaccagauccuggacggcgagaacugcacccugaucgacgcccugcugggcgacccccagugcgacggcuuccagaacaagaagugggaccuguucguggagagaagcaaggcccacagcaacugcuaccccuacgacgugcccgacuacgccagccugagaagccugguggccagcagcggcacccuggaguucaacaacgagagcuucaacuggaccggcgugacccagaacggcaccagcagcgccugcaucagaagaagcaacaacagcuucuucagcagacugaacuggcugacccaccugaacuucaaguaccccgcccugaacgugaccaugcccaacaacgagcaguucgacaagcuguacaucuggggcgugcaccaccccggcaccgacaaggaccagaucuuccuguacgcccaggccagcggcagaaucaccgugagcaccaagagaagccagcaggccgugauccccaacaucggcagcagacccagagugagaaacauccccagcagagugagcaucuacuggaccaucgugaagcccggcgacauccugcugaucaacagcaccggcaaccugaucgcccccagaggcuacuucaagaucagaagcggcaagagcagcaucaugagaagcgacgcccccaucggcaagugcaacagcaccugcaucacccccaacggcagcauccccaacgacaagcccuuccagaacgugaacagaaucaccuacggcgccugccccagauacgugaagcagaacacccugaagcuggccaccggcaugagaaacgugcccgagaagcagaccagaggcaucuucggcgccaucgccggcuucaucgagaacggcugggagggcaugguggacggcugguacggcuucagacaccagaacagcgagggcaagggccaggccgccgaccugaagagcacccaggccgccaucgaccagaucaacggcaagcugaacagacugaucggcaagaccaacgagaaguuccaccagaucgagaaggaguucagcgagguggagggcagaauccaggaccuggagaaguacguggaggacaccaagaucgaccuguggagcuacaacgccgagcugcugguggcccuggagaaccagcacaccaucgaccugaccgacagcgagaugaacaagcuguucgagaagaccaagaagcagcugagagagaacgccgaggacaugggcaacggcugcuucaagaucuaccacaagugcgacaacgccugcaucggcagcaucagaaacggcaccuacgaccacgacguguacagagacgaggcccugaacaacagauuccagaucaagggcguggagcugaagagcggcuacaaggacuggauccuguggaucagcuucgccaucagcugcuuccugcugugcguggcccugcugggcuucaucaugugggccugccagaagggcaacaucagaugcaacaucugcaucuga

SEQ ID NO: 172583 - RNA, 1701 nt, Artificial Sequence
  derived and/or modified CDS sequence (opt4) from hemagglutinin__InfluenzaA__AIJ10736
augaagaccaucaucgcccugagcuacauccugugccugguguucgcccagaagcugcccggcaacgacaacagcaccgccacccugugccugggccaccacgccgugcccaacggcaccaucgugaagaccaucaccaacgacagaaucgaggugaccaacgccaccgagcuggugcagaacagcaccaucggcgagaucugcgacagcccccaccagauccuggacggcgagaacugcacccugaucgacgcccugcugggcgacccccagugcgacggcuuccagaacaagaagugggaccuguucguggagagaagcaaggccuacagcaacugcuaccccuacgacgugcccgacuacgccagccugagaagccugguggccagcagcggcacccuggaguucaacaacgagagcuucaacuggaccggcgugacccagaacggcaccagcagcgccugcaucagaagaagcaacaacagcuucuucagcagacugaacuggcugacccaccugaacuucaaguaccccgcccugaacgugaccaugcccaacaacgagcaguucgacaagcuguacaucuggggcgugcaccaccccggcaccgacaaggaccagaucuuccuguacgcccagagcagcggcagaaucaccgugagcaccaagagaagccagcaggccgugauccccaacaucggcagcagacccagaaucagaaacauccccagcagaaucagcaucuacuggaccaucgugaagcccggcgacauccugcugaucaacagcaccggcaaccugaucgcccccagaggcuacuucaagaucagaagcggcaagagcagcaucaugagaagcgacgcccccaucggcaagugcaagagcgagugcaucacccccaacggcagcauccccaacgacaagcccuuccagaacgugaacagaaucaccuacggcgccugccccagauacgugaagcagagcacccugaagcuggccaccggcaugagaaacgugcccgagaagcagaccagaggcaucuucggcgccaucgccggcuucaucgagaacggcugggagggcaugguggacggcugguacggcuucagacaccagaacagcgagggcagaggccaggccgccgaccugaagagcacccaggccgccaucgaccagaucaacggcaagcugaacagacugaucggcaagaccaacgagaaguuccaccagaucgagaaggaguucagcgagguggagggcagaauccaggaccuggagaaguacguggaggacaccaagaucgaccuguggagcuacaacgccgagcugcugguggcccuggagaaccagcacaccaucgaccugaccgacagcgagaugaacaagcuguucgagaagaccaagaagcagcugagagagaacgccgaggacaugggcaacggcugcuucaagaucuaccacaagugcgacaacgccugcaucggcagcaucagaaacggcaccuacgaccacgacguguacagagacgaggcccugaacaacagauuccagaucaagggcguggagcugaagagcggcuacaaggacuggauccuguggaucagcuucgccaucagcugcuuccugcugugcguggcccugcugggcuucaucaugugggccugccagaagggcaacaucagaugcaacaucugcaucuga

SEQ ID NO: 172584 - RNA, 1701 nt, Artificial Sequence
  derived and/or modified CDS sequence (opt4) from hemagglutinin__InfluenzaA__AIJ10737
augaagaccaucaucgcccugagcuacauccugugccuggugguggcccagaagcugcccggcaacgacaacagcaccgccacccugugccugggccaccacgccgugcccaacggcaccaucgugaagaccaucaccaacgacagaaucgaggugaccaacgccaccgagcuggugcagaacagcagcaucggcgagaucugcgacagcccccaccagauccuggacggcgagaacugcacccugaucgacgcccugcugggcgacccccagugcgacggcuuccagaacaagaagugggaccuguucguggagagaagcaaggccuacagcaacugcuaccccuacgacgugcccgacuacgccagccugagaagccugguggccagcagcggcacccuggaguucaacaacgagagcuucaacuggaccggcgugacccagaacggcaccagcagcgccugcaucagaagaagcaacaacagcuucuucagcagacugaacuggcugacccaccugaacuucaaguaccccgcccugaacgugaccaugcccaacaacgagcaguucgacaagcuguacaucuggggcgugcaccaccccggcaccgacaaggaccagaucuuccuguacgcccagagcagcggcagaaucaccgugagcaccaagagaagccagcaggccgugauccccaacaucggcagcagacccagaaucagaaacauccccagcagaaucagcaucuacuggaccaucgugaagcccggcgacauccugcugaucaacagcaccggcaaccugaucgcccccagaggcuacuucaagaucagaagcggcaagagcagcaucaugagaagcgacgcccccaucggcaagugcaagagcgagugcaucacccccaacggcagcauccccaacgacaagcccuuccagaacgugaacagaaucaccuacggcgccugccccagauacgugaagcagagcacccugaagcuggccaccggcaugagaaacgugcccgagaagcagaccagaggcaucuucggcgccaucgccggcuucaucgagaacggcugggagggcaugguggacggcugguacggcuucagacaccagaacagcgagggcagaggccaggccgccgaccugaagagcacccaggccgccaucgaccagaucaacggcaagcugaacagacugaucggcaagaccaacgagaaguuccaccagaucgagaaggaguucagcgagguggagggcagaauccaggaccuggagaaguacguggaggacaccaagaucgaccuguggagcuacaacgccgagcugcugguggcccuggagaaccagcacaccaucgaccugaccgacagcgagaugaacaagcuguucgagaagaccaagaagcagcugagagagaacgccgaggacaugggcaacggcugcuucaagaucuaccacaagugcgacaacgccugcaucggcagcaucagaaacggcaccuacgaccacgacguguacagagacgaggcccugaacaacagauuccagaucaagggcguggagcugaagagcggcuacaaggacuggauccuguggaucagcuucgccaucagcugcuuccugcugugcguggcccugcugggcuucaucaugugggccugccagaagggcaacaucagaugcaacaucugcaucuga

SEQ ID NO: 172585 - RNA, 1701 nt, Artificial Sequence
  derived and/or modified CDS sequence (opt4) from hemagglutinin__InfluenzaA__AIJ10738
augaagaccaucaucgcccugagcuacauccugugccugguguucgcccagaagcugcccggcaacgacaacagcaccgccacccugugccugggccaccacgccgugcccaacggcaccaucgugaagaccaucaccaacgacagaaucgaggugaccaacgccaccgagcuggugcagaacagcagcaucggcgagaucugcgacagcccccaccagauccuggacggcgagaacugcacccugaucgacgcccugcugggcgacccccagugcgacggcuuccagaacaagaagugggaccuguucguggagagaagcaaggccuacagcaacugcuaccccuacgacgugcccgacuacgccagccugagaagccugguggccagcagcggcacccuggaguucaacaacgagagcuucaacuggaccggcgugacccagaacggcaccagcagcgccugcaucagaagaagcaacaacagcuucuucagcagacugaacuggcugacccaccugaacuucaaguaccccgcccugaacgugaccaugcccaacaacgagcacuucgacaagcuguacaucuggggcgugcaccaccccggcaccgacaaggaccagaucuuccuguacgcccagagcagcggcagaaucaccgugagcaccaagagaagccagcaggccgugauccccaacaucggcagcagacccagaaucagaaacauccccagcagaaucagcaucuacuggaccaucgugaagcccggcgacauccugcugaucaacagcaccggcaaccugaucgcccccagaggcuacuucaagaucagaagcggcaagagcagcaucaugagaagcgacgcccccaucggcaagugcaagagcgagugcaucacccccaacggcagcauccccaacgacaagcccuuccagaacgugaacagaaucaccuacggcgccugccccagauacgugaagcagagcacccugaagcuggccaccggcaugagaaacgugcccgagaagcagaccagaggcaucuucggcgccaucgccggcuucaucgagaacggcugggagggcaugguggacggcugguacggcuucagacaccagaacagcgagggcagaggccaggccgccgaccugaagagcacccaggccgccaucgaccagaucaacggcaagcugaacagacugaucggcaagaccaacgagaaguuccaccagaucgagaaggaguucagcgagguggagggcagaauccaggaccuggagaaguacguggaggacaccaagaucgaccuguggagcuacaacgccgagcugcugguggcccuggagaaccagcacaccaucgaccugaccgacagcgagaugaacaagcuguucgagaagaccaagaagcagcugagagagaacgccgaggacaugggcaacggcugcuucaagaucuaccacaagugcgacaacgccugcaucggcagcaucagaaacggcaccuacgaccacgacguguacagagacgaggcccugaacaacagauuccagaucaagggcguggagcugaagagcggcuacaaggacuggauccuguggaucagcuucgccaucagcugcuuccugcugugcguggcccugcugggcuucaucaugugggccugccagaagggcaacaucagaugcaacaucugcaucuga

SEQ ID NO: 172586 - RNA, 1701 nt, Artificial Sequence; identical to SEQ ID NO: 169513
  derived and/or modified CDS sequence (opt4) from hemagglutinin__InfluenzaA__AIJ10740

SEQ ID NO: 172587 - RNA, 1701 nt, Artificial Sequence; identical to SEQ ID NO: 169513
  derived and/or modified CDS sequence (opt4) from hemagglutinin__InfluenzaA__AIJ10741

SEQ ID NO: 172588 - RNA, 1701 nt, Artificial Sequence
  derived and/or modified CDS sequence (opt4) from hemagglutinin__InfluenzaA__AIJ10742
augaagaccaucaucgcccugagcuacauccugugccugguguucgcccagaagcugcccggcaacgacaacagcaccgccacccugugccugggccaccacgccgugcccaacggcaccaucgugaagaccaucaccaacgacagaaucgaggugaccaacgccaccgagcuggugcagaacagcagcaucggcgagaucugcgacagcccccaccagauccuggacggcgagaacugcacccugaucgacgcccugcugggcgacccccagugcgacggcuuccagaacaagaagugggaccuguucguggagagaagcaaggccuacagcaacugcuaccccuacgacgugcccgacuacgccagccugagaagccugguggccagcagcggcacccuggaguucaacaacgagagcuucaacuggaccggcgugacccagaacggcaccagcagcgccugcaucagaagaagcaacaacagcuucuucagcagacugaacuggcugacccaccugaacuucaaguaccccgcccugaacgugaccaugcccaacaacgagcaguucgacaagcuguacaucuggggcgugcaccaccccggcaccgacaaggaccagaucuuccuguacgcccagagcagcggcagaaucaccguggccaccaagagaagccagcaggccgugauccccaacaucggcagcagacccagaaucagaaacauccccagcagaaucagcaucuacuggaccaucgugaagcccggcgacauccugcugaucaacagcaccggcaaccugaucgcccccagaggcuacuucaagaucagaagcggcaagagcagcaucaugagaagcgacgcccccaucggcaagugcaagagcgagugcaucacccccaacggcagcauccccaacgacaagcccuuccagaacgugaacagaaucaccuacggcgccugccccagauacgugaagcagagcacccugaagcuggccaccggcaugagaaacgugcccgagaagcagaccagaggcaucuucggcgccaucgccggcuucaucgagaacggcugggagggcaugguggacggcugguacggcuucagacaccagaacagcgagggcagaggccaggccgccgaccugaagagcacccaggccgccaucgaccagaucaacggcaagcugaacagacugaucggcaagaccaacgagaaguuccaccagaucgagaaggaguucagcgagguggagggcagaauccaggaccuggagaaguacguggaggacaccaagaucgaccuguggagcuacaacgccgagcugcugguggcccuggagaaccagcacaccaucgaccugaccgacagcgagaugaacaagcuguucgagaagaccaagaagcagcugagagagaacgccgaggacaugggcaacggcugcuucaagaucuaccacaagugcgacaacgccugcaucggcagcaucagaaacggcaccuacgaccacgacguguacagagacgaggcccugaacaacagauuccagaucaagggcguggagcugaagagcggcuacaaggacuggauccuguggaucagcuucgccaucagcugcuuccugcugugcguggcccugcugggcuucaucaugugggccugccagaagggcaacaucagaugcaacaucugcaucuga

SEQ ID NO: 172589 - RNA, 1701 nt, Artificial Sequence
  derived and/or modified CDS sequence (opt4) from hemagglutinin__InfluenzaA__AIJ10743
augaagaccaucaucgcccugagcuacauccugugccugguguucgcccagaagcugcccggcaacgacaacagcaccgccacccugugccugggccaccacgccgugcccaacggcaccaucgugaagaccaucaccaacgacagaaucgaggugaccaacgccaccgagcuggugcagaacagcagcaucggcgagaucugcgacagcccccaccagauccuggacggcgagaacugcacccugaucgacgcccugcugggcgacccccagugcgacggcuuccagaacaagaagugggaccuguucguggagagaagcaaggccuacagcaacugcuaccccuacgacgugcccgacuacgccagccugagaagccugguggccagcagcggcacccuggaguucaacaacgagagcuucaacuggaccggcgugacccagaacggcaccagcagcgccugcaucagaagaagcaacaacagcuucuucagcagacugaacuggcugacccaccugaacuucaaguaccccgcccugaacgugaccaugcccaacaacgagcaguucgacaagcuguacaucuggggcgugcaccaccccggcaccgacaaggaccagaucuuccuguacgcccagagcagcggcagaaucaccgugagcaccaagagaagccagcaggccgugauccccaacaucggcagcagacccagaaucagaaacauccccagcagaaucagcaucuacuggaccaucgugaagcccggcgacauccugcugaucaacagcaccggcaaccugaucgcccccagaggcuacuucaagaucagaagcggcaagagcagcaucaugagaagcgacgcccccaucggcaagugcaagagcgagugcaucacccccaacggcagcauccccaacgacaagcccuuccagaacgugaacagaaucaccuacggcgccugccccagauacgugaagcagagcacccugaagcuggccaccggcaugagaaacgugcccgagaagcagaccagaggcaucuucggcgccaucgccggcuucaucgagaacggcugggagggcaugguggacggcugguacggcuucagacaccagaacagcgagggcagaggccaggccgccgaccugaagagcacccaggccgccaucgaccagaucaacggcaagcugaacagacugaucggcaagaccaacgagaaguuccaccagaucgagaaggaguucagcgagguggagggcagaauccaggaccuggagaaguacguggaggacaucaagaucgaccuguggagcuacaacgccgagcugcugguggcccuggagaaccagcacaccaucgaccugaccgacagcgagaugaacaagcuguucgagaagaccaagaagcagcugagagagaacgccgaggacaugggcaacggcugcuucaagaucuaccacaagugcgacaacgccugcaucggcagcaucagaaacggcaccuacgaccacgacguguacagagacgaggcccugaacaacagauuccagaucaagggcguggagcugaagagcggcuacaaggacuggauccuguggaucagcuucgccaucagcugcuuccugcugugcguggcccugcugggcuucaucaugugggccugccagaagggcaacaucagaugcaacaucugcaucuga

SEQ ID NO: 172590 - RNA, 1701 nt, Artificial Sequence
  derived and/or modified CDS sequence (opt4) from hemagglutinin__InfluenzaA__AIJ10744
augaagaccaucaucgcccugagcuacauccugugccugguguucgcccagaagcugcccggcaacgacaacagcaccgccacccugugccugggccaccacgccgugcccaacggcaccaucgugaagaccaucaccaacgacagaaucgaggugaccaacgccaccgagcuggugcagaacagcagcaucggcgagaucugcgacagcccccaccagauccuggacggcgagaacugcacccugaucgacgcccugcugggcgacccccagugcgacggcuuccagaacaagaagugggaccuguucguggagagaagcaaggccuacagcaacugcuaccccuacgacgugcccgacuacgccagccugagaagccugguggccagcagcggcacccuggaguucaacaacgagagcuucaacuggaccggcgugacccagaacggcaccagcagcgccugcaucagaagaagcaacaacagcuucuucagcagacugaacuggcugacccaccugaacuucaaguaccccgcccugaacgugaccaugcccaacaacgagcaguucgacaagcuguacaucuggggcgugcaccaccccggcaccgacaaggaccagaucuuccuguacgcccagagcagcggcagaaucaccgugagcaccaagagaagccagcaggccgugauccccaacaucggcagcagacccagaaucagaaacauccccagcagaaucagcaucuacuggaccaucgugaagcccggcgacauccugcugaucaacagcaccggcaaccugaucgcccccagaggcuacuucaagaucagaagcggcaagagcagcaucaugagaagcgacgcccccaucggcaagugcaagagcgagugcaucacccccaacggcagcauccccaacgacaagcccuuccagaacgugaacagaaucaccuacggcgccugccccagauacgugaagcagagaacccugaagcuggccaccggcaugagaaacgugcccgagaagcagaccagaggcaucuucggcgccaucgccggcuucaucgagaacggcugggagggcaugguggacggcugguacggcuucagacaccagaacagcgagggcagaggccaggccgccgaccugaagagcacccaggccgccaucgaccagaucaacggcaagcugaacagacugaucggcaagaccaacgagaaguuccaccagaucgagaaggaguucagcgagguggagggcagaauccaggaccuggagaaguacguggaggacaccaagaucgaccuguggagcuacaacgccgagcugcugguggcccuggagaaccagcacaccaucgaccugaccgacagcgagaugaacaagcuguucgagaagaccaagaagcagcugagagagaacgccgaggacaugggcaacggcugcuucaagaucuaccacaagugcgacaacgccugcaucggcagcaucagaaacggcaccuacgaccacgacguguacagagacgaggcccugaacaacagauuccagaucaagggcguggagcugaagagcggcuacaaggacuggauccuguggaucagcuucgccaucagcugcuuccugcugugcguggcccugcugggcuucaucaugugggccugccagaagggcaacaucagaugcaacaucugcaucuga

SEQ ID NO: 172591 - RNA, 1701 nt, Artificial Sequence; identical to SEQ ID NO: 170054
  derived and/or modified CDS sequence (opt4) from hemagglutinin__InfluenzaA__AIJ10745

SEQ ID NO: 172592 - RNA, 1701 nt, Artificial Sequence
  derived and/or modified CDS sequence (opt4) from hemagglutinin__InfluenzaA__AIJ10747
augaagaccaucaucgcccugagcuacauccugugccugguguucgcccagaagcugcccggcaacgacaacagcaccgccacccugugccugggccaccacgccgugcccaacggcaccaucgugaagaccaucaccaacgacagaaucgaggugaccaacgccaccgagcuggugcagaacagcagcaucggcgagaucugcgacagcccccaccagauccuggacggcgagaacugcacccugaucgacgcccugcugggcgacccccagugcgacgacuuccagaacaagaagugggaccuguucguggagagaagcaaggccuacagcaacugcuaccccuacgacgugcccgacuacgccagccugagaagccugguggccagcagcggcacccuggaguucaacaacgagaacuucaacuggaccggcgugacccagaacggcaccagcagcgccugcaucagaagaagcaacaacagcuucuucagcagacugaacuggcugacccaccugaacuucaaguaccccgcccugaacgugaccaugcccaacaacgagcaguucgacaagcuguacaucuggggcgugcaccaccccggcaccgacaaggaccagaucuuccuguacgcccagagcagcggcagaaucaccgugagcaccaagagaagccagcaggccgugauccccaacaucggcagcagacccagaaucagaaacauccccagcagaaucagcaucuacuggaccaucgugaagcccggcgacauccugcugaucaacagcaccggcaaccugaucgcccccagaggcuacuucaagaucagaagcggcaagagcagcaucaugagaagcgacgcccccaucggcaagugcaagagcgagugcaucacccccaacggcagcauccccaacgacaagcccuuccagaacgugaacagaaucaccuacggcgccugccccagauacgugaagcagagcacccugaagcuggccaccggcaugagaaacgugcccgagaagcagaccagaggcaucuucggcgccaucgccggcuucaucgagaacggcugggagggcaugguggacggcugguacggcuucagacaccagaacagcgagggcagaggccaggccgccgaccugaagagcacccaggccgccaucgaccagaucaacggcaagcugaacagacugaucggcaagaccaacgagaaguuccaccagaucgagaaggaguucagcgagguggagggcagaauccaggaccuggagaaguacguggaggacaccaagaucgaccuguggagcuacaacgccgagcugcugguggcccuggagaaccagcacaccaucgaccugaccgacagcgagaugaacaagcuguucgagaagaccaagaagcagcugagagagaacgccgaggacaugggcaacggcugcuucaagaucuaccacaagugcgacaacgccugcaucggcagcaucagaaacggcaccuacgaccacgacguguacagagacgaggcccugaacaacagauuccagaucaagggcguggagcugaagagcggcuacaaggacuggauccuguggaucagcuucgccaucagcugcuuccugcugugcguggcccugcugggcuucaucaugugggccugccagaagggcaacaucagaugcaacaucugcaucuga

SEQ ID NO: 172593 - RNA, 1701 nt, Artificial Sequence; identical to SEQ ID NO: 172592
  derived and/or modified CDS sequence (opt4) from hemagglutinin__InfluenzaA__AIJ10748

SEQ ID NO: 172594 - RNA, 1701 nt, Artificial Sequence
  derived and/or modified CDS sequence (opt4) from hemagglutinin__InfluenzaA__AIJ10750
augaagaccaucaucgcccugagcuacauccugugccugguguucgcccagaagcugcccggcaacgacaacagcaccgccacccugugccugggccaccacgccgugcccaacggcaccaucgugaagaccaucaccaacgacagaaucgaggugaccaacgccaccgagcuggugcagaacagcagcaucggcgagaucugcgacagcccccaccagauccuggacggcgagaacugcacccugaucgacgcccugcugggcgacccccagugcgacggcuuccagaacaagaagugggaccuguucguggagagaagcaaggccuacagcaacugcuaccccuacgacgugcccgacuacgccagccugagaagccugguggccagcagcggcacccuggaguucaacaacgagagcuucaacuggaccggcgugacccagaacggcaccagcagcgccugcaucagaagaagcaacagcagcuucuucagcagacugaacuggcugacccaccugaacuucaaguaccccgcccugaacgugaccaugcccaacaacgagcaguucgacaagcuguacaucuggggcgugcaccaccccggcaccgacaaggaccagaucuuccuguacgcccagagcagcggcagaaucaccgugagcaccaagagaagccagcaggccgugauccccaacaucggcagcagacccagaaucagaaacauccccagcagaaucagcaucuacuggaccaucgugaagcccggcgacauccugcugaucaacagcaccggcaaccugaucgcccccagaggcuacuucaagaucagaagcggcaagagcagcaucaucagaagcgacgcccccaucggcaagugcaagagcgagugcaucacccccaacggcagcauccccaacgacaagcccuuccagaacgugaacagaaucaccuacggcgccugccccagauacgugaagcagagcacccugaagcuggccaccggcaugagaaacgugcccgagaagcagaccagaggcaucuucggcgccaucgccggcuucaucgagaacggcugggagggcaugguggacggcugguacggcuucagacaccagaacagcgagggcagaggccaggccgccgaccugaagagcacccaggccgccaucgaccagaucaacggcaagcugaacagacugaucggcaagaccaacgagaaguuccaccagaucgagaaggaguucagcgagguggagggcagaauccaggaccuggagaaguacguggaggacaccaagaucgaccuguggagcuacaacgccgagcugcugguggcccuggagaaccagcacaccaucgaccugaccgacagcgagaugaacaagcuguucgagaagaccaagaagcagcugagagagaacgccgaggacaugggcaacggcugcuucaagaucuaccacaagugcgacaacgccugcaucggcagcaucagaaacggcaccuacgaccacaacguguacagagacgaggcccugaacaacagauuccagaucaagggcguggagcugaagagcggcuacaaggacuggauccuguggaucagcuucgccaucagcugcuuccugcugugcguggcccugcugggcuucaucaugugggccugccagaagggcaacaucagaugcaacaucugcaucuga

SEQ ID NO: 172595 - RNA, 1701 nt, Artificial Sequence
  derived and/or modified CDS sequence (opt4) from hemagglutinin__InfluenzaA__AIJ10752
augaagaccaucaucgcccugagcuacauccugugccugguguucgcccagaagcugcccggcaacgacaacagcaccgccacccugugccugggccaccacgccgugcccaacggcaccaucgugaagaccaucaccaacgacagaaucgaggugaccaacgccaccgagcuggugcagaacagcagcaucggcgagaucugcgacagcccccaccagauccuggacggcgagaacugcacccugaucgacgcccugcugggcgacccccagugcgacggcuuccagaacaagaagugggaccuguucguggagagaagcaaggccuacagcaacugcuaccccuacgacgugcccgacuacgccagccugagaagccugguggccagcagcggcacccuggaguucaacaacgagagcuucaacuggaccggcgugacccagaacggcaccagcagcgccugcaucagaagaagcaacagcagcuucuucagcagacugaacuggcugacccaccugaacuucaaguaccccgcccugaacgugaccaugcccaacaacgagcaguucgacaagcuguacaucuggggcgugcaccaccccggcaccgacaaggaccagaucuuccuguacgcccagagcagcggcagaaucaccgugagcaccaagagaagccagcaggccgugauccccaacaucggcagcagacccagaaucagaaacauccccagcagaaucagcaucuacuggaccaucgugaagcccggcgacauccugcugaucaacagcaccggcaaccugaucgcccccagaggcuacuucaagaucagaagcggcaagagcagcaucaugagaagcgacgcccccaucggcaagugcaagagcgagugcaucacccccaacggcagcauccccaacgacaagcccuuccagaacgugaacagaaucaccuacggcgccugccccagauacgugaagcagagcacccugaagcuggccaccggcaugagaaacgugcccgagaagcagaccagaggcaucuucggcgccaucgccggcuucaucgagaacggcugggagggcaugguggacggcugguacggcuucagacaccagaacagcgagggcagaggccaggccgccgaccugaagagcacccaggccgccaucgaccagaucaacggcaagcugaacagacugaucggcaagaccaacgagaaguuccaccagaucgagaaggaguucagcgagguggagggcagaauccaggaccuggagaaguacguggaggacaccaagaucgaccuguggagcuacaacgccgagcugcugguggcccuggagaaccagcacaccaucgaccugaccgacagcgagaugaacaagcuguucgagaagaccaagaagcagcugagagagaacgccgaggacaugggcaacggcugcuucaagaucuaccacaagugcgacaacgccugcaucggcagcaucagaaacggcaccuacgaccacgacguguacagagacgaggcccugaacaacagauuccagaucaagggcguggagcugaagagcggcuacaaggacuggauccuguggaucagcuucgccaugagcugcuuccugcugugcguggcccugcugggcuucaucaugugggccugccagaagggcaacaucagaugcaacaucugcaucuga

SEQ ID NO: 172596 - RNA, 1701 nt, Artificial Sequence
  derived and/or modified CDS sequence (opt4) from hemagglutinin__InfluenzaA__AIJ10753
augaagaccaucaucgcccugagcuacauccugugccugguguucgcccagaagcugcccggcaacgacaacagcaccgccacccugugccugggccaccacgccgugcccaacggcaccaucgugaagaccaucaccaacgacagaaucgaggugaccaacgccaccgagcuggugcagaacagcagcaucggcgagaucugcgacagcccccaccagauccuggacggcgagaacugcacccugaucgacgcccugcugggcgacccccagugcgacggcuuccagaacaagaagugggaccuguucguggagagaagcaaggccuacagcaacugcuaccccuacgacgugcccgacuacgccagccugagaagccugguggccagcagcggcacccuggaguucaacaacgagagcuucaacugggccggcgugacccagaacggcaccagcagcagcugcaucagaggcagcaacaacagcuucuucagcagacugaacuggcugacccaccugaacuucaaguaccccgcccugaacgugaccaugcccaacaacgagcaguucgacaagcuguacaucuggggcgugcaccaccccggcaccgacaaggaccagaucuuccuguacgcccagagcagcggcagaaucaccgugagcaccaagagaagccagcaggccgugauccccaacaucggcagcagacccagaaucagaaacauccccagcagaaucagcaucuacuggaccaucgugaagcccggcgacauccugcugaucaacagcaccggcaaccugaucgcccccagaggcuacuucaagaucagaagcggcaagagcagcaucaugagaagcgacgcccccaucggcaagugcaagagcgagugcaucacccccaacggcagcauccccaacgacaagcccuuccagaacgugaacagaaucaccuacggcgccugccccagauacgugaagcagagcacccugaagcuggccaccggcaugagaaacgugcccgagaagcagaccagaggcaucuucggcgccaucgccggcuucaucgagaacggcugggagggcaugauggacggcugguacggcuucagacaccagaacagcgagggcagaggccaggccgccgaccugaagagcacccaggccgccaucgaccagaucaacggcaagcugaacagacugaucggcaagaccaacgagaaguuccaccagaucgagaaggaguucagcgagguggagggcagaauccaggaccuggagaaguacguggaggacaccaagaucgaccuguggagcuacaacgccgagcugcugguggcccuggagaaccagcacaccaucgaccugaccgacagcgagaugaacaagcuguucgagaagaccaagaagcagcugagagagaacgccgaggacaugggcaacggcugcuucaagaucuaccacaagugcgacaacgccugcaucggcagcaucagaaacggcaccuacgaccacgacguguacagagacgaggcccugaacaacagauuccagaucaagggcguggagcugaagagcggcuacaaggacuggauccuguggaucagcuucgccaucagcugcuuccugcugugcguggcccugcugggcuucaucaugugggccugccagaagggcaacaucagaugcaacaucugcaucuga

SEQ ID NO: 172597 - RNA, 1701 nt, Artificial Sequence; identical to SEQ ID NO: 170054
  derived and/or modified CDS sequence (opt4) from hemagglutinin__InfluenzaA__AIJ10754

SEQ ID NO: 172598 - RNA, 1701 nt, Artificial Sequence
  derived and/or modified CDS sequence (opt4) from hemagglutinin__InfluenzaA__AIJ10755
augaagaccaucaucgcccugagcuacauccugugccugguguucgcccagaagcugcccggcaacgacaacagcaccgccacccugugccugggccaccacgccgugcccaacggcaccaucgugaagaccaucaccaacgacagaaucgaggugaccaacgccaccgagcuggugcagaacagcagcaucggcgagaucugcgacagcccccaccagauccuggacggcgagaacugcacccugaucgacgcccugcugggcgacccccagugcgacggcuuccagaacaagaagugggaccuguucguggagagaagcaaggccuacagcaacugcuaccccuacgacgugcccgacuacgccagccugagaagccugguggccagcagcggcacccuggaguucaacaacgagagcuucaacugggccggcgugacccagaacggcaccagcagcgccugcaucagaggcagcaacagcagcuucuucagcagacugaacuggcugacccaccugaacuucaaguaccccgcccugaacgugaccaugcccaacaacgagcaguucgacaagcuguacaucuggggcgugcaccaccccggcaccgacaaggaccagaucuuccuguacgcccagagcagcggcagaaucaccgugagcaccaagagaagccagcaggccgugauccccaacaucggcagcagacccagaaucagaaacauccccagcagaaucagcaucuacuggaccaucgugaagcccggcgacauccugcugaucaacagcaccggcaaccugaucgcccccagaggcuacuucaagaucagaagcggcaagagcagcaucaugagaagcgacgcccccaucggcaagugcaagagcgagugcaucacccccaacggcagcauccccaacgacaagcccuuccagaacgugaacagaaucaccuacggcgccugccccagauacgugaagcagagcacccugaagcuggccaccggcaugagaaacgugcccgagaagcagaccagaggcaucuucggcgccaucgccggcuucaucgagaacggcugggagggcaugguggacggcugguacggcuucagacaccagaacagcgagggcagaggccaggccgccgaccugaagagcacccagagcgccaucgaccagaucaacggcaagcugaacagacugaucggcaagaccaacgagaaguuccaccagaucgagaaggaguucagcgagguggagggcagaauccaggaccuggagaaguacguggaggacaccaagaucgaccuguggagcuacaacgccgagcugcugguggcccuggagaaccagcacaccaucgaccugaccgacagcgagaugaacaagcuguucgagaagaccaagaagcagcugagagagaacgccgaggacaugggcaacggcugcuucaagaucuaccacaagugcgacaacgccugcaucggcagcaucagaaacggcaccuacgaccacgacguguacagagacgaggcccugaacaacagauuccagaucaagggcguggagcugaagagcggcuacaaggacuggauccuguggaucagcuucgccaucagcugcuuccugcugugcguggcccugcugggcuucaucaugugggccugccagaagggcaacaucagaugcaacaucugcaucuga

SEQ ID NO: 172599 - RNA, 1701 nt, Artificial Sequence; identical to SEQ ID NO: 170054
  derived and/or modified CDS sequence (opt4) from hemagglutinin__InfluenzaA__AIJ10756

SEQ ID NO: 172600 - RNA, 1701 nt, Artificial Sequence
  derived and/or modified CDS sequence (opt4) from hemagglutinin__InfluenzaA__AIJ10757
augaagaccaucaucgcccugagcuacauccugugccuggugaucgcccagaagcugcccggcaacgacaacagcaccgccacccugugccugggccaccacgccgugcccaacggcaccaucgugaagaccaucaccaacgacagaaucgaggugaccaacgccaccgagcuggugcagaacagcagcaucggcgagaucugcgacagcccccaccagauccuggacggcgagaacugcacccugaucgacgcccugcugggcgacccccagugcgacggcuuccagaacaagaagugggaccuguucguggagagaagcaaggccuacagcaacugcuaccccuacgacgugcccgacuacgccagccugagaagccugguggccagcagcggcacccuggaguucaacaacgagagcuucaacugggccggcgugacccagaacggcaccagcagcgccugcaucagaggcagcaacagcagcuucuucagcagacugaacuggcugacccaccugaacuucaaguaccccgcccugaacgugaccaugcccaacaacgagcaguucgacaagcuguacaucuggggcgugcaccaccccggcaccgacaaggaccagaucuuccuguacgcccagagcagcggcagaaucaccgugagcaccaagagaagccagcaggccgugauccccaacaucggcagcagacccagaaucagaaacauccccagcagaaucagcaucuacuggaccaucgugaagcccggcgacauccugcugaucaacagcaccggcaaccugaucgcccccagaggcuacuucaagaucagaagcggcaagagcagcaucaugagaagcgacgcccccaucggcaagugcaagagcgagugcaucacccccaacggcagcauccccaacgacaagcccuuccagaacgugaacagaaucaccuacggcgccugccccagauacgugaagcagagcacccugaagcuggccaccggcaugagaaacgugcccgagaagcagaccagaggcaucuucggcgccaucgccggcuucaucgagaacggcugggagggcaugguggacggcugguacggcuucagacaccagaacagcgagggcagaggccaggccgccgaccugaagagcacccaggccgccaucgaccagaucaacggcaagcugaacagacugaucggcaagaccaacgagaaguuccaccagaucgagaaggaguucagcgagguggagggcagaauccaggaccuggagaaguacguggaggacaccaagaucgaccuguggagcuacaacgccgagcugcugguggcccuggagaaccagcacaccaucgaccugaccgacagcgagaugaacaagcuguucgagaagaccaagaagcagcugagagagaacgccgaggacaugggcaacggcugcuucaagaucuaccacaagugcgacaacgccugcaucggcagcaucagaaacggcaccuacgaccacgacguguacagagacgaggcccugaacaacagauuccagaucaagggcguggagcugaagagcggcuacaaggacuggauccuguggaucagcuucgccaucagcugcuuccugcugugcguggugcugcugggcuucaucaugugggccugccagaagggcaacaucagaugcaacaucugcaucuga

SEQ ID NO: 172601 - RNA, 1701 nt, Artificial Sequence
  derived and/or modified CDS sequence (opt4) from hemagglutinin__InfluenzaA__AIJ10758
augaagaccaucaucgcccugagcuacauccugugccugguguucgcccagaagcugcccggcaacgacaacagcaccgccacccugugccugggccaccacgccgugcccaacggcaccaucgugaagaccaucaccaacgacagaaucgaggugaccaacgccaccgagcuggugcagaacagcagcaucggcgagaucugcgacagcccccaccagauccuggacggcgagaacugcacccugaucgacgcccugcugggcgacccccagugcgacggcuuccagaacaagaagugggaccuguucguggagagaagcaaggccuacagcaacugcuaccccuacgacgugcccgacuacgccagccugagaagccugguggccagcagcggcacccuggaguucaacaacgagagcuucaacugggccggcgugacccagaacggcaccagcagcgccugcaucagaggcagcaacagcagcuucuucagcagacugaacuggcugacccacagcaacuucaaguaccccgcccugaacgugaccaugcccaacaacgagcaguucgacaagcuguacaucuggggcgugcaccaccccggcaccgacaaggaccagaucuuccuguacgcccagagcagcggcagaaucaccgugagcaccaagagaagccagcaggccgugauccccaacaucggcagcagacccagaaucagaaacauccccagcagaaucagcaucuacuggaccaucgugaagcccggcgacauccugcugaucaacagcaccggcaaccugaucgcccccagaggcuacuucaagaucagaagcggcaagagcagcaucaugagaagcgacgcccccaucggcaagugcaagagcgagugcaucacccccaacggcagcauccccaacgacaagcccuuccagaacgugaacagaaucaccuacggcgccugccccagauacgugaagcagagcacccugaagcuggccaccggcaugagaaacgugcccgagaagcagaccagaggcaucuucggcgccaucgccggcuucaucgagaacggcugggagggcaugauggacggcugguacggcuucagacaccagaacagcgagggcagaggccaggccgccgaccugaagagcacccaggccgccaucgaccagaucaacggcaagcugaacagacugaucggcaagaccaacgagaaguuccaccagaucgagaaggaguucagcgagguggagggcagaauccaggaccuggagaaguacguggaggacaccaagaucgaccuguggagcuacaacgccgagcugcugguggcccuggagaaccagcacaccaucgaccugaccgacagcgagaugaacaagcuguucgagaagaccaagaagcagcugagagagaacgccgaggacaugggcaacggcugcuucaagaucuaccacaagugcgacaacgccugcaucggcagcaucagaaacggcaccuacgaccacgacguguacagagacgaggcccugaacaacagauuccagaucaagggcguggagcugaagagcggcuacaaggacuggauccuguggaucagcuucgccaucagcugcuuccugcugugcguggcccugcugggcuucaucaugugggccugccagaagggcaacaucagaugcaacaucugcaucuga

SEQ ID NO: 172602 - RNA, 1701 nt, Artificial Sequence; identical to SEQ ID NO: 170054
  derived and/or modified CDS sequence (opt4) from hemagglutinin__InfluenzaA__AIJ10759

SEQ ID NO: 172603 - RNA, 1701 nt, Artificial Sequence
  derived and/or modified CDS sequence (opt4) from hemagglutinin__InfluenzaA__AIJ10760
augaagaccaucaucgcccugagcuacauccugugccuggugaucgcccagaagcugcccggcaacgacaacagcaccgccacccugugccugggccaccacgccgugcccaacggcaccaucgugaagaccaucaccaacgacagaaucgaggugaccaacgccaccgagcuggugcagaacagcagcaucggcgagaucugcgacagcccccaccagauccuggacggcgagaacugcacccugaucgacgcccugcugggcgacccccagugcgacggcuuccagaacaagaagugggaccuguucguggagagaagcaaggccuacagcaacugcuaccccuacgacgugcccgacuacgccagccugagaagccugguggccagcagcggcacccuggaguucaacaacgagagcuucaacugggccggcgugacccagaacggcaccagcagcgccugcaucagaggcagcaacagcagcuucuucagcagacugaacuggcugacccaccugaacuucaaguaccccgcccugaacgugaccaugcccaacaacgagcaguucgacaagcuguacaucuggggcgugcaccaccccggcaccgacaaggaccagaucuuccuguacgcccagagcagcggcagaaucaccgugagcaccaagagaagccagcaggccgugauccccaacaucggcagcagacccagaaucagaaacauccccagcagaaucagcaucuacuggaccaucgugaagcccggcgacauccugcugaucaacagcaccggcaaccugaucgcccccagaggcuacuucaagaucagaagcggcaagagcagcaucaugagaagcgacgcccccaucggcaagugcaagagcgagugcaucacccccaacggcagcauccccaacgacaagcccuuccagaacgugaacagaaucaccuacggcgccugccccagauacgugaagcagagcacccugaagcuggccaccggcaugagaaacgugcccgagaagcagaccagaggcaucuucggcgccaucgccggcuucaucgagaacggcugggagggcaugguggacggcugguacggcuucagacaccagaacagcgagggcagaggccaggccgccgaccugaagagcacccaggccgccaucgaccagaucaacggcaagcugaacagacugaucggcaagaccaacgagaaguuccaccagaucgagaaggaguucagcgagguggagggcagaauccaggaccuggagaaguacguggaggacaccaagaucgaccuguggagcuacaacgccgagcugcugguggcccuggagaaccagcacaccaucgaccugaccgacagcgagaugaacaagcuguucgagaagaccaagaagcagcugagagagaacgccgaggacaugggcaacggcugcuucaagaucuaccacaagugcgacaacgccugcaucggcagcaucagaaacggcaccuacgaccacgacguguacagagacgaggcccugaacaacagauuccagaucaagggcguggagcugaagagcggcuacaaggacuggauccuguggaucagcuucgccaucagcugcuuccugcugugcguggcccugcugggcuucaucaugugggccugccagaagggcaacaucagaugcaacaucugcaucuga

SEQ ID NO: 172604 - RNA, 1701 nt, Artificial Sequence
  derived and/or modified CDS sequence (opt4) from hemagglutinin__InfluenzaA__AIJ10761
augaagaccaucaucgcccugagcuacauccugugccugguguucgcccagaagcugcccggcaacgacaacagcaccgccacccugugccugggccaccacgccgugcccaacggcaccaucgugaagaccaucaccaacgacagaaucgaggugaccaacgccaccgagcuggugcagaacagcagcaucggcgagaucugcgacagcccccaccagauccuggacggcgagaacugcacccugaucgacgcccugcugggcgacccccagugcgacggcuuccagaacaagaagugggaccuguucguggagagaagcaaggccuacagcaacugcuaccccuacgacgugcccgacuacgccagccugagaagccugguggccagcagcggcacccuggaguucaacaacgagagcuucaacugggccggcgugacccagaacggcaccagcagcgccugcaucagaggcagcaacagcagcuucuucagcagacugaacuggcugacccaccugaacuucaaguaccccgcccugaacgugaccaugcccaacaacgagcaguucgacaagcuguacaucuggggcgugcaccaccccggcaccgacaaggaccagaucuuccuguacgcccagagcagcggcagaaucaccgugagcaccaagagaagccagcaggccgugauccccaacaucggcagcagacccagaaucagaaacauccccagcagaaucagcaucuacuggaccaucgugaagcccggcgacauccugcugaucaacagcaccggcaaccugaucgcccccagaggcuacuucaagaucagaagcggcaagagcagcaucaugagaagcgacgcccccaucggcaagugcaagagcgagugcaucacccccaacggcagcauccccaacgacaagcccuuccagaacgugaacagaaucaccuacggcgccugccccagauacgugaagcagagcacccugaagcuggccaccggcaugagaaacgugcccgagaagcagaccagaggcaucuucggcgccaucgccggcuucaucgagaacggcugggagggcaugguggacggcugguacggcuucagacaccagaacagcgagggcagaggccaggccgccgaccugaagagcacccaggccgccaucgaccagaucaacggcaagcugaacagacugaucggcaagaccaacgagaaguuccaccagaucgagaaggaguucagcgagguggagggcagaauccaggaccuggagaaguacguggaggacaccaagaucgaccuguggagcuacaacgccgagcugcugguggcccuggagaaccagcacaccaucgaccugaccgacagcgagaugaacaagcuguucgagaagaccaagaagcagcugagagagaacgccgaggacaugggcaacggcugcuucaagaucuaccacaagugcgacaacgccugcaucggcagcaucagaaacggcaccuacgaccacgacguguacagaaacgaggcccugaacaagagauuccagaucaagggcguggagcugaagagcggcuacaaggacuggauccuguggaucagcuucgccaucagcugcuuccugcugugcguggugcugcugggcuucaucaugugggccugccagaagggcaacaucagaugcaacaucugcaucuga

SEQ ID NO: 172605 - RNA, 1701 nt, Artificial Sequence; identical to SEQ ID NO: 171952
  derived and/or modified CDS sequence (opt4) from hemagglutinin__InfluenzaA__AIJ10762

SEQ ID NO: 172606 - RNA, 1701 nt, Artificial Sequence; identical to SEQ ID NO: 171952
  derived and/or modified CDS sequence (opt4) from hemagglutinin__InfluenzaA__AIJ10763

SEQ ID NO: 172607 - RNA, 1701 nt, Artificial Sequence; identical to SEQ ID NO: 171952
  derived and/or modified CDS sequence (opt4) from hemagglutinin__InfluenzaA__AIJ10764

SEQ ID NO: 172608 - RNA, 1701 nt, Artificial Sequence; identical to SEQ ID NO: 171952
  derived and/or modified CDS sequence (opt4) from hemagglutinin__InfluenzaA__AIJ10765

SEQ ID NO: 172609 - RNA, 1701 nt, Artificial Sequence; identical to SEQ ID NO: 171952
  derived and/or modified CDS sequence (opt4) from hemagglutinin__InfluenzaA__AIJ10766

SEQ ID NO: 172610 - RNA, 1701 nt, Artificial Sequence; identical to SEQ ID NO: 171952
  derived and/or modified CDS sequence (opt4) from hemagglutinin__InfluenzaA__AIJ10767

SEQ ID NO: 172611 - RNA, 1701 nt, Artificial Sequence
  derived and/or modified CDS sequence (opt4) from hemagglutinin__InfluenzaA__AIJ10768
augaagaccaucaucgcccugagcuacauccugugccugguguucgcccagaagcugcccggcaacgacaacagcaccgccacccugugccugggccaccacgccgugcccaacggcaccaucgugaagaccaucaccaacgacagaaucgaggugaccaacgccaccgagcuggugcagaacagcagcaucggcgagaucugcgacagcccccaccagauccuggacggcgagaacugcacccugaucgacgcccugcugggcgacccccagugcgacggcuuccagaacaagaagugggaccuguucguggagagaagcaaggccuacagcaacugcuaccccuacgacgugcccgacuacgccagccugagaagccugguggccagcagcggcacccuggaguucaacaacgagagcuucaacugggccggcgugacccagaacggcaccagcagcgccugcaucagaggcagcaacagcagcuucuucagcagacugaacuggcugacccaccugaacuucaaguaccccgcccugaacgugaccaugcccaacaacgagcaguucgacaagcuguacaucuggggcgugcaccaccccggcaccgacaaggaccagaucuuccuguacgcccagagcagcggcagaaucaccgugagcaccaagagaagccagcaggccgugauccccaacaucggcagcagacccagaaucagaaacauccccagcagaaucagcaucuacuggaccaucgugaagcccggcgacauccugcugaucaacagcaccggcaaccugaucgcccccagaggcuacuucaagaucagaagcggcaagagcagcaucaugagaagcgacgcccccaucggcaagugcaagagcgagugcaucacccccaacggcagcauccccaacgacaagcccuuccagaacgugaacagaaucaccuacggcgccugccccagauacgugaagcagagcacccugaagcuggccaccggcaugagaaacauccccgagaagcagaccagaggcaucuucggcgccaucgccggcuucaucgagaacggcugggagggcaugguggacggcugguacggcuucagacaccagaacagcgagggcagaggccaggccgccgaccugaagagcacccaggccgccaucgaccagaucaacggcaagcugaacagacugaucggcaagaccaacgagaaguuccaccagaucgagaaggaguucagcgagguggagggcagaauccaggaccuggagaaguacguggaggacaccaagaucgaccuguggagcuacaacgccgagcugcugguggcccuggagaaccagcacaccaucgaccugaccgacagcgagaugaacaagcuguucgagaagaccaagaagcagcugagagagaacgccgaggacaugggcaacggcugcuucaagaucuaccacaagugcgacaacgccugcaucggcagcaucagaaacggcaccuacgaccacgacguguacagagacgaggcccugaacaacagauuccagaucaagggcguggagcugaagagcggcuacaaggacuggauccuguggaucagcuucgccaucagcugcuuccugcugugcguggugcugcugggcuucaucaugugggccugccagaagggcaacaucagaugcaacaucugcaucuga

SEQ ID NO: 172612 - RNA, 1701 nt, Artificial Sequence
  derived and/or modified CDS sequence (opt4) from hemagglutinin__InfluenzaA__AIJ10769
augaagaccaucaucgcccugagcuacauccugugccugguguucgcccagaagcugcccggcaacgacaacagcaccgccacccugugccugggccaccacgccgugcccaacggcaccaucgugaagaccaucaccaacgacagaaucgaggugaccaacgccaccgagcuggugcagaacagcagcaucggcgagaucugcgacagcccccaccagauccuggacggcgagaacugcacccugaucgacgcccugcugggcgacccccagugcgacggcuuccagaacaagaagugggaccuguucguggagagaagcaaggccuacagcaacugcuaccccuacgacgugcccgacuacgccagccugagaagccugguggccagcagcggcacccuggaguucaacaacgagagcuucaacugggccggcgugacccagaacggcaccagcagcgccugcaucagaggcagcaacagcagcuucuucagcagacugaacuggcugacccaccugaacuucaaguaccccgcccugaacgugaccaugcccaacaacgagcaguucgacaagcuguacaucuggggcgugcaccaccccggcaccgacaaggaccagaucuuccuguacgcccagagcagcggcagaaucaccgugagcaccaagagaagccagcaggccgugauccccaacaucggcagcagacccagaaucagaaacauccccagcagaaucagcaucuacuggaccaucgugaagcccggcgacauccugcugaucaacagcaccggcaaccugaucgcccccagaggcuacuucaagauccagagcggcaagagcagcaucaugagaagcgacgcccccaucggcaagugcaagagcgagugcaucacccccaacggcagcauccccaacgacaagcccuuccagaacgugaacagaaucaccuacggcgccugccccagauacgugaagcagagcacccugaagcuggccaccggcaugagaaacgugcccgagaagcagaccagaggcaucuucggcgccaucgccggcuucaucgagaacggcugggagggcaugguggacggcugguacggcuucagacaccagaacagcgagggcagaggccaggccgccgaccugaagagcacccaggccgccaucgaccagaucaacggcaagcugaacagacugaucggcaagaccaacgagaaguuccaccagaucgagaaggaguucagcgagguggagggcagaauccaggaccuggagaaguacguggaggacaccaagaucgaccuguggagcuacaacgccgagcugcugguggcccuggagaaccagcacaccaucgaccugaccgacagcgagaugaacaagcuguucgagaagaccaagaagcagcugagagagaacgccgaggacaugggcaacggcugcuucaagaucuaccacaagugcgacaacgccugcaucggcagcaucagaaacggcaccuacgaccacgacguguacagagacgaggcccugaacaacagauuccagaucaagggcguggagcugaagagcggcuacaaggacuggauccuguggaucagcuucgccaucagcugcuuccugcugugcguggugcugcugggcuucaucaugugggccugccagaagggcaacaucagaugcaacaucugcaucuga

SEQ ID NO: 172613 - RNA, 1701 nt, Artificial Sequence; identical to SEQ ID NO: 171952
  derived and/or modified CDS sequence (opt4) from hemagglutinin__InfluenzaA__AIJ10770

SEQ ID NO: 172614 - RNA, 1701 nt, Artificial Sequence; identical to SEQ ID NO: 171952
  derived and/or modified CDS sequence (opt4) from hemagglutinin__InfluenzaA__AIJ10771

SEQ ID NO: 172615 - RNA, 1701 nt, Artificial Sequence; identical to SEQ ID NO: 171952
  derived and/or modified CDS sequence (opt4) from hemagglutinin__InfluenzaA__AIJ10772

SEQ ID NO: 172616 - RNA, 1701 nt, Artificial Sequence; identical to SEQ ID NO: 171952
  derived and/or modified CDS sequence (opt4) from hemagglutinin__InfluenzaA__AIJ10773

SEQ ID NO: 172617 - RNA, 1701 nt, Artificial Sequence
  derived and/or modified CDS sequence (opt4) from hemagglutinin__InfluenzaA__AIJ10774
augaagaccaucaucgcccugagcuacauccugugccugguguucgcccagaagcugcccggcaacgacaacagcaccgccacccugugccugggccaccacgccgugcccaacggcaccaucgugaagaccaucaccaacgacagaaucgaggugaccaacgccaccgagcuggugcagaacagcagcaucggcgagaucugcaacagcccccaccagauccuggacggcgagaacugcacccugaucgacgcccugcugggcgacccccagugcgacggcuuccagaacaagaagugggaccuguucguggagagaagcaaggccuacagcaacugcuaccccuacgacgugcccgacuacgccagccugagaagccugguggccagcagcggcacccuggaguucaacaacgagagcuucaacugggccggcgugacccagaacggcaccagcagcgccugcaucagaggcagcaacagcagcuucuucagcagacugaacuggcugacccaccugaacuucaaguaccccgcccugaacgugaccaugcccaacaacgagcaguucgacaagcuguacaucuggggcgugcaccaccccggcaccgacaaggaccagaucuuccuguacgcccagagcagcggcagaaucaccgugagcaccaagagaagccagcaggccgugauccccaacaucggcagcagacccagaaucagaaacauccccagcagaaucagcaucuacuggaccaucgugaagcccggcgacauccugcugaucaacagcaccggcaaccugaucgcccccagaggcuacuucaagaucagaagcggcaagagcagcaucaugagaagcgacgcccccaucggcaagugcaagagcgagugcaucacccccaacggcagcauccccaacgacaagcccuuccagaacgugaacagaaucaccuacggcgccugccccagauacgugaagcagagcacccugaagcuggccaccggcaugagaaacgugcccgagaagcagaccagaggcaucuucggcgccaucgccggcuucaucgagaacggcugggagggcaugauggacggcugguacggcuucagacaccagaacagcgagggcagaggccaggccgccgaccugaagagcacccagagcgccaucgaccagaucaacggcaagcugaacagacugaucggcaagaccaacgagaaguuccaccagaucgagaaggaguucagcgagguggagggcagaauccaggaccuggagaaguacguggaggacaccaagaucgaccuguggagcuacaacgccgagcugcugguggcccuggagaaccagcacaccaucgaccugaccgacagcgagaugaacaagcuguucgagaagaccaagaagcagcugagagagaacgccgaggacaugggcaacggcugcuucaagaucuaccacaagugcgacaacgccugcaucggcagcaucagaaacggcaccuacgaccacgacguguacagagacgaggcccugaacaacagauuccagaucaagggcguggagcugaagagcggcuacaaggacuggauccuguggaucagcuucgccaucagcugcuuccugcugugcguggugcugcugggcuucaucaugugggccugccagaagggcaacaucagaugcaacaucugcaucuga

SEQ ID NO: 172618 - RNA, 1701 nt, Artificial Sequence
  derived and/or modified CDS sequence (opt4) from hemagglutinin__InfluenzaA__AIJ10776
augaagaccaucaucgcccugagcugcauccugugccugguguucgcccagaagcugcccggcaacgacaacagcaccgccacccugugccugggccaccacgccgugcccaacggcaccaucgugaagaccaucaccaacgacagaaucgaggugaccaacgccaccgagcuggugcagaacagcagcaucggcgagaucugcgacagcccccaccagauccuggacggcgagaacugcacccugaucgacgcccugcugggcgacccccagugcgacggcuuccagaacaagaagugggaccuguucguggagagaagcaaggccuacagcaacugcuaccccuacgacgugcccgacuacgccagccugagaagccugguggccagcagcggcacccuggaguucaacaacgagagcuucaacugggccggcgugacccagaacggcaccagcagcgccugcaucagaggcagcaacagcagcuucuucagcagacugaacuggcugacccaccugaacuucaaguaccccgcccugaacgugaccaugcccaacaacgagcaguucgacaagcuguacaucuggggcgugcaccaccccggcaccgacaaggaccagaucuuccuguacgcccagagcagcggcagaaucaccgugagcaccaagagaagccagcaggccgugauccccaacaucggcagcagacccagaaucagaaacauccccagcagaaucagcaucuacuggaccaucgugaagcccggcgacauccugcugaucaacagcaccggcaaccugaucgcccccagaggcuacuucaagaucagaagcggcaagagcagcaucaugagaagcgacgcccccaucggcaagugcaagagcgagugcaucacccccaacggcagcauccccaacgacaagcccuuccagaacgugaacagaaucaccuacggcgccugccccagauacgugaagcagagcacccugaagcuggccaccggcaugagaaacgugcccgagaagcagaccagaggcaucuucggcgccaucgccggcuucaucgagaacggcugggagggcaugguggacggcugguacggcuucagacaccagaacagcgagggcagaggccaggccgccgaccugaagagcacccaggccgccaucgaccagaucaacggcaagcugaacagacugaucggcaagaccaacgagaaguuccaccagaucgagaaggaguucagcgagguggagggcagaauccaggaccuggagaaguacguggaggacaccaagaucgaccuguggagcuacaacgccgagcugcugguggcccuggagaaccagcacaccaucgaccugaccgacagcgagaugagcaagcuguucgagaagaccaagaagcagcugagagagaacgccgaggacaugggcaacggcugcuucaagaucuaccacaagugcgacaacgccugcaucggcagcaucagaaacggcaccuacgaccacgacguguacagagacgaggcccugaacaacagauuccagaucaagggcguggagcugaagagcggcuacaaggacuggauccuguggaucagcuucgccaucagcugcuuccugcugugcguggugcugcugggcuucaucaugugggccugccagaagggcaacaucagaugcaacaucugcaucuga

SEQ ID NO: 172619 - RNA, 1701 nt, Artificial Sequence; identical to SEQ ID NO: 171952
  derived and/or modified CDS sequence (opt4) from hemagglutinin__InfluenzaA__AIJ10777

SEQ ID NO: 172620 - RNA, 1701 nt, Artificial Sequence; identical to SEQ ID NO: 171952
  derived and/or modified CDS sequence (opt4) from hemagglutinin__InfluenzaA__AIJ10778

SEQ ID NO: 172621 - RNA, 1701 nt, Artificial Sequence
  derived and/or modified CDS sequence (opt4) from hemagglutinin__InfluenzaA__AIJ10780
augaagaccaucaucgcccugagcuacauccugugccugguguucgcccagaagcugcccggcaacgacaacagcaccgccacccugugccugggccaccacgccgugcccaacggcaccaucgugaagaccaucaccaacgacagaaucgaggugaccaacgccaccgagcuggugcagaacagcagcaucggcgagaucugcgacagcccccaccagauccuggacggcgagaacugcacccugaucgacgcccugcugggcgacccccagugcgacagcuuccagaacaagaagugggaccuguucguggagagaagcaaggccuacagcaacugcuaccccuacgacgugcccgacuacgccagccugagaagccugguggccagcagcggcacccuggaguucaacaacgagagcuucaacugggccggcgugacccagaacggcaccagcagcgccugcaucagaggcagcaacagcagcuucuucagcagacugaacuggcugacccacagcaacuucaaguaccccgcccugaacgugaccaugcccaacaacgagcaguucgacaagcuguacaucuggggcgugcaccaccccggcaccgacaaggaccagaucuuccuguacgcccagagcagcggcagaaucaccgugagcaccaagagaagccagcaggccgugauccccaacaucggcagcagacccagaaucagaaacauccccagcagaaucagcaucuacuggaccaucgugaagcccggcgacauccugcugaucaacagcaccggcaaccugaucgcccccagaggcuacuucaagaucagaagcggcaagagcagcaucaugagaagcgacgcccccaucggcaagugcaagagcgagugcaucacccccaacggcagcauccccaacgacaagcccuuccagaacgugaacagaaucaccuacggcgccugccccagauacgugaagcagagcacccugaagcuggccaccggcaugagaaacgugcccgagaagcagaccagaggcaucuucggcgccaucgccggcuucaucgagaacggcugggagggcaugauggacggcugguacggcuucagacaccagaacagcgagggcagaggccaggccgccgaccugaagagcacccaggccgccaucgaccagaucaacggcaagcugaacagacugaucggcaagaccaacgagaaguuccaccagaucgagaaggaguucagcgagguggagggcagaauccaggacaucgagaaguacguggaggacaccaagaucgaccuguggagcuacaacgccgagcugcugguggcccuggagaaccagcacaccaucgaccugaccgacagcgagaugaacaagcuguucgagaagaccaagaagcagcugagagagaacgccgaggacaugggcaacggcugcuucaagaucuaccacaagugcgacaacgccugcaucggcagcaucagaaacggcaccuacgaccacgacguguacagagacgaggcccugaacaacagauuccagaucaagggcguggagcugaagagcggcuacaaggacuggauccuguggaucagcuucgccaucagcugcuuccugcugugcguggcccugcugggcuucaucaugugggccugccagaagggcaacaucagaugcaacaucugcaucuga

SEQ ID NO: 172622 - RNA, 1701 nt, Artificial Sequence; identical to SEQ ID NO: 171952
  derived and/or modified CDS sequence (opt4) from hemagglutinin__InfluenzaA__AIJ10781

SEQ ID NO: 172623 - RNA, 1701 nt, Artificial Sequence; identical to SEQ ID NO: 171952
  derived and/or modified CDS sequence (opt4) from hemagglutinin__InfluenzaA__AIJ10782

SEQ ID NO: 172624 - RNA, 1701 nt, Artificial Sequence
  derived and/or modified CDS sequence (opt4) from hemagglutinin__InfluenzaA__AIJ10783
augaagaccaucaucgcccugagcuacauccugugccugguguucgcccagaagcugcccggcaacgacaacagcaccgccacccugugccugggccaccacgccgugcccaacggcaccaucgugaagaccaucaccaacgacagaaucgaggugaccaacgccaccgagcuggugcagaacagcagcaucggcgagaucugcgacagcccccaccagauccuggacggcgagaacugcacccugaucgacgcccugcugggcgacccccagugcgacggcuuccagaacaagaagugggaccuguucguggagagaagcaaggccuacagcaacugcuaccccuacgacgugcccgacuacgccagccugagaagccugguggccagcagcggcacccuggaguucaacaacgagagcuucaacugggugggcgugacccagaacggcaccagcagcgccugcaucagaggcagcaacagcagcuucuucagcagacugaacuggcugacccaccugaacuucaaguaccccgcccugaacgugaccaugcccaacaacgagcaguucgacaagcuguacaucuggggcgugcaccaccccggcaccgacaaggaccagaucuuccuguacgcccagagcagcggcagaaucaccgugagcaccaagagaagccagcaggccgugauccccaacaucggcagcagacccagaaucagaaacauccccagcagaaucagcaucuacuggaccaucgugaagcccggcgacauccugcugaucaacagcaccggcaaccugaucgcccccagaggcuacuucaagaucagaagcggcaagagcagcaucaugagaagcgacgcccccaucggcaagugcaagagcgagugcaucacccccaacggcagcauccccaacgacaagcccuuccagaacgugaacagaaucaccuacggcgccugccccagauacgugaagcagagcacccugaagcuggccaccggcaugagaaacgugcccgagaagcagaccagaggcaucuucggcgccaucgccggcuucaucgagaacggcugggagggcaugaaggacggcugguacggcuucagacaccagaacagcgagggcagaggccaggccgccgaccugaagagcacccaggccgccaucgaccagaucaacggcaagcugaacagacugaucggcaagaccaacgagaaguuccaccagaucgagaaggaguucagcgagguggagggcagaauccaggaccuggagaaguacguggaggacaccaagaucgaccuguggagcuacaacgccgagcugcugguggcccuggagaaccagcacaccaucgaccugaccgacagcgagaugaacaagcuguucgagaagaccaagaagcagcugagagagaacgccgaggacaugggcaacggcugcuucaagaucuaccacaagugcgacaacgccugcaucggcagcaucagaaacggcaccuacgaccacgacguguacagagacgaggcccugaacaacagauuccagaucaagggcguggagcugaagagcggcuacaaggacuggauccuguggaucagcuucgccaucagcugcuuccugcugugcguggcccugcugggcuucaucaugugggccugccagaagggcaacaucagaugcaacaucugcaucuga

SEQ ID NO: 172625 - RNA, 1701 nt, Artificial Sequence; identical to SEQ ID NO: 172624
  derived and/or modified CDS sequence (opt4) from hemagglutinin__InfluenzaA__AIJ10784

SEQ ID NO: 172626 - RNA, 1701 nt, Artificial Sequence
  derived and/or modified CDS sequence (opt4) from hemagglutinin__InfluenzaA__AIJ10785
augaagaccaucaucgcccugagcuacauccugugccugguguucgcccagaagcugcccggcaacgacaacagcaccgccacccugugccugggccaccacgccgugcccaacggcaccaucgugaagaccaucaccaacgacagaaucgaggugaccaacgccaccgagcuggugcagaacagcagcaucggcgagaucugcaacagcccccaccagauccuggacggcgagaacugcacccugaucgacgcccugcugggcgacccccagugcgacggcuuccagaacaagaagugggaccuguucguggagagaagcaaggccuacagcaacugcuaccccuacgacgugcccgacuacgccagccugagaagccugguggccagcagcggcacccuggaguucaacaacgagagcuucaacugggccggcgugacccagaacggcaccagcagcgccugcaucagaggcagcaacagcagcuucuucagcagacugaacuggcugacccaccugaacuucaaguaccccgcccugaacgugaccaugcccaacaacgagcaguucgacaagcuguacaucuggggcgugcaccaccccggcaccgacaaggaccagaucuuccuguacgcccagagcagcggcagaaucaccgugagcaccaagagaagccagcaggccgugauccccaacaucggcagcagacccagaaucagaaacauccccagcagaaucagcaucuacuggaccaucgugaagcccggcgacauccugcugaucaacagcaccggcaaccugaucgcccccagaggcuacuucaagaucagaagcggcaagagcagcaucaugagaagcgacgcccccaucggcaagugcaagagcgagugcaucacccccaacggcagcauccccaacgacaagcccuuccagaacgugaacagaaucaccuacggcgccugccccagauacgugaagcagagcacccugaagcuggccaccggcaugagaaacgugcccgagaagcagaccagaggcaucuucggcgccaucgccggcuucaucgagaacggcugggagggcaugauggacggcugguacggcuucagacaccagaacagcgagggcagaggccaggccgccgaccugaagagcacccagagcgccaucgaccagaucaacggcaagcugaacagacugaucggcaagaccaacgagaaguuccaccagaucgagaaggaguucagcgagguggagggcagaauccaggaccuggagaaguacguggaggacaccaagaucgaccuguggagcuacaacgccgagcugcugguggcccuggagaaccagcacaccaucgaccugaccgacagcgagaugaacaagcuguucgagaagaccaagaagcagcugagagagaacgccgaggacaugggcaacggcugcuucaagaucuaccacaagugcgacaacgccugcaucggcagcaucagaaacggcaccuacgaccacgacguguacagagacgaggcccugaacaacagauuccagaucaagggcguggagcugaagagcggcuacaaggacuggauccuguggaucagcuucgccaucagcugcuuccugcugugcguggcccugcugggcuucaucaugugggccugccagaagggcaacaucagaugcaacaucugcaucuga

SEQ ID NO: 172627 - RNA, 1701 nt, Artificial Sequence; identical to SEQ ID NO: 172624
  derived and/or modified CDS sequence (opt4) from hemagglutinin__InfluenzaA__AIJ10786

SEQ ID NO: 172628 - RNA, 1701 nt, Artificial Sequence
  derived and/or modified CDS sequence (opt4) from hemagglutinin__InfluenzaA__AIJ10787
augaagaccaucaucgcccugagcuacauccugugccugguguucgcccagaagcugcccggcaacgacaacagcaccgccacccugugccugggccaccacgccgugcccaacggcaccaucgugaagaccaucaccaacgacagaaucgaggugaccaacgccaccgagcuggugcagaacagcagcaucggcgagaucugcgacagcccccaccagauccuggacggcgagaacugcacccugaucgacgcccugcugggcgacccccagugcgacggcuuccagaacaagaagugggaccuguucguggagagaagcaaggccuacagcaacugcuaccccuacgacgugcccgacuacgccagccugagaagccugguggccagcagcggcacccuggaguucaacaacgagagcuucaacugggugggcgugacccagaacggcaccagcagcgccugcaucagaggcagcaacagcagcuucuucagcagacugaacuggcugacccaccugaacuucaaguaccccgcccugaacgugaccaugcccaacaacgagcaguucgacaagcuguacaucuggggcgugcaccaccccggcaccgacaaggaccagaucuuccuguacgcccagagcagcggcagaaucaccgugagcaccaagagaagccagcaggccgugauccccaacaucggcagcagacccagaaucagaaacauccccagcagaaucagcaucuacuggaccaucgugaagcccggcgacauccugcugaucaacagcaccggcaaccugaucgcccccagaggcuacuucaagaucagaagcggcaagagcagcaucaugagaagcgacgcccccaucggcaagugcaagagcgagugcaucacccccaacggcagcauccccaacgacaagcccuuccagaacgugaacagaaucaccuacggcgccugccccagauacgugaagcagagcacccugaagcuggccaccggcaugagaaacgugcccgagaagcagaccagaggcaucuucggcgccaucgccggcuucaucgagaacggcugggagggcaugaaggacggcugguacggcuucagacaccagaacagcgagggcagaggccaggccgccgaccugaagagcacccaggccgccaucgaccagaucaacggcaagcugaacagacugaucggcaagaccaacgagaaguuccaccagaucgagaaggaguucagcgagguggagggcagaauccaggaccuggagaaguacguggaggacaccaagaucgaccuguggagcuacaacgccgagcugcugguggcccuggagaaccagcacaccaucgaccugaccgacagcgagaugaacaagcuguucgagaagaccaagaagcagcugagagagaacgccgaggacaugggcaacggcugcuucaagaucuaccacaagugcgacaacgccugcaucggcagcaucagaaacggcaccuacgaccacgacguguacagagacgaggcccugaacaacagauucagaaucaagggcguggagcugaagagcggcuacaaggacuggauccuguggaucagcuucgccaucagcugcuuccugcugugcguggcccugcugggcuucaucaugugggccugccagaagggcaacaucagaugcaacaucugcaucuga

SEQ ID NO: 172629 - RNA, 1701 nt, Artificial Sequence; identical to SEQ ID NO: 172626
  derived and/or modified CDS sequence (opt4) from hemagglutinin__InfluenzaA__AIJ10788

SEQ ID NO: 172630 - RNA, 1701 nt, Artificial Sequence; identical to SEQ ID NO: 172626
  derived and/or modified CDS sequence (opt4) from hemagglutinin__InfluenzaA__AIJ10789

SEQ ID NO: 172631 - RNA, 1701 nt, Artificial Sequence; identical to SEQ ID NO: 172624
  derived and/or modified CDS sequence (opt4) from hemagglutinin__InfluenzaA__AIJ10790

SEQ ID NO: 172632 - RNA, 1701 nt, Artificial Sequence; identical to SEQ ID NO: 171952
  derived and/or modified CDS sequence (opt4) from hemagglutinin__InfluenzaA__AIJ10791

SEQ ID NO: 172633 - RNA, 1701 nt, Artificial Sequence
  derived and/or modified CDS sequence (opt4) from hemagglutinin__InfluenzaA__AIJ10792
augaagaccaucaucgcccugagcuacauccugugccugguguucgcccagaagcugcccggcgacgacaacagcaccgccacccugugccugggccaccacgccgugcccaacggcaccaucgugaagaccaucaccaacgacagaaucgaggugaccaacgccaccgagcuggugcagaacagcagcaucggcgagaucugcgacagcccccaccagauccuggacggcgagaacugcacccugaucgacgcccugcugggcgacccccagugcgacggcuuccagaacaagaagugggaccuguucguggagagaagcaaggccuacagcaacugcuaccccuacgacgugcccgacuacgccagccugagaagccugguggccagcagcggcacccuggaguucaacaacgagagcuucaacugggccggcgugacccagaacggcaccagcagcgccugcaucagaggcagcaacagcagcuucuucagcagacugaacuggcugacccaccugaacuucaaguaccccgcccugaacgugaccaugcccaacaacgagcaguucgacaagcuguacaucuggggcgugcaccaccccggcaccgacaaggaccagaucuuccuguacgcccagagcagcggcagaaucaccgugagcaccaagagaagccagcaggccgugauccccaacaucggcagcagacccagaaucagaaacauccccagcagaaucagcaucuacuggaccaucgugaagcccggcgacauccugcugaucaacagcaccggcaaccugaucgcccccagaggcuacuucaagaucagaagcggcaagagcagcaucaugagaagcgacgcccccaucggcaagugcaagagcgagugcaucacccccaacggcagcauccccaacgacaagcccuuccagaacgugaacagaaucaccuacggcgccugccccagauacgugaagcagagcacccugaagcuggccaccggcaugagaaacgugcccgagaagcagaccagaggcaucuucggcgccaucgccggcuucaucgagaacggcugggagggcaugguggacggcugguacggcuucagacaccagaacagcgagggcagaggccaggccgccgaccugaagagcacccaggccgccaucgaccagaucaacggcaagcugaacagacugaucggcaagaccaacgagaaguuccaccagaucgagaaggaguucagcgagguggagggcagaauccaggaccuggagaaguacguggaggacaccaagaucgaccuguggagcuacaacgccgagcugcugguggcccuggagaaccagcacaccaucgaccugaccgacagcgagaugaacaagcuguucgagaagaccaagaagcagcugagagagaacgccgaggacaugggcaacggcugcuucaagaucuaccacaagugcgacaacgccugcaucggcagcaucagaaacggcaccuacgaccacgacguguacagagacgaggcccugaacaacagauuccagaucaagggcguggagcugaagagcggcuacaaggacuggauccuguggaucagcuucgccaucagcugcuuccugcugugcguggugcugcugggcuucaucaugugggccugccagaagggcaacaucagaugcaacaucugcaucuga

SEQ ID NO: 172634 - RNA, 1701 nt, Artificial Sequence; identical to SEQ ID NO: 169943
  derived and/or modified CDS sequence (opt4) from hemagglutinin__InfluenzaA__AIJ29347

SEQ ID NO: 172635 - RNA, 1701 nt, Artificial Sequence
  derived and/or modified CDS sequence (opt4) from hemagglutinin__InfluenzaA__AIJ29349
augaagaccaucaucgcccugagcuacauccugugccugguguucgcccagaaguuccccggcaacgacaacagcaccgccacccugugccugggccaccacgccgugcccaacggcaccaucgugaagaccaucaccaacgacagaaucgaggugaccaacgccaccgagcuggugcagaacagcagcaucggcgagaucugcgacagcccccaccagauccuggacggcgagaacugcacccugaucgacgcccugcugggcgacccccagugcgacggcuuccagaacaagaagugggaccuguucguggagagaagcaaggccuacagcaacugcuaccccuacgacgugcccgacuacgccagccugagaagccugguggccagcagcggcacccuggaguucaacaacgagagcuucaacuggaccggcgugacccagaacggcaccagcagcgccugcaucagaagaagcaacagcagcuucuucagcagacugaacuggcugacccaccugaacuucaaguaccccgcccugaacgugaccaugcccaacaacgagcaguucgacaagcuguacaucuggggcgugcaccaccccggcaccgacaaggaccagaucuuccuguacgcccagagcagcggcagaaucaccgugagcaccaagagaagccagcaggccgugauccccaacaucggcagcagacccagaaucagaaacauccccagcagaaucagcaucuacuggaccaucgugaagcccggcgacauccugcugaucaacagcaccggcaaccugaucgcccccagaggcuacuucaagaucagaagcggcaagagcagcaucaugagaagcgacgcccccaucggcaagugcaagagcgagugcaucacccccaacggcagcauccccaacgacaagcccuuccagaacgugaacagaaucaccuacggcgccugccccagauacgugaagcagagcacccugaagcuggccaccggcaugagaaacgugcccgagaagcagaccagaggcaucuucggcgccaucgccggcuucaucgagaacggcugggagggcaugguggacggcugguacggcuucagacaccagaacagcgagggcagaggccaggccgccgaccugaagagcacccaggccgccaucgaccagaucaacggcaagcugaacagacugaucggcaagaccaacgagaaguuccaccagaucgagaaggaguucagcgagguggagggcagaauccaggaccuggagaaguacguggaggacaccaagaucgaccuguggagcuacaacgccgagcugcugguggcccuggagaaccagcacaccaucgaccugaccgacagcgagaugaacaagcuguucgagaagaccaagaagcagcugagagagaacgccgaggacaugggcaacggcugcuucaagaucuaccacaagugcgacaacgccugcaucggcagcaucagaaacggcaccuacgaccacgacguguacagagacgaggcccugaacaacagauuccagaucaagggcguggagcugaagagcggcuacaaggacuggauccuguggaucagcuucgccaucagcugcuuccugcugugcguggcccugcugggcuucaucaugugggccugccagaagggcaacaucagaugcaacaucugcaucuga

SEQ ID NO: 172636 - RNA, 1701 nt, Artificial Sequence
  derived and/or modified CDS sequence (opt4) from hemagglutinin__InfluenzaA__AIJ29351
augaagaccaucaucgcccugagcuacauccugugccugguguucgcccagaagcugcccggcaacgacaacagcaccgccacccugugccugggccaccacgccgugcccaacggcaccaucgugaagaccaucaccaacgacagaaucgaggugaccaacgccaccgagcuggugcagaacagcagcaucggcgagaucugcgacagcccccaccagauccuggacggcgagaacugcacccugaucgacgcccugcugggcgacccccagugcgacggcuuccagaacaagaagugggaccuguucguggagagaagcaaggccuacagcaacugcuaccccuacgacgugcccgacuacgccagccugagaagccugguggccagcagcggcacccuggaguucaacaacgagagcuucaacuggaccggcgugacccagaacggcaccagcagcgccugcaucagaagaagcaacagcagcuucuucagcagacugaacuggcugacccaccugaacuucaaguaccccgcccugaacgugaccaugcccaacaacgagcaguucgacaagcuguacaucuggggcgugcaccaccccggcaccgacaaggaccagaucuuccuguacgcccagagcagcggcagaaucaccgugagcaccaagagaagccagcaggccgugauccccaacaucggcagcagacccagaaucagaaacauccccagcagaaucagcaucuacuggaccaucgugaagcccggcgacauccugcugaucaacagcaccggcaaccugaucgcccccagaggcuacuucaagaucagaagcggcaagagcagcaucaugagaagcgacgcccccaucggcaagugcaagagcgagugcaucacccccaacggcagcauccccaacgacaagcccuuccagaacgugaacagaaucaccuacggcgccugccccagauacgugaagcagagcacccugaagcuggccaccggcaugagaaacgugcccgagaagcagaccagaggcaucuucggcgccaucgccggcuucaucgagaacggcugggagggcaugguggacggcugguacggcuucagacaccagaacagcgagggcagaggccaggccgccgaccugaagagcacccaggccgccaucgaccagaucaacggcaagcugaacagacugaucggcaagaccaacgagaaguuccaccagaucgagaaggaguucagcgagguggagggcagaauccaggaccuggagaaguacguggaggacaccaagaucgaccuguggagcuacaacgccgagcugcugguggcccuggagaaccagcacaccaucgaccugaccgacagcgagaugaacaagcuguucgagaagaccaagaagcagcugagagagaacgccgaggacaugggcaacggcugcuucaagaucuaccacaagugcgacaacgccugcaucggcagcaucagaaacggcaccuacgaccacgacguguacagagacgaggcccugaacaacagauuccagaucaagggcguggagcugaagagcggcuacaaggacuggauccuguggaucagcuucgccaucagcugccugcugcugugcguggcccugcugggcuucaucaugugggccugccagaagggcaacaucagaugcaacaucugcaucuga

SEQ ID NO: 172637 - RNA, 1701 nt, Artificial Sequence; identical to SEQ ID NO: 169540
  derived and/or modified CDS sequence (opt4) from hemagglutinin__InfluenzaA__AIJ29353

SEQ ID NO: 172638 - RNA, 1701 nt, Artificial Sequence
  derived and/or modified CDS sequence (opt4) from hemagglutinin__InfluenzaA__AIJ29355
augaagaccaucaucgcccugagcuacauccugugccugguguucgcccagaagcugcccggcaacgacaacagcaccgccacccugugccugggccaccacgccgugcccaacggcaccaucgugaagaccaucaccaacgaccagaucgaggugaccaacgccaccgagcuggugcagagcagcagcaccggcgagaucugcgacagcccccaccagauccuggacggcgagaacugcacccugaucgacgcccugcugggcgacccccagugcgacggcuuccagaacaagaagugggaccuguucguggagagaagcaaggccuacagcaacugcuaccccuacgacgugcccgacuacgccagccugagaagccugguggccagcagcggcacccuggaguucaacaacgagagcuucaacuggaccggcgugacccagaacggcaccagcagcgccugcaucagaagaagcaacagcagcuucuucagcagacugaacuggcugacccaccugaacuucaaguaccccgcccugaacgugaccaugcccaacaacgagcaguucgacaagcuguacaucuggggcgugcaccaccccggcaccgacaaggaccagaucuuccuguacgcccagagcagcggcagaaucaccgugagcaccaagagaagccagcaggccgugauccccaacaucggcagcagaagcagaaucagaaacauccccagcagaaucagcaucuacuggaccaucgugaagcccggcgacauccugcugaucaacagcaccggcaaccugaucgcccccagaggcuacuucaagaucagaagcggcaagagcagcaucaugagaagcgacgcccccaucggcaagugcaacagcgagugcaucacccccaacggcagcauccccaacgacaagcccuuccagaacgugaacagaaucaccuacggcgccugccccagauacgugaagcagagcacccugaagcuggccaccggcaugagaaacgugcccgagaagcagaccagaggcaucuucggcgccaucgccggcuucaucgagaacggcugggagggcaugguggacggcugguacggcuucagacaccagaacagcgagggcagaggccaggccgccgaccugaagagcacccaggccgccaucgaccagaucaacggcaagcugaacagacugaucggcaagaccaacgagaaguuccaccagaucgagaaggaguucagcgagguggagggcagaauccaggaccuggagaaguacguggaggacaccaagaucgaccuguggagcuacaacgccgagcugcugguggcccuggagaaccagcacaccaucgaccugaccgacagcgagaugaacaagcuguucgagaagaccaagaagcagcugagagagaacgccgaggacaugggcaacggcugcuucaagaucuaccacaagugcgacaacgccugcaucggcagcaucagaaacggcaccuacaaccacgacguguacagagacgaggcccugaacaacagauuccagaucaagggcguggagcugaagagcggcuacaaggacuggauccuguggaucagcuucgccaucagcugcuuccugcugugcguggcccugcugggcuucaucaugugggccugccagaagggcaacaucagaugcaacaucugcaucuga

SEQ ID NO: 172639 - RNA, 1701 nt, Artificial Sequence; identical to SEQ ID NO: 169134
  derived and/or modified CDS sequence (opt4) from hemagglutinin__InfluenzaA__AIJ29357

SEQ ID NO: 172640 - RNA, 1701 nt, Artificial Sequence
  derived and/or modified CDS sequence (opt4) from hemagglutinin__InfluenzaA__AIJ29359
augaagaccaucaucgcccugagcuacauccugugccugguguucgcccagaagcugcccggcaacgacaacagcaccgccacccugugccugggccaccacgccgugcccaacggcaccaucgugaagaccaucaccaacgacagaaucgaggugaccaacgccaccgagcuggugcagaacagcagcaucggcgagaucugcgacagcccccaccagauccuggacggcgagaacugcacccugaucgacgcccugcugggcgacccccagugcgacggcuuccagaacaagaagugggaccuguucguggagagaagcaaggccuacagcaacugcuaccccuacgacgugcccgacuacgccagccugagaagccugguggccagcagcggcacccuggaguucaacaacgagagcuucaacuggaccggcgugacccagaacggcaccagcagcgccugcaucagaagaagcaacaacagcuucuucagcagacugaacuggcugacccaccugaacuucaaguaccccgcccugaacgugaccaugcccaacaacgagcaguucgacaagcuguacaucuggggcgugcaccaccccggcaccgacaaggaccagaucuuccuguacgcccagagcagcggcagaaucaccgugagcaccaagagaagccagcaggccgugauccccaacaucggcagcagacccagaaucagaaacauccccagcagaaucagcaucuacuggaccaucgugaagcccggcgacauccugcugaucaacagcaccggcaaccugaucgcccccagaggcuacuucaagaucagaagcggcaagagcagcaucaugagaagcgacgcccccaucggcaagugcaagagcgagugcaucacccccaacggcagcauccccaacgacaagcccuuccagaacgugaacagaaucaccuacggcgccugccccagauacgugaagcagagcacccugaagcuggccaccggcaugagaaacgugcccgagaagcagaccagaggcaucuucggcgccaucgccggcuucaucgagaacggcugggagggcaugguggacggcugguacggcuucagacaccagaacagcgagggcagaggccaggccgccgaccugaagagcacccaggccgccaucgaccagaucaacggcaagcugaacagacugaucggcaagaccaacgagaaguuccaccagaucgagaaggaguucagcgagguggagggcagaauccaggaccuggagaaguacguggaggacaccaagaucgaccuguggagcuacaacgccgagcugcugguggcccuggagaaccagcacaccaucgaccugaccgacagcgagaugaacaagcuguucgagaagaccaagaagcagcugagagagaacgccgaggacaugggcaacggcugcuucaagaucuaccacaagugcgacaacgccugcaucggcagcaucagaaacggcaccuacgaccacgacguguacagagacgaggccaucaacaacagauuccagaucaagggcguggagcugaagagcggcuacaaggacuggauccuguggaucagcuucgccaucagcugcuuccugcugugcguggcccugcugggcuucaucaugugggccugccagaagggcaacaucagaugcaacaucugcaucuga

SEQ ID NO: 172641 - RNA, 1701 nt, Artificial Sequence
  derived and/or modified CDS sequence (opt4) from hemagglutinin__InfluenzaA__AIJ29361
augaagaccaucaucgcccugagcuacauccugugccugguguucgcccagaagcugcccggcaacgacaacagcaccgccacccugugccugggccaccacgccgugcccaacggcaccaucgugaagaccaucaccaacgacagaaucgaggugaccaacgccaccgagcuggugcagaacagcagcaucggcgagaucugcgacagcccccaccagauccuggacggcgagaacugcacccugaucgacgcccugcugggcgacccccagugcgacggcuuccagaacaagaagugggaccuguucguggagagaagcaaggccuacagcaacugcuaccccuacgacgugcccgacuacgugagccugagaagccugguggccagcagcggcacccuggaguucaacaacgagagcuucaacuggaccggcgugacccagaacggcaccagcagcgccugcaucagaagaagcaacaacagcuucuucagcagacugaacuggcugacccaccugaacuucaaguaccccgcccugaacgugaccaugcccaacaacgagcaguucgacaagcuguacaucuggggcgugcaccaccccggcaccgacaaggaccagaucuuccuguacgcccagagcagcggcagaaucaccgugagcaccaagagaagccagcaggccgugauccccaacaucggcagcagacccagaaucagaaacauccccagcagaaucagcaucuacuggaccaucgugaagcccggcgacauccugcugaucaacagcaccggcaaccugaucgcccccagaggcuacuucaagaucagaagcggcaagagcagcaucaugagaagcgacgcccccaucggcaagugcaagagcgagugcaucacccccaacggcagcauccccaacgacaagcccuuccagaacgugaacagaaucaccuacggcgccugccccagauacgugaagcagagcacccugaagcuggccaccggcaugagaaacgugcccgagaagcagaccagaggcaucuucggcgccaucgccggcuucaucgagaacggcugggagggcaugguggacggcugguacggcuucagacaccagaacagcgagggcagaggccaggccgccgaccugaagagcacccaggccgccaucgaccagaucaacggcaagcugaacagacugaucggcaagaccaacgagaaguuccaccagaucgagaaggaguucagcgagguggagggcagaauccaggaccuggagaaguacguggaggacaccaagaucgaccuguggagcuacaacgccgagcugcugguggcccuggagaaccagcacaccaucgaccugaccgacagcgagaugaacaagcuguucgagaagaccaagaagcagcugagagagaacgccgaggacaugggcaacggcugcuucaagaucuaccacaagugcgacaacgccugcaucggcagcaucagaaacggcaccuacgaccacgacguguacagagacgaggcccugaacaacagauuccagaucaagggcguggagcugaagagcggcuacaaggacuggauccuguggaucagcuucgccaucagcugcuuccugcugugcguggcccugcugggcuucaucaugugggccugccagaagggcaacaucagaugcaacaucugcaucuga

SEQ ID NO: 172642 - RNA, 1701 nt, Artificial Sequence; identical to SEQ ID NO: 170100
  derived and/or modified CDS sequence (opt4) from hemagglutinin__InfluenzaA__AIL93623

SEQ ID NO: 172643 - RNA, 1701 nt, Artificial Sequence
  derived and/or modified CDS sequence (opt4) from hemagglutinin__InfluenzaA__AIL93634
augaaggccauccugguggugcugcuguacaccuucgccaccgccaacgccgacacccugugcaucggcuaccacgccaacaacagcaccgacaccguggacaccgugcuggagaagaacgugaccgugacccacagcgugaaccugcuggaggacaagcacaacggcaagcugugcaagcugagaggcguggccccccugcaccugggcaagugcaacaucgccggcuggauccugggcaaccccgagugcgagagccugagcaccgccagcagcuggagcuacaucguggagaccagcagcagcgacaacggcaccugcuaccccggcgacuucaucaacuacgaggagcugagagagcagcugagcagcgugagcagcuucgagagauucgagaucuuccccaagaccagcagcuggcccaaccacgacagcaacaagggcgugaccgccgccugcccccacgccggcgccaagagcuucuacaagaaccugaucuggcuggugaagaagggcaacagcuaccccaagcugagccagagcuacaucaacgacaagggcaaggaggugcuggugcuguggggcauccaccaccccagcaccaccgccgaccagcagagccuguaccagaacgccgacgccuacguguucgugggcaccagcagauacagcaagaaguucaagcccgagaucgccaucagacccaaggugagagaccaggagggcagaaugaacuacuacuggacccugguggagcccggcgacaagaucaccuucgaggccaccggcaaccugguggugcccagauacgccuucaccauggagagaaacgccggcagcggcaucaucaucagcgacacccccgugcacgacugcaacaccaccugccagacccccgagggcgccaucaacaccagccugcccuuccagaacauccaccccaucaccaucggcaagugccccaaguacgugaagagcaccaagcugagacuggccaccggccugagaaacgugcccagcauccagagcagaggccuguucggcgccaucgccggcuucaucgagggcggcuggaccggcaugguggacggcugguacggcuaccaccaccagaacgagcagggcagcggcuacgccgccgaccugaagagcacccagaacgccaucgacaagaucaccaacaaggugaacagcgugaucgagaagaugaacacccaguucaccgccgugggcaaggaguucaaccaccuggagaagagaaucgagaaccugaacaagaagguggacgacggcuuccuggacaucuggaccuacaacgccgagcugcuggugcugcuggagaacgagagaacccuggacuaccacgacagcaacgugaagaaccuguacgagaaggugagaaaccagcugaagaacaacgccaaggagaucggcaacggcugcuucgaguucuaccacaagugcaacaacaccugcauggagagcgugaagaacggcaccuacgacuaccccaaguacagcgaggaggccaagcugaacagagagaagaucgacggcgugaagcuggagagcaccagaaucuaccagauccuggccaucuacagcaccguggccagcagccuggugcugguggugagccugggcgccaucagcuucuggaugugcagcaacggcagccugcagugcagaaucugcaucuga

SEQ ID NO: 172644 - RNA, 1701 nt, Artificial Sequence
  derived and/or modified CDS sequence (opt4) from hemagglutinin__InfluenzaA__AIL93645
augaagaccaucaucgcccugagcuacauccugugccugguguucgcccagaagcugcccggcaacgacaacagcaccgccacccugugccugggccaccacgccgugcccaacggcaccaucgugaagaccaucaccaacgacagaaucgaggugaccaacgccaccgagcuggugcagaacagcagcaucggcgagaucugcgacagcccccaccagauccuggacggcgagaacugcacccugaucgacgcccugcugggcgacccccagugcgacggcuuccagaacaagaagugggaccuguucguggagagaagcaaggccuacagcaacugcuaccccuacgacgugcccgacuacgccagccugagaagccugguggccagcagcggcacccuggaguucaacaacgagagcuucaacugggccggcgugacccagaacggcaccagcagcgccugcaucagaggcagcaacagcagcuucuucagcagacugaacuggcugacccaccugaacuucagauaccccgcccugaacgugaccaugcccaacaacgagcaguucgacaagcuguacaucuggggcgugcaccaccccggcaccgacaaggaccagaucuuccuguacgcccagagcagcggcagaaucaccgugagcaccaagagaagccagcaggccgugauccccaacaucggcagcagacccagaaucagaaacauccccagcagaaucagcaucuacuggaccaucgugaagcccggcgacauccugcugaucaacagcaccggcaaccugaucgcccccagaggcuacuucaagaucagaagcggcaagagcagcaucaugagaagcgacgcccccaucggcaagugcaagagcgagugcaucacccccaacggcagcauccccaacgacaagcccuuccagaacgugaacagaaucaccuacggcgccugccccagauacgugaagcagagcacccugaagcuggccaccggcaugagaaacgugcccgagaagcagaccagaggcaucuucggcgccaucgccggcuucaucgagaacggcugggagggcaugguggacggcugguacggcuucagacaccagaacagcgagggcagaggccaggccgccgaccugaagagcacccaggccgccaucgaccagaucaacggcaagcugaacagacugaucggcaagaccaacgagaaguuccaccagaucgagaaggaguucagcgagguggagggcagaauccaggaccuggagaaguacguggaggacaccaagaucgaccuguggagcuacaacgccgagcugcugguggcccuggagaaccagcacaccaucgaccugaccgacagcgagaugaacaagcuguucgagaagaccaagaagcagcugagagagaacgccgaggacaugggcaacggcugcuucaagaucuaccacaagugcgacaacgccugcaucggcagcaucagaaacggcaccuacgaccacgacguguacagagacgaggcccugaacaacagauuccagaucaagggcguggagcugaagagcggcuacaaggacuggauccuguggaucagcuucgccaucagcugcuuccugcugugcguggcccugcugggcuucaucaugugggccugccagaagggcaacaucagaugcaacaucugcaucuga

SEQ ID NO: 172645 - RNA, 1701 nt, Artificial Sequence; identical to SEQ ID NO: 170054
  derived and/or modified CDS sequence (opt4) from hemagglutinin__InfluenzaA__AIL93657

SEQ ID NO: 172646 - RNA, 1701 nt, Artificial Sequence; identical to SEQ ID NO: 170054
  derived and/or modified CDS sequence (opt4) from hemagglutinin__InfluenzaA__AIL93669

SEQ ID NO: 172647 - RNA, 1701 nt, Artificial Sequence
  derived and/or modified CDS sequence (opt4) from hemagglutinin__InfluenzaA__AIL93681
augaaggccauccugguggugcugcuguacaccuucgccaccgccaacgccgacacccugugcaucggcuaccacgccaacaacagcaccgacaccguggacaccgugcuggagaagaacgugaccgugacccacagcgugaaccugcuggaggacaagcacaacggcaagcugugcaagcugagaggcguggccccccugcaccugggcaagugcaacaucgccggcuggauccugggcaaccccgagugcgagagccugagcaccgccagcagcuggagcuacaucguggagaccagcagcagcgacaacggcaccugcuaccccggcgacuucaucaacuacgaggagcugagagagcagcugagcagcgugagcagcuucgagagauucgagaucuuccccaagaccagcagcuggcccaaccacgacagcaacaagggcgugaccgccgccugcccccacgccggcgccaagagcuucuacaagaaccugaucuggcuggugaagaagggcaacagcuaccccaagcugagccagagcuacaucaacgacaagggcaaggaggugcuggugcuguggggcauccaccaccccagcaccaccgccgaccagcagagccuguaccagaacgccgacgccuacguguucgugggcaccagcagauacagcaagaaguucaagcccgagaucgccaucagacccaaggugagagaccaggagggcagaaugaacuacuacuggacccugguggagcccggcgacaagaucaccuucgaggccaccggcaaccugguggugcccagauacgccuucaccauggagagaagcgccggcagcggcaucaucaucagcgacacccccgugcacgacugcaacaccaccugccagacccccgagggcgccaucaacaccagccugcccuuccagaacauccaccccaucaccaucggcaagugccccaaguacgugaagagcaccaagcugagacuggccaccggccugagaaacgugcccagcauccagagcagaggccuguucggcgccaucgccggcuucaucgagggcggcuggaccggcaugguggacggcugguacggcuaccaccaccagaacgagcagggcagcggcuacgccgccgaccugaagagcacccagaacgccaucgacaagaucaccaacaaggugaacagcgugaucgagaagaugaacacccaguucaccgccgugggcaaggaguucaaccaccuggagaagagaaucgagaaccugaacaagaagguggacgacggcuuccuggacaucuggaccuacaacgccgagcugcuggugcugcuggagaacgagagaacccuggacuaccacgacagcaacgugaagaaccuguacgagaaggugagaaaccagcugaagaacaacgccaaggagaucggcaacggcugcuucgaguucuaccacaagugcgacaacaccugcauggagagcgugaagaacggcaccuacgacuaccccaaguacagcgaggaggccaagcugaacagagagaagaucgacggcgugaagcuggagagcaccagaaucuaccagauccuggccaucuacagcaccguggccagcagccuggugcugguggugagccugggcgccaucagcuucuggaugugcagcaacggcagccugcagugcagaaucugcaucuga

SEQ ID NO: 172648 - RNA, 1701 nt, Artificial Sequence; identical to SEQ ID NO: 172644
  derived and/or modified CDS sequence (opt4) from hemagglutinin__InfluenzaA__AIL93692

SEQ ID NO: 172649 - RNA, 1701 nt, Artificial Sequence; identical to SEQ ID NO: 172644
  derived and/or modified CDS sequence (opt4) from hemagglutinin__InfluenzaA__AIL93716

SEQ ID NO: 172650 - RNA, 1701 nt, Artificial Sequence; identical to SEQ ID NO: 170054
  derived and/or modified CDS sequence (opt4) from hemagglutinin__InfluenzaA__AIL93728

SEQ ID NO: 172651 - RNA, 1701 nt, Artificial Sequence; identical to SEQ ID NO: 170054
  derived and/or modified CDS sequence (opt4) from hemagglutinin__InfluenzaA__AIL93740

SEQ ID NO: 172652 - RNA, 1701 nt, Artificial Sequence
  derived and/or modified CDS sequence (opt4) from hemagglutinin__InfluenzaA__AIL93752
augaagaccaucaucgcccugagcuacauccugugccugguguucgcccagaagcugcccggcaacgacaacagcaccgccacccugugccugggccaccacgccgugcccaacggcaccaucgugaagaccaucaccaacgacagaaucgaggugaccaacgccaccgagcuggugcagaacagcagcaucggcgagaucugcgacagaccccaccagauccuggacggcgagaacugcacccugaucgacgcccugcugggcgacccccagugcgacggcuuccagaacaagaagugggaccuguucguggagagaagcaaggccuacagcaacugcuaccccuacgacgugcccgacuacgccagccugagaagccugguggccagcagcggcacccuggaguucaacaacgagagcuucaacugggccggcgugacccagaacggcaccagcagcgccugcaucagaggcagcaacagcagcuucuucagcagacugaacuggcugacccaccugaacuucaaguaccccgcccugaacgugaccaugcccaacaacgagcaguucgacaagcuguacaucuggggcgugcaccaccccggcaccgacaaggaccagaucuuccuguacgcccagagcagcggcagaaucaccgugagcaccaagaagagccagcaggccgugauccccaacaucggcagcagacccagaaucagaaacauccccagcagaaucagcaucuacuggaccaucgugaagcccggcgacauccugcugaucaacagcaccggcaaccugaucgcccccagaggcuacuucaagaucagaagcggcaagagcagcaucaugagaagcgacgcccccaucggcaagugcaagagcgagugcaucacccccaacggcagcauccccaacgacaagcccuuccagaacgugaacagaaucaccuacggcgccugccccagauacgugaagcagagcacccugaagcuggccaccggcaugagaaacgugcccgagaagcagaccagaggcaucuucggcgccaucgccggcuucaucgagaacggcugggagggcaugguggacggcugguacggcuucagacaccagaacagcgagggcagaggccaggccgccgaccugaagagcacccaggccgccaucgaccagaucaacggcaagcugaacagacugaucggcaagaccaacgagaaguuccaccagaucgagaaggaguucagcgagguggagggcagaauccaggaccuggagaaguacguggaggacaccaagaucgaccuguggagcuacaacgccgagcugcugguggcccuggagaaccagcacaccaucgaccugaccgacagcgagaugaacaagcuguucgagaagaccaagaagcagcugagagagaacgccgaggacaugggcaacggcugcuucaagaucuaccacaagugcgacaacgccugcaucggcagcaucagaaacggcaccuacgaccacgacguguacagagacgaggcccugaacaacagauuccagaucaagggcguggagcugaagagcggcuacaaggacuggauccuguggaucagcuucgccaucagcugcuuccugcugugcguggcccugcugggcuucaucaugugggccugccagaagggcaacaucagaugcaacaucugcaucuga

SEQ ID NO: 172653 - RNA, 1701 nt, Artificial Sequence
  derived and/or modified CDS sequence (opt4) from hemagglutinin__InfluenzaA__AIL93764
augaagaccaucaucgcccugagcuacauccugugccugguguucacccagaagcugcccggcaacgacaacagcaccgccacccugugccugggccaccacgccgugcccaacggcaccaucgugaagaccaucaccaacgacagaaucgaggugaccaacgccaccgagcuggugcagaacagcagcaucggcgagaucugcgacagcccccaccagauccuggacggcgagaacugcacccugaucgacgcccugcugggcgacccccagugcgacggcuuccagaacaagaagugggaccuguucguggagagaagcaaggccuacagcaacugcuaccccuacgacgugcccgacuacgccagccugagaagccugguggccagcagcggcacccuggaguucaacaacgagagcuucaacugggccggcgugacccagaacggcaccagcagcgccugcaucagaggcagcaacagcagcuucuucagcagacugaacuggcugacccaccugaacuucaaguaccccgcccugaacgugaccaugcccaacaacgagcaguucgacaagcuguacaucuggggcgugcaccaccccggcaccgacaaggaccagaucuuccuguacgcccagagcagcggcagaaucaccgugagcaccaagagaagccagcaggccgugauccccaacaucggcagcagacccagaaucagaaacauccccagcagaaucagcaucuacuggaccaucgugaagcccggcgacauccugcugaucaacagcaccggcaaccugaucgcccccagaggcuacuucaagaucagaagcggcaagagcagcaucaugagaagcgacgcccccaucggcaagugcaagagcgagugcaucacccccaacggcagcauccccaacgacaagcccuuccagaacgugaacagaaucaccuacggcgccugccccagauacgugaagcagagcacccugaagcuggccaccggcaugagaaacgugcccgagaagcagaccagaggcaucuucggcgccaucgccggcuucaucgagaacggcugggagggcaugguggacggcugguacggcuucagacaccagaacagcgagggcagaggccaggccgccgaccugaagagcacccaggccgccaucgaccagaucaacggcaagcugaacagacugaucggcaagaccaacgagaaguuccaccagaucgagaaggaguucagcgagguggagggcagaauccaggaccuggagaaguacguggaggacaccaagaucgaccuguggagcuacaacgccgagcugcugguggcccuggagaaccagcacaccaucgaccugaccgacagcgagaugaacaagcuguucgagaagaccaagaagcagcugagagagaacgccgaggacaugggcaacggcugcuucaagaucuaccacaagugcgacaacgccugcaucggcagcaucagaaacgagaccuacgaccacgacguguacagagacgaggcccugaacaacagauuccagaucaagggcguggagcugaagagcggcuacaaggacuggauccuguggaucagcuucgccaucagcugcuuccugcugugcguggcccugcugggcuucaucaugugggccugccagaagggcaacaucagaugcaacaucugcaucuga

SEQ ID NO: 172654 - RNA, 1701 nt, Artificial Sequence; identical to SEQ ID NO: 170054
  derived and/or modified CDS sequence (opt4) from hemagglutinin__InfluenzaA__AIL93776

SEQ ID NO: 172655 - RNA, 1701 nt, Artificial Sequence; identical to SEQ ID NO: 170054
  derived and/or modified CDS sequence (opt4) from hemagglutinin__InfluenzaA__AIL93788

SEQ ID NO: 172656 - RNA, 1701 nt, Artificial Sequence; identical to SEQ ID NO: 170054
  derived and/or modified CDS sequence (opt4) from hemagglutinin__InfluenzaA__AIL93812

SEQ ID NO: 172657 - RNA, 1701 nt, Artificial Sequence; identical to SEQ ID NO: 170054
  derived and/or modified CDS sequence (opt4) from hemagglutinin__InfluenzaA__AIL93824

SEQ ID NO: 172658 - RNA, 1701 nt, Artificial Sequence; identical to SEQ ID NO: 172647
  derived and/or modified CDS sequence (opt4) from hemagglutinin__InfluenzaA__AIL93836

SEQ ID NO: 172659 - RNA, 1701 nt, Artificial Sequence
  derived and/or modified CDS sequence (opt4) from hemagglutinin__InfluenzaA__AIL93847
augaaggccauccugguggugcugcuguacaccuucgccaccgccaacgccgacacccugugcaucggcuaccacgccaacaacagcaccgacaccguggacaccgugcuggagaagaacgugaccgugacccacagcgugaaccugcuggaggacaagcacaacggcaagcugugcaagcugagaggcguggccccccugcaccugggcaagugcaacaucgccggcuggauccugggcaaccccgagugcgagagccugagcaccgccagcagcuggagcuacaucguggagaccagcagcagcgacaacggcaccugcuaccccggcgacuucaucaacuacgaggagcugagagagcagcugagcagcgugagcagcuucgagagauucgagaucuuccccaagaccagcagcuggcccaaccacgacagcaacaagggcgugaccgccgccugcccccacgccggcgccaagagcuucuacaagaaccugaucuggcuggugaagaagggcaacagcuaccccaagcugagccagagcuacaucaacgacaagggcaaggaggugcuggugcuguggggcauccaccaccccagcaccaccgccgaccagcagagccuguaccagaacgccgacgccuacguguucgugggcaccagcagauacagcaagaaguucaagcccgagaucgccaucagacccaaggugagagaccaggagggcagaaugaacuacuacuggacccugguggagcccggcgacaagaucaccuucgaggccaccggcaaccugguggugcccagauacgccuucaccauggagagaagcgccggcagcggcaucaucaucagcgacacccccgugcacgacugcaacaccaccugccagacccccgagggcgccaucaacaccagccugcccuuccagaacauccaccccaucaccaucggcaagugccccaaguacgugaagagcaccaagcugagacuggccaccggccugagaaacgugcccagcauccagagcagaggccuguucggcgccaucgccggcuucaucgagggcggcuggaccggcaugguggacggcugguacggcuaccaccaccagaacgagcagggcagcggcuacgccgccgaccugaagagcacccagaacgccaucgacaagaucaccaacaaggugaacagcgugaucgagaagaugaacacccaguucaccgccgugggcaaggaguucaaccaccuggagaagagaaucgagaaccugaacaagaagguggacgacggcuuccuggacaucuggaccuacaacgccgagcugcuggugcugcuggagaacgagagaacccuggacuaccacgacagcaacgugaagaaccuguacgagaaggugagaaaccagcugaagaacaacgccaaggagaucggcaacggcugcuucgaguucuaccacaagugcgacaacaccugcauggagagcgugaagaacggcaccuacgacuaccccaaguacagcgaggaggccaagcugaacagagagaagaucgacggcgugaagcuggagagcaccagaaucuaccagauccuggccaucuacagcaccguggccagcagccuggugcugguggugagccugggcgccaucugcuucuggaugugcagcaacggcagccugcagugcagaaucugcaucuga

SEQ ID NO: 172660 - RNA, 1701 nt, Artificial Sequence; identical to SEQ ID NO: 172644
  derived and/or modified CDS sequence (opt4) from hemagglutinin__InfluenzaA__AIL93858

SEQ ID NO: 172661 - RNA, 1701 nt, Artificial Sequence; identical to SEQ ID NO: 170054
  derived and/or modified CDS sequence (opt4) from hemagglutinin__InfluenzaA__AIL93870

SEQ ID NO: 172662 - RNA, 1701 nt, Artificial Sequence
  derived and/or modified CDS sequence (opt4) from hemagglutinin__InfluenzaA__AIL93882
augaagaccaucaucgcccugagcuacauccugugccugguguucgcccagaagccccccggcaacgacaacagcaccgccacccugugccugggccaccacgccgugcccaacggcaccaucgugaagaccaucaccaacgacagaaucgaggugaccaacgccaccgagcuggugcagaacagcagcaucggcgagaucugcgacagcccccaccagauccuggacggcgagaacugcacccugaucgacgcccugcugggcgacccccagugcgacggcuuccagaacaagaagugggaccuguucguggagagaagcaaggccuacagcaacugcuaccccuacgacgugcccgacuacgccagccugagaagccugguggccagcagcggcacccuggaguucaacaacgagagcuucaacugggccggcgugacccagaacggcaccagcagcgccugcaucagaggcagcaacagcagcuucuucagcagacugaacuggcugacccaccugaacuucaaguaccccgcccugaacgugaccaugcccaacaacgagcaguucgacaagcuguacaucuggggcgugcaccaccccggcaccgacaaggaccagaucuuccuguacgcccagagcagcggcagaaucaccgugagcaccaagagaagccagcaggccgugauccccaacaucggcagcagacccagaaucagaaacauccccagcagaaucagcaucuacuggaccaucgugaagcccggcgacauccugcugaucaacagcaccggcaaccugaucgcccccagaggcuacuucaagaucagaagcggcaagagcagcaucaugagaagcgacgcccccaucggcaagugcaagagcgagugcaucacccccaacggcagcauccccaacgacaagcccuuccagaacgugaacagaaucaccuacggcgccugccccagauacgugaagcagagcacccugaagcuggccaccggcaugagaaacgugcccgagaagcagaccagaggcaucuucggcgccaucgccggcuucaucgagaacggcugggagggcaugguggacggcugguacggcuucagacaccagaacagcgagggcagaggccaggccgccgaccugaagagcacccaggccgccaucgaccagaucaacggcaagcugaacagacugaucggcaagaccaacgagaaguuccaccagaucgagaaggaguucagcgagguggagggcagaauccaggaccuggagaaguacguggaggacaccaagaucgaccuguggagcuacaacgccgagcugcugguggcccuggagaaccagcacaccaucgaccugaccgacagcgagaugaacaagcuguucgagaagaccaagaagcagcugagagagaacgccgaggacaugggcaacggcugcuucaagaucuaccacaagugcgacaacgccugcaucggcagcaucagaaacggcaccuacgaccacgacguguacagagacgaggcccugaacaacagauuccagaucaagggcguggagcugaagagcggcuacaaggacuggauccuguggaucagcuucgccaucagcugcuuccugcugugcguggcccugcugggcuucaucaugugggccugccagaagggcaacaucagaugcaacaucugcaucuga

SEQ ID NO: 172663 - RNA, 1701 nt, Artificial Sequence; identical to SEQ ID NO: 170054
  derived and/or modified CDS sequence (opt4) from hemagglutinin__InfluenzaA__AIL93894

SEQ ID NO: 172664 - RNA, 1701 nt, Artificial Sequence
  derived and/or modified CDS sequence (opt4) from hemagglutinin__InfluenzaA__AIL93906
augaaggccauccugguggugcugcuguacaccuucgccaccgccaacgccgacacccugugcaucggcuaccacgccaacaacagcaccgacaccguggacaccgugcuggagaagaacgugaccgugacccacagcaucaaccugcuggaggacaagcacaacggcaagcugugcaagcugagaggcguggccccccugcaccugggcaagugcaacaucgccggcuggauccugggcaaccccgagugcgagagccugagcaccgccagcagcuggagcuacaucguggagaccagcagcagcgacaacggcaccugcuaccccggcgacuucaucaacuacgaggagcugagagagcagcugagcagcgugagcagcuucgagagauucgagauguuccccaagaccagcagcuggcccaaccacgacagcaacaagggcgugaccgccgccugcccccacgccggcgccaagagcuucuacaagaaccugaucuggcuggugaagaagggcaacagcuaccccaagcugagcaagagcuacaucaacgacaagggcaaggaggugcuggugcuguggggcauccaccaccccagcaccaccgccgaccagcagagccuguaccagaacgccgacgccuacguguucgugggcaccagcaaguacagcaagaaguucaagcccgagaucgccaucagacccaaggugagagaccaggagggcagaaugaacuacuacuggacccugaucgagcccggcgacaagaucaccuucgaggccaccggcaaccugguggugcccagauacgccuucgccauggagagaaacgccggcagcggcaucaucaucagcgacacccccgugcacgacugcaacaccaccugccagacccccgagggcgccaucaacaccagccugcccuuccagaacauccaccccaucaccaucggcaagugccccaaguacgugaagagcaccaagcugagacuggccaccggccugagaaacgugcccagcauccagagcagaggccuguucggcgccaucgccggcuucaucgagggcggcuggaccggcaugguggacggcugguacggcuaccaccaccagaacgagcagggcagcggcuacgccgccgaccugaagagcacccagaacgccaucgacaagaucaccaacaaggugaacagcgugaucgagaagaugaacacccaguucaccgccgugggcaaggaguucaaccaccuggagaagagaaucgagaaccugaacaagaagguggacgacggcuuccuggacaucuggaccuacaacgccgagcugcuggugcugcuggagaacgagagaacccuggacuaccacgacagcaacgugaagaaccuguacgagaaggugagaaaccagcugaagaacaacgccaaggagaucggcaacggcugcuucgaguucuaccacaagugcgacaacaccugcauggagagcgugaagaacggcaccuacgacuaccccaaguacagcgaggaggccaagcugaacagagagaagaucgacggcgugaagcuggagagcaccagaaucuaccagauccuggccaucuacagcaccguggccagcagccuggugcugguggugagccugggcgccaucagcuucuggaugugcagcaacggcagccugcagugcagaaucugcaucuga

SEQ ID NO: 172665 - RNA, 1701 nt, Artificial Sequence
  derived and/or modified CDS sequence (opt4) from hemagglutinin__InfluenzaA__AIL93917
augaagaccaucaucgcccugagcuacauccugugccugguguucgcccagaagcugcccggcaacgacaacagcaccgccacccugugccugggccaccacgccgugcccaacggcaccaucgugaagaccaucaccaacgacagaaucgaggugaccaacgccaccgagcuggugcagaacagcagcaucggcgagaucugcgacagaccccaccagauccuggacggcgagaacugcacccugaucgacgcccugcugggcgacccccagugcgacggcuuccagaacaagaagugggaccuguucguggagagaagcaaggccuacagcaacugcuaccccuacgacgugcccgacuacgccagccugagaagccugguggccagcagcggcacccuggaguucaacaacgagagcuucaacugggccggcgugacccagaacggcaccagcagcgccugcaucagaggcagcaacagcagcuucuucagcagacugaacuggcugacccaccugaacuucaaguaccccgcccugaacgugaccaugcccaacaacgagcaguucgacaagcuguacaucuggggcgugcaccaccccggcaccgacaaggaccagaucuuccuguacgcccagagcagcggcagaaucaccgugagcaccaagagaagccagcaggccgugauccccaacaucggcagcagacccagaaucagaaacauccccagcagaaucagcaucuacuggaccaucgugaagcccggcgacauccugcugaucaacagcaccggcaaccugaucgcccccagaggcuacuucaagaucagaagcggcaagagcagcaucaugagaagcgacgcccccaucggcaagugcaagagcgagugcaucacccccaacggcagcauccccaacgacaagcccuuccagaacgugaacagaaucaccuacggcgccugccccagauacgugaagcagagcacccugaagcuggccaccggcaugagaaacgugcccgagaagcagaccagaggcaucuucggcgccaucgccggcuucaucgagaacggcugggagggcaugguggacggcugguacggcuucagacaccagaacagcgagggcagaggccaggccgccgaccugaagagcacccaggccgccaucgaccagaucaacggcaagcugaacagacugaucggcaagaccaacgagaaguuccaccagaucgagaaggaguucagcgagguggagggcagaauccaggaccuggagaaguacguggaggacaccaagaucgaccuguggagcuacaacgccgagcugcugguggcccuggagaaccagcacaccaucgaccugaccgacagcgagaugaacaagcuguucgagaagaccaagaagcagaugagagagaacgccgaggacaugggcaacggcugcuucaagaucuaccacaagugcgacaacgccugcaucggcagcaucagaaacggcaccuacgaccacgacguguacagagacgaggcccugaacaacagauuccagaucaagggcguggagcugaagagcggcuacaaggacuggauccuguggaucagcuucgccaucagcugcuuccugcugugcguggcccugcugggcuucaucaugugggccugccagaagggcaacaucagaugcaacaucugcaucuga

SEQ ID NO: 172666 - RNA, 1701 nt, Artificial Sequence; identical to SEQ ID NO: 170100
  derived and/or modified CDS sequence (opt4) from hemagglutinin__InfluenzaA__AIL93929

SEQ ID NO: 172667 - RNA, 1701 nt, Artificial Sequence
  derived and/or modified CDS sequence (opt4) from hemagglutinin__InfluenzaA__AIL93940
augaaggccauccugguggugcugcuguacaccuucgccaccgccaacgccgacacccugugcaucggcuaccacgccaacaacagcaccgacaccguggacaccgugcuggagaagaacgugaccgugacccacagcgugaaccugcuggaggacaagcacaacggcaagcugugcaagcugagaggcgugagcccccugcaccugggcaagugcaacaucgccggcuggauccugggcaaccccgagugcgagagccugagcaccgccagcagcuggagcuacaucguggagaccagcagcagcgacaacggcaccugcuaccccggcgacuucaucaacuacgaggagcugagagagcagcugagcagcgugagcagcuucgagagauucgagaucuuccccaagaccagcagcuggcccaaccacgacagcaacaagggcgugaccgccgccugcccccacgccggcgccaagagcuucuacaagaaccugaucuggcuggugaagaagggcaacagcuaccccaagcugagccagagcuacaucaacgacaagggcaaggaggugcuggugcuguggggcauccaccaccccagcaccaccgccgaccagcagagccuguaccagaacgccgacgccuacguguucgugggcaccagcagauacagcaagaaguucaagcccgagaucgccaucagacccaaggugagagaccaggagggcagaaugaacuacuacuggacccugguggagcccggcgacaagaucaccuucgaggccaccggcaaccugguggugcccagauacgccuucaccauggagagaaacgccggcagcggcaucaucaucagcgacacccccgugcacgacugcaacaccaccugccagacccccgagggcgccaucaacaccagccugcccuuccagaacauccaccccaucaccaucggcaagugccccaaguacgugaagagcaccaagcugagacuggccaccggccugagaaacgugcccagcauccagagcagaggccuguucggcgccaucgccggcuucaucgagggcggcuggaccggcaugguggacggcugguacggcuaccaccaccagaacgagcagggcagcggcuacgccgccgaccugaagagcacccagaacgccaucgacaagaucaccaacaaggugaacagcgugaucgagaagaugaacacccaguucaccgccgugggcaaggaguucaaccaccuggagaagagaaucgagaaccugaacaagaagguggacgacggcuuccuggacaucuggaccuacaacgccgagcugcuggugcugcuggagaacgagagaacccuggacuaccacgacagcaacgugaagaaccuguacgagaaggugagaaaccagcugaagaacaacgccaaggagaucggcaacggcugcuucgaguucuaccacaagugcgacaacaccugcauggagagcgugaagaacggcaccuacgacuaccccaaguacagcgaggaggccaagcugaacagagagaagaucgacggcgugaagcuggagagcaccagaaucuaccagauccuggccaucuacagcaccguggccagcagccuggugcugguggugagccugggcgccaucagcuucuggaugugcagcaacggcagccugcagugcagaaucugcaucuga

SEQ ID NO: 172668 - RNA, 1701 nt, Artificial Sequence; identical to SEQ ID NO: 170054
  derived and/or modified CDS sequence (opt4) from hemagglutinin__InfluenzaA__AIL93951

SEQ ID NO: 172669 - RNA, 1701 nt, Artificial Sequence; identical to SEQ ID NO: 170054
  derived and/or modified CDS sequence (opt4) from hemagglutinin__InfluenzaA__AIL93963

SEQ ID NO: 172670 - RNA, 1701 nt, Artificial Sequence; identical to SEQ ID NO: 169918
  derived and/or modified CDS sequence (opt4) from hemagglutinin__InfluenzaA__AIL93975

SEQ ID NO: 172671 - RNA, 1701 nt, Artificial Sequence; identical to SEQ ID NO: 172647
  derived and/or modified CDS sequence (opt4) from hemagglutinin__InfluenzaA__AIL93987

SEQ ID NO: 172672 - RNA, 1701 nt, Artificial Sequence; identical to SEQ ID NO: 170054
  derived and/or modified CDS sequence (opt4) from hemagglutinin__InfluenzaA__AIL93998

SEQ ID NO: 172673 - RNA, 1701 nt, Artificial Sequence; identical to SEQ ID NO: 172644
  derived and/or modified CDS sequence (opt4) from hemagglutinin__InfluenzaA__AIL94010

SEQ ID NO: 172674 - RNA, 1701 nt, Artificial Sequence; identical to SEQ ID NO: 172644
  derived and/or modified CDS sequence (opt4) from hemagglutinin__InfluenzaA__AIL94022

SEQ ID NO: 172675 - RNA, 1701 nt, Artificial Sequence
  derived and/or modified CDS sequence (opt4) from hemagglutinin__InfluenzaA__AIL94046
augaagaccaucaucgcccugagcuacauccugugccugguguucgcccagaagcugcccggcaacgacaacagcaccgccacccugugccugggccaccacgccgugcccaacggcaccaucgugaagaccaucaccaacgacagaaucgaggugaccaacgccaccgagcuggugcagaacagcagcaucggcgagaucugcgacagaccccaccagauccuggacggcgagaacugcacccugaucgacgcccugcugggcgacccccagugcgacggcuuccagaacaagaagugggaccuguucguggagagaagcaaggccuacagcaacugcuaccccuacgacgugcccgacuacgccagccugagaagccugguggccagcagcggcacccuggaguucaacaacgagagcuucaacugggccggcgugacccagaacggcaccagcagcgccugcaucagaggcagcaacagcagcuucuucagcagacugaacuggcugacccaccugaacuucaaguaccccgcccugaacgugaccaugcccaacaacgagcaguucgacaagcuguacaucuggggcgugcaccaccccggcaccgacaaggaccagaucuuccuguacgcccagagcagcggcagaaucaccgugagcaccaagagaagccagcaggccgugauccccaacaucggcagcagacccagaaucagaaacauccccagcagaaucagcaucuacuggaccaucgugaagcccggcgacauccugcugaucaacagcaccggcaaccugaucgcccccagaggcuacuucaagaucagaagcggcaagagcagcaucaugagaagcgacgcccccaucggcaagugcaagagcgagugcaucacccccaacggcagcauccccaacgacaagcccuuccagaacgugaacagaaucaccuacggcgccugccccagauacgugaagcagagcacccugaagcuggccaccggcaugagaaacgugcccgagaagcagaccagaggcaucuucggcgccaucgccggcuucaucgagaacggcugggagggcaugguggacggcugguacggcuucagacaccagaacagcgagggcagaggccaggccgccgaccugaagagcacccaggccgccaucgaccagaucaacggcaagcugaacagacugaucggcaagaccaacgagaaguuccaccagaucgagaaggaguucagcgagguggagggcagaauccaggaccuggagaaguacguggaggacaccaagaucgaccuguggagcuacaacgccgagcugcugguggcccuggagaaccagcacaccaucgaccugaccgacagcgagaugaacaagcuguucgagaagaccaagaagcagcugagagagaacgccgaggacaugggcaacggcugcuucaagaucuaccacaagugcgacaacgccugcaucggcagcaucagaaacggcaccuacgaccacgacguguacagagacgaggcccugaacaacagauuccagaucaagggcguggagcugaagagcggcuacaaggacuggauccuguggaucagcuucgccaucagcugcuuccugcugugcguggcccugcugggcuucaucaugugggccugccagaagggcaacaucagaugcaacaucugcaucuga

SEQ ID NO: 172676 - RNA, 1701 nt, Artificial Sequence
  derived and/or modified CDS sequence (opt4) from hemagglutinin__InfluenzaA__AIL94058
augaaggccauccugguggugcugcuguacaccuucgcccccgccaacgccgacacccugugcaucggcuaccacgccaacaacagcaccgacaccguggacaccgugcuggagaagaacgugaccgugacccacagcgugaaccugcuggaggacaagcacaacggcaagcugugcaagcugagaggcguggccccccugcaccugggcaagugcaacaucgccggcuggauccugggcaaccccgagugcgagagccugagcaccgccagcagcuggagcuacaucguggagaccagcagcagcgacaacggcaccugcuaccccggcgacuucaucaacuacgaggagcugagagagcagcugagcagcgugagcagcuucgagagauucgagaucuuccccaagaccagcagcuggcccaaccacgacagcaacaagggcgugaccgccgccugcccccacgccggcgccaagagcuucuacaagaaccugaucuggcuggugaagaagggcaacagcuaccccaagcugagccagagcuacaucaacgacaagggcaaggaggugcuggugcuguggggcauccaccaccccagcaccaccgccgaccagcagagccuguaccagaacgccgacgccuacguguucgugggcaccagcagauacagcaagaaguucaagcccgagaucgccaucagacccaaggugagagaccaggagggcagaaugaacuacuacuggacccugguggagcccggcgacaagaucaccuucgaggccaccggcaaccugguggugcccagauacgccuucaccaucgagagaagcgccggcagcggcaucaucaucagcgacacccccgugcacgacugcaacaccaccugccagacccccgagggcgccaucaacaccagccugcccuuccagaacauccaccccaucaccaucggcaagugccccaaguacgugaagagcaccaagcugagacuggccaccggccugagaaacgugcccagcauccagagcagaggccuguucggcgccaucgccggcuucaucgagggcggcuggaccggcaugguggacggcugguacggcuaccaccaccagaacgagcagggcagcggcuacgccgccgaccugaagagcacccagaacgccaucgacaagaucaccaacaaggugaacagcgugaucgagaagaugaacacccaguucaccgccgugggcaaggaguucaaccaccuggagaagagaaucgagaaccugaacaagaagguggacgacggcuuccuggacaucuggaccuacaacgccgagcugcuggugcugcuggagaacgagagaacccuggacuaccacgacagcaacgugaagaaccuguacgagaaggugagaaaccagcugaagaacaacgccaaggagaucggcaacggcugcuucgaguucuaccacaagugcgacaacaccugcauggagagcgugaagaacggcaccuacgacuaccccaaguacagcgaggaggccaagcugaacagagagaagaucgacggcgugaagcuggagagcaccagaaucuaccagauccuggccaucuacagcaccguggccagcagccuggugcugguggugagccugggcgccaucagcuucuggaugugcagcaacggcagccugcagugcagaaucugcaucuga

SEQ ID NO: 172677 - RNA, 1701 nt, Artificial Sequence; identical to SEQ ID NO: 172647
  derived and/or modified CDS sequence (opt4) from hemagglutinin__InfluenzaA__AIL94069

SEQ ID NO: 172678 - RNA, 1701 nt, Artificial Sequence; identical to SEQ ID NO: 170100
  derived and/or modified CDS sequence (opt4) from hemagglutinin__InfluenzaA__AIL94080

SEQ ID NO: 172679 - RNA, 1701 nt, Artificial Sequence; identical to SEQ ID NO: 172644
  derived and/or modified CDS sequence (opt4) from hemagglutinin__InfluenzaA__AIL94235

SEQ ID NO: 172680 - RNA, 1701 nt, Artificial Sequence; identical to SEQ ID NO: 170100
  derived and/or modified CDS sequence (opt4) from hemagglutinin__InfluenzaA__AIL94247

SEQ ID NO: 172681 - RNA, 1701 nt, Artificial Sequence
  derived and/or modified CDS sequence (opt4) from hemagglutinin__InfluenzaA__AIL94258
augaagaccaucaucgcccugagcuacauccugugccugguguucacccagaagcugcccggcaacgacaacagcaccgccacccugugccugggccaccacgccgugcccaacggcaccaucgugaagaccaucaccaacgacagaaucgaggugaccaacgccaccgagcuggugcagaacagcagcaucggcgagaucugcgacagcccccaccagauccuggacggcgagaacugcacccugaucgacgcccugcugggcgacccccagugcgacggcuuccagaacaagaagugggaccuguucguggagagaagcaaggccuacagcaacugcuaccccuacgacgugcccgacuacgccagccugagaagccugguggccagcagcggcacccuggaguucaacaacgagagcuucaacugggccggcgugacccagaacggcaccagcagcgccugcaucagaggcagcaacagcagcuucuucagcagacugaacuggcugacccaccugaacuucaaguaccccgcccugaacgugaccaugcccaacaacgagcaguucgacaagcuguacaucuggggcgugcaccaccccggcaccgacaaggaccagaucuuccuguacgcccagagcagcggcagaaucaccgugagcaccaagagaagccagcaggccgugauccccaacaucggcagcagacccagaaucagaaacauccccagcagaaucagcaucuacuggaccaucgugaagcccggcgacauccugcugaucaacagcaccggcaaccugaucgcccccagaggcuacuucaagaucagaagcggcaagagcagcaucaugagaagcgacgcccccaucggcaagugcaagagcgagugcaucacccccaacggcagcauccccaacgacaagcccuuccagaacgugaacagaaucaccuacggcgccugccccagauacgugaagcagagcacccugaagcuggccaccggcaugagaaacgugcccgagaagcagaccagaggcaucuucggcgccaucgccggcuucaucgagaacggcugggagggcaugguggacggcugguacggcuucagacaccagaacagcgagggcagaggccaggccgccgaccugaagagcacccaggccgccaucgaccagaucaacggcaagcugaacagacugaucggcaagaccaacgagaaguuccaccagaucgagaaggaguucagcgagguggagggcagaauccaggaccuggagaaguacguggaggacaccaagaucgaccuguggagcuacaacgccgagcugcugguggcccuggagaaccagcacaccaucgaccugaccgacagcgagaugaacaagcuguucgagaagaccaagaagcagcugagagagaacgccgaggacaugggcaacggcugcuucaagaucuaccacaagugcgacaacgccugcaucggcagcaucagaaacggcaccuacgaccacgacguguacagagacgaggcccugaacaacagauuccagaucaagggcguggagcugaagagcggcuacaaggacuggauccuguggaucagcuucgccaucagcugcuuccugcugugcguggcccugcugggcuucaucaugugggccugccagaagggcaacaucagaugcaacaucugcaucuga

SEQ ID NO: 172682 - RNA, 1701 nt, Artificial Sequence
  derived and/or modified CDS sequence (opt4) from hemagglutinin__InfluenzaA__AIL94270
augaagaccaucaucgcccugagcuacauccugugccugguguucgcccagaagcugcccggcaacgacaacagcaccgccacccugugccugggccaccacgccgugcccaacggcaccaucgugaagaccaucaccaacgacagaaucgaggugaccaacgccaccgagcuggugcagaacagcagcaucggcgagaucugcgacagcccccaccagauccuggacggcgagaacugcacccugaucgacgcccugcugggcgacccccagugcgacggcuuccagaacaagaagugggaccuguucguggagagaagcaaggccuacagcaacugcuaccccuacgacgugcccgacuacgccagccugagaagccugguggccagcagcggcacccuggaguucaacaacgagagcuucaacugggccggcgugacccagaacggcaccagcagcgccugcaucagaggcagcaacagcagcuucuucagcagacugaacuggcugacccaccugaacuucaaguaccccgcccugaacgugaccaugcccaacaacgagcaguucgacaagcuguacaucuggggcgugcaccaccccggcaccgacaaggaccagaucuuccuguacgcccagagcagcggcagaaucaccgugagcaccaagagaagccagcaggccgugauccccaacaucggcagcagacccagaaucagaaacauccccagcagaaucagcaucuacuggaccaucgugaagcccggcgacauccugcugaucaacagcaccggcaaccugaucgcccccagaggcuacuucaagaucagaagcggcaagagcagcaucaugagaagcgacgcccccaucggcaagugcaacagcgagugcaucacccccaacggcagcauccccaacgacaagcccuuccagaacgugaacagaaucaccuacggcgccugccccagauacgugaagcagagcacccugaagcuggccaccggcaugagaaacgugcccgagaagcagaccagaggcaucuucggcgccaucgccggcuucaucgagaacggcugggagggcaugguggacggcugguacggcuucagacaccagaacagcgagggcagaggccaggccgccgaccugaagagcacccaggccgccaucgaccagaucaacggcaagcugaacagacugaucggcaagaccaacgagaaguuccaccagaucgagaaggaguucagcgagguggagggcagaauccaggaccuggagaaguacguggaggacaccaagaucgaccuguggagcuacaacgccgagcugcugguggcccuggagaaccagcacaccaucgaccugaccgacagcgagaugaacaagcuguucgagaagaccaagaagcagcugagagagaacgccgaggacaugggcaacggcugcuucaagaucuaccacaagugcgacaacgccugcaucggcagcaucagaaacggcaccuacgaccacgacguguacagagacgaggcccugaacaacagauuccagaucaagggcguggagcugaagagcggcuacaaggacuggauccuguggaucagcuucgccaucagcugcuuccugcugugcguggcccugcugggcuucaucaugugggccugccagaagggcaacaucagaugcaacaucugcaucuga

SEQ ID NO: 172683 - RNA, 1701 nt, Artificial Sequence; identical to SEQ ID NO: 170054
  derived and/or modified CDS sequence (opt4) from hemagglutinin__InfluenzaA__AIL94282

SEQ ID NO: 172684 - RNA, 1701 nt, Artificial Sequence; identical to SEQ ID NO: 170054
  derived and/or modified CDS sequence (opt4) from hemagglutinin__InfluenzaA__AIL94294

SEQ ID NO: 172685 - RNA, 1701 nt, Artificial Sequence
  derived and/or modified CDS sequence (opt4) from hemagglutinin__InfluenzaA__AIL94306
augaagaccaucaccgcccugagcuacauccugugccuggccuucgcccagaagccccccggcaacgacaacagcaccgccacccugugccugggccaccacgccgugcccaacggcaccaucgugaagaccaucaccaacgacagaaucgaggugaccaacgccaccgagcuggugcagaacagcagcaucggcgagaucugcgacagcccccaccagauccuggacggcgagaacugcacccugaucgacgcccugcugggcgacccccagugcgacggcuuccagaacaagaagugggaccuguucguggagagaagcaaggccuacagcaacugcuaccccuacgacgugcccgacuacgccagccugagaagccugguggccagcagcggcacccuggaguucaacaacgagagcuucaacugggccggcgugacccagaacggcaccagcagcgccugcaucagaggcagcaacagcagcuucuucagcagacugaacuggcugacccaccugaacuucaaguaccccgcccugaacgugaccaugcccaacaacgagcaguucgacaagcuguacaucuggggcgugcaccaccccggcaccgacaaggaccagaucuuccuguacgcccagagcagcggcagaaucaccgugagcaccaagagaagccagcaggccgugauccccaacaucggcagcagacccagaaucagaaacauccccagcagaaucagcaucuacuggaccaucgugaagcccggcgacauccugcugaucaacagcaccggcaaccugaucgcccccagaggcuacuucaagaucagaagcggcaagagcagcaucaugagaagcgacgcccccaucggcaagugcaagagcgagugcaucacccccaacggcagcauccccaacgacaagcccuuccagaacgugaacagaaucaccuacggcgccugccccagauacgugaagcagagcacccugaagcuggccaccggcaugagaaacgugcccgagaagcagaccagaggcaucuucggcgccaucgccggcuucaucgagaacggcugggagggcaugguggacggcugguacggcuucagacaccagaacagcgagggcagaggccaggccgccgaccugaagagcacccaggccgccaucgaccagaucaacggcaagcugaacagacugaucggcaagaccaacgagaaguuccaccagaucgagaaggaguucagcgagguggagggcagaauccaggaccuggagaaguacguggaggacaccaagaucgaccuguggagcuacaacgccgagcugcugguggcccuggagaaccagcacaccaucgaccugaccgacagcgagaugaacaagcuguucgagaagaccaagaagcagcugagagagaacgccgaggacaugggcaacggcugcuucaagaucuaccacaagugcgacaacgccugcaucggcagcaucagaaacggcaccuacgaccacgacguguacagagacgaggcccugaacaacagauuccagaucaagggcguggagcugaagagcggcuacaaggacuggauccuguggaucagcuucgccaucagcugcuuccugcugugcguggcccugcugggcuucaucaugugggccugccagaagggcaacaucagaugcaacaucugcaucuga

SEQ ID NO: 172686 - RNA, 1701 nt, Artificial Sequence
  derived and/or modified CDS sequence (opt4) from hemagglutinin__InfluenzaA__AIL94318
augaagaccaucaucgcccugagcuacauccugugccugguguucgcccagaagcugcccggcaacgacaacagcaccgccacccugugccugggccaccacgccgugcccaacggcaccaucgugaagaccaucaccaacgacagaaucgaggugaccaacgccaccgagcuggugcagaacagcagcaucggcgagaucugcgacagcccccaccagauccuggacggcgagaacugcacccugaucgacgcccugcugggcgacccccagugcgacggcuuccagaacaagaagugggaccuguucguggagagaagcaaggccuacagcaacugcuaccccuacgacgugcccgacuacgccagccugagaagccugguggccagcagcggcacccuggaguucaacaacgagagcuucaacuggaccggcgugacccagaacggcaccagcagcgccugcaucagaagaagcaacagcagcuucuucagcagacugaacuggcugacccaccugaacuucaaguaccccgcccugaacgugaccaugcccaacaacgagcaguucgacaagcuguacaucuggggcgugcaccaccccggcaccgacaaggaccagaucuuccuguacgcccagagcagcggcagaaucaccgugagcaccaagagaagccagcaggccgugauccccaacaucggcagcagacccagaaucagaaacauccccagcagaaucagcaucuacuggaccaucgugaagcccggcgacauccugcugaucaacagcaccggcaaccugaucgcccccagaggcuacuucaagaucagaagcggcaagagcagcaucaugagaagcgacgcccccaucggcaagugcaagagcgagugcaucacccccaacggcagcauccccaacgacaagcccuuccagaacgugaacagaaucaccuacggcgccugccccagauacgugaagcagagcacccugaagcuggccaccggcaugagaaacgugcccgagaagcagaccagaggcaucuucggcgccaucgccggcuucaucgagaacggcugggagggcaugguggacggcugguacggcuucagacaccugaacagcgagggcagaggccaggccgccgaccugaagagcacccaggccgccaucgaccagaucaacggcaagcugaacagacugaucggcaagaccaacgagaaguuccaccagaucgagaaggaguucagcgagguggagggcagaauccaggaccuggagaaguacguggaggacaccaagaucgaccuguggagcuacaacgccgagcugcugguggcccuggagaaccagcacaccaucgaccugaccgacagcgagaugaacaagcuguucgagaagaccaagaagcagcugagagagaacgccgaggacaugggcaacggcugcuucaagaucuaccacaagugcgacaacgccugcaucggcagcaucagaaacggcaccuacgaccacaacguguacagagacgaggcccugaacaacagauuccagaucaagggcguggagcugaagagcggcuacaaggacuggauccuguggaucagcuucgccaucagcugcuuccugcugugcguggcccugcugggcuucaucaugugggccugccagaagggcaacaucagaugcaacaucugcaucuga

SEQ ID NO: 172687 - RNA, 1701 nt, Artificial Sequence; identical to SEQ ID NO: 169918
  derived and/or modified CDS sequence (opt4) from hemagglutinin__InfluenzaA__AIL94330

SEQ ID NO: 172688 - RNA, 1701 nt, Artificial Sequence; identical to SEQ ID NO: 170100
  derived and/or modified CDS sequence (opt4) from hemagglutinin__InfluenzaA__AIL94354

SEQ ID NO: 172689 - RNA, 1701 nt, Artificial Sequence; identical to SEQ ID NO: 170054
  derived and/or modified CDS sequence (opt4) from hemagglutinin__InfluenzaA__AIL94365

SEQ ID NO: 172690 - RNA, 1701 nt, Artificial Sequence
  derived and/or modified CDS sequence (opt4) from hemagglutinin__InfluenzaA__AIL94377
augaagaccaucaucgcccugagcuacauccugugccugguguucgcccagaagcugcccggcaacgacaacagcaccgccacccugugccugggccaccacgccgugcccaacggcaccaucgugaagaccaucaccaacgacagaaucgaggugaccaacgccaccgagcuggugcagaacagcagcaucggcgagaucugcgacagcccccaccagauccuggacggcgagaacugcacccugaucgacgcccugcugggcgacccccacugcgacggcuuccagaacaagaagugggaccuguucguggagagaagcaaggccuacagcaacugcuaccccuacgacgugcccgacuacgccagccugagaagccugguggccagcagcggcacccuggaguucaacaacgagagcuucaacugggccggcgugacccagaacggcaccagcagcgccugcaucagaggcagcaacagcagcuucuucagcagacugaacuggcugacccaccugaacuucaaguaccccgcccugaacgugaccaugcccaacaacgagcaguucgacaagcuguacaucuggggcgugcaccaccccggcaccgacaaggaccagaucuuccuguacgcccagagcagcggcagaaucaccgugagcaccaagagaagccagcaggccgugauccccaacaucggcagcagacccagaaucagaaacauccccagcagaaucagcaucuacuggaccaucgugaagcccggcgacauccugcugaucaacagcaccggcaaccugaucgcccccagaggcuacuucaagaucagaagcggcaagagcagcaucaugagaagcgacgcccccaucggcaagugcaagagcgagugcaucacccccaacggcagcauccccaacgacaagcccuuccagaacgugaacagaaucaccuacggcgccugccccagauacgugaagcagagcacccugaagcuggccaccggcaugagaaacgugcccgagaagcagaccagaggcaucuucggcgccaucgccggcuucaucgagaacggcugggagggcaugguggacggcugguacggcuucagacaccagaacagcgagggcagaggccaggccgccgaccugaagagcacccaggccgccaucgaccagaucaacggcaagcugaacagacugaucggcaagaccaacgagaaguuccaccagaucgagaaggaguucagcgagguggagggcagaauccaggaccuggagaaguacguggaggacaccaagaucgaccuguggagcuacaacgccgagcugcugguggcccuggagaaccagcacaccaucgaccugaccgacagcgagaugaacaagcuguucgagaagaccaagaagcagcugagagagaacgccgaggacaugggcaacggcugcuucaagaucuaccacaagugcgacaacgccugcaucggcagcaucagaaacggcaccuacgaccacgacguguacagagacgaggcccugaacaacagauuccagaucaagggcguggagcugaagagcggcuacaaggacuggauccuguggaucagcuucgccaucagcugcuuccugcugugcguggcccugcugggcuucaucaugugggccugccagaagggcaacaucagaugcaacaucugcaucuga

SEQ ID NO: 172691 - RNA, 1701 nt, Artificial Sequence
  derived and/or modified CDS sequence (opt4) from hemagglutinin__InfluenzaA__AIL94389
augaaggccauccugguggugcugcuguacaccuucgccaccgccaacgccgacacccugugcaucggcuaccacgccaacaacagcaccgacaccguggacaccgugcuggagaagaacgugaccgugacccacagcgugaaccugcuggaggacaagcacaacggcaagcugugcaagcugagaggcguggccccccugcaccugggcaagugcaacaucgccggcuggauccugggcaaccccgagugcgagagccugagcaccgccagcagcuggagcuacaucguggagaccagcagcagcgacaacggcaccugcuaccccggcgacuucaucaacuacgaggagcugagagagcagcugagcagcgugagcagcuucgagagauucgagaucuuccccaagaccagcagcuggcccaaccacgacagcaacaagggcgugaccgccgccugcccccacgccggcgccaagagcuucuacaagaaccugaucuggcuggugaagaagggcaacagcuaccccaagcugagccagagcuacaucaacgacaagggcaaggaggugcuggugcuguggggcauccaccaccccagcaccaccgccgaccagcagagccuguaccagaacgccgacgccuacguguucgugggcaccagcagauacagcaagaaguucaagcccgagaucgccaucagacccaaggugagagaccaggagggcagaaugaacuacuacuggacccugguggagcccggcgacaagaucaccuucgaggccaccggcaaccugguggugcccagauacgccuucaccauggagagaaacgccggcagcggcaucaucaucagcgacacccccgugcacgacugcaacaccaccugccagacccccgagggcgccaucaacaccagccugcccuuccagaacauccaccccaucaccaucggcaagugccccaaguacgugaagagcaccaagcugagacuggccaccggccugagaaacgugcccagcauccagagcagaggccuguucggcgccaucgccggcuucaucgagggcggcuggaccggcaugguggacggcugguacggcuaccaccaccagaacgagcagggcagcggcuacgccgccgaccugaagagcacccagaacgccaucgacaagaucaccaacaaggugaacagcgugaucgagaagaugaacacccaguucaccgccgugggcaaggaguucaaccaccuggagaagagaaucgagaaccugaacaagaagguggacgacggcuuccuggacaucuggaccuacaacgccgagcugcugauccugcuggagaacgagagaacccuggacuaccacgacagcaacgugaagaaccuguacgagaaggugagaaaccagcugaagaacaacgccaaggagaucggcaacggcugcuucgaguucuaccacaagugcgacaacaccugcauggagagcgugaagaacggcaccuacgacuaccccaaguacagcgaggaggccaagcugaacagagagaagaucgacggcgugaagcuggagagcaccagaaucuaccagauccuggccaucuacagcaccguggccagcagccuggugcugguggugagccugggcgccaucagcuucuggaugugcagcaacggcagccugcagugcagaaucugcaucuga

SEQ ID NO: 172692 - RNA, 1701 nt, Artificial Sequence; identical to SEQ ID NO: 170054
  derived and/or modified CDS sequence (opt4) from hemagglutinin__InfluenzaA__AIL94411

SEQ ID NO: 172693 - RNA, 1701 nt, Artificial Sequence; identical to SEQ ID NO: 170054
  derived and/or modified CDS sequence (opt4) from hemagglutinin__InfluenzaA__AIL94423

SEQ ID NO: 172694 - RNA, 1701 nt, Artificial Sequence; identical to SEQ ID NO: 172647
  derived and/or modified CDS sequence (opt4) from hemagglutinin__InfluenzaA__AIL94435

SEQ ID NO: 172695 - RNA, 1701 nt, Artificial Sequence; identical to SEQ ID NO: 170054
  derived and/or modified CDS sequence (opt4) from hemagglutinin__InfluenzaA__AIL94446

SEQ ID NO: 172696 - RNA, 1701 nt, Artificial Sequence; identical to SEQ ID NO: 170054
  derived and/or modified CDS sequence (opt4) from hemagglutinin__InfluenzaA__AIL94458

SEQ ID NO: 172697 - RNA, 1701 nt, Artificial Sequence
  derived and/or modified CDS sequence (opt4) from hemagglutinin__InfluenzaA__AIL94470
augaaggccauccugguggugcugcuguacaccuucgccaccgccaacgccgacacccugugcaucggcuaccacgccaacaacagcaccgacaccguggacaccgugcuggagaagaacgugaccgugacccacagcgugaaccugcuggaggacaagcacaacggcaagcugugcaagcugagaggcguggccccccugcaccugggcaagugcaacaucgccggcuggauccugggcaaccccgagugcgagagccugagcaccgccagcagcuggagcuacaucguggagaccagcagcagcgacaacggcaccugcuaccccggcgacuucaucaacuacgaggagcugagagagcagcugagcagcgugagcagcuucgagagauucgagaucuuccccaagaccagcagcuggcccaaccacgacagcaacaagggcgugaccgccgccugcccccacgccggcgccaagagcuucuacaagaaccugaucuggcuggugaagaagggcaacagcuaccccaagcugagccagagcuacaucaacgacaagggcaaggaggugcuggugcuguggggcauccaccaccccagcaccaccgccgaccagcagagccuguaccagaacgccgacgccuacguguucgugggcaccagcagauacagcaagaaguucaagcccgagaucgccaucagacccaaggugagagaccaggagggcagaaugaacuacuacuggacccugguggagcccggcgacaagaucaccuucgaggccaccggcaaccugguggugcccagauacgccuucaccauggagagaaacgccggcagcggcaucaucaucagcgacacccccgcccacgacugcaacaccaccugccagacccccgagggcgccaucaacaccagccugcccuuccagaacauccaccccaucaccaucggcaagugccccaaguacgugaagagcaccaagcugagacuggccaccggccugagaaacgugcccagcauccagagcagaggccuguucggcgccaucgccggcuucaucgagggcggcuggaccggcaugguggacggcugguacggcuaccaccaccagaacgagcagggcagcggcuacgccgccgaccugaagagcacccagaacgccaucgacaagaucaccaacaaggugaacagcgugaucgagaagaugaacacccaguucaccgccgugggcaaggaguucaaccaccuggagaagagaaucgagaaccugaacaagaagguggacgacggcuuccuggacaucuggaccuacaacgccgagcugcuggugcugcuggagaacgagagaacccuggacuaccacgacagcaacgugaagaaccuguacgagaaggugagaaaccagcugaagaacaacgccaaggagaucggcaacggcugcuucgaguucuaccacaagugcgacaacaccugcauggagagcgugaagaacggcaccuacgacuaccccaaguacagcgaggaggccaagcugaacagagagaagaucgacggcgugaagcuggagagcaccagaaucuaccagauccuggccaucuacagcaccguggccagcagccuggugcugguggugagccugggcgccaucagcuucuggaugugcagcaacggcagccugcagugcagaaucugcaucuga

SEQ ID NO: 172698 - RNA, 1701 nt, Artificial Sequence
  derived and/or modified CDS sequence (opt4) from hemagglutinin__InfluenzaA__AIL94481
augaagaccaucaucgcccugagcuacauccugugccugguguucgcccagaagcugcccggcaacgacaacagcaccgccacccugugccugggccaccacgccgugcccaacggcaccaucgugaagaccaucaccaacgacagaaucgaggugaccaacgccaccgagcuggugcagaacagcagcaucggcgagaucugcgacagcccccaccagauccuggacggcgagaacugcacccugaucgacgcccugcugggcgacccccagugcgacggcuuccagaacaagaagugggaccuguucguggagagaagcaaggccuacagcaacugcuaccccuacgacgugcccgacuacgccagccugagaagccugguggccagcagcggcacccuggaguucaacaacgagagcuucaacugggccggcgugacccagaacggcaccagcagcgccugcaucagaggcagcaacagcagcuucuucagcagacugaacuggcugacccaccugaacuucaaguaccccgcccugaacgugaccaugcccaacaacgagcaguucgacaagcuguacaucuggggcgugcaccaccccggcaccgacaaggaccagaucuuccuguacgcccagagcagcggcagaaucaccgugagcaccaagagaagccagcaggccgugauccccaacaucggcagcagacccagaaucagaaacauccccagcagaaucagcaucuacuggaccaucgugaagcccggcgacauccugcugaucaacagcaccggcaaccugaucgcccccagaggcuacuucaagaucagaagcggcaagagcagcaucaugagaagcgacgcccccaucggcaagugcaagagcgagugcaucacccccaacggcagcauccccaacgacaagcccuuccagaacgugaacagaaucaccuacggcgccugccccagauacgugaagcagagcacccugaagcuggccaccggcaugagaaacgugcccgagaagcagaccagaggcaucuucggcgccaucgccggcuucaucgagaacggcugggagggcaugguggacggcugguacggcuucagacaccagaacagcgagggcagaggccaggccgccgaccugaagagcacccaggccgccaucgaccagaucaacggcaagcugaacagacugaucggcaagaccaacgagaaguuccaccagaucgagaaggaguucagcgagguggagggcagaauccaggaccuggagaaguacguggaggacaccaagaucgaccuguggagcuacaacgccgagcugcugguggcccuggagaaccagcacaccaucgaccugaccgacagcgagaugaacaagcuguucgagaagaccaagaagcagcugagagagaacgccgaggacaugggcaacggcugcuucaagaucuaccacaagugcgacaacgccugcaucggcagcaucagaaacggcaccuacgaccacgacguguacagagacgaggcccugaacaacagauuccagaucaagggcguggagcugaagagcggcuacaaggacuggaucaucuggaucagcuucgccaucagcugcuuccugcugugcguggcccugcugggcuucaucaugugggccugccagaagggcaacaucagaugcaacaucugcaucuga

SEQ ID NO: 172699 - RNA, 1701 nt, Artificial Sequence
  derived and/or modified CDS sequence (opt4) from hemagglutinin__InfluenzaA__AIL94493
augaaggccauccugguggugcugcuguacaccuucgccaccgccaacgccgacacccugugcaucggcuaccacgccaacaacagcaccgacaccguggacaccgugcuggagaagaacgugaccgugacccacagcgugaaccugcuggaggacaagcacaacggcaagcugugcaagcugagaggcguggccccccugcaccugggcaagugcaacaucgccggcuggauccugggcaaccccgagugcgagagccugagcaccgccagcagcuggagcuacaucguggagaccagcagcagcgacaacggcaccugcuaccccggcgacuucaucaacuacgaggagcugagagagcagcugagcagcgugagcagcuucgagagauucgagaucuuccccaagaccagcagcuggcccaaccacgacagcaacaagggcgugaccgccgccugcccccacgccggcgccaagagcuucuacaagaaccugaucuggcuggugaagaagggcaacagcuaccccaagcugagccagagcuacaucaacgacaagggcaaggaggugcuggugcuguggggcauccaccaccccagcaccaccgccgaccagcagagccuguaccagaacgccgacgccuacguguucgugggcaccagcagauacagcaagaaguucaagcccgagaucgccaucagacccaaggugagagaccaggagggcagaaugaacuacuacuggacccugguggagcccggcgacaagaucaccuucgaggccaccggcaaccugguggugcccagauacgccuucaccauggagaagaacgccggcagcggcaucaucaucagcgacacccccgugcacgacugcaacaccaccugccagacccccgagggcgccaucaacaccagcuuccccuuccagaacauccaccccaucaccaucggcaagugccccaaguacgugaagagcaccaagcugagacuggccaccggccugagaaacgugcccagcauccagagcagaggccuguucggcgccaucgccggcuucaucgagggcggcuggaccggcaugguggacggcugguacggcuaccaccaccagaacgagcagggcagcggcuacgccgccgaccugaagagcacccagaacgccaucgacaagaucaccaacaaggugaacagcgugaucgagaagaugaacacccaguucaccgccgugggcaaggaguucaaccaccuggagaagagaaucgagaaccugaacaagaagguggacgacggcuuccuggacaucuggaccuacaacgccgagcugcuggugcugcuggagaacgagagaacccuggacuaccacgacagcaacgugaagaaccuguacgagaaggugagaaaccagcugaagaacaacgccaaggagaucggcaacggcugcuucgaguucuaccacaagugcgacaacaccugcauggagagcgugaagaacggcaccuacgacuaccccaaguacagcgaggaggccaagcugaacagagagaagaucgacggcgugaagcuggagagcaccagaaucuaccagauccuggccaucuacagcaccguggccagcagccuggugcugguggugagccugggcgccaucagcuucuggaugugcagcaacggcagccugcagugcagaaucugcaucuga

SEQ ID NO: 172700 - RNA, 1701 nt, Artificial Sequence; identical to SEQ ID NO: 172647
  derived and/or modified CDS sequence (opt4) from hemagglutinin__InfluenzaA__AIL94504

SEQ ID NO: 172701 - RNA, 1701 nt, Artificial Sequence; identical to SEQ ID NO: 170054
  derived and/or modified CDS sequence (opt4) from hemagglutinin__InfluenzaA__AIL94515

SEQ ID NO: 172702 - RNA, 1701 nt, Artificial Sequence; identical to SEQ ID NO: 170054
  derived and/or modified CDS sequence (opt4) from hemagglutinin__InfluenzaA__AIL94527

SEQ ID NO: 172703 - RNA, 1701 nt, Artificial Sequence
  derived and/or modified CDS sequence (opt4) from hemagglutinin__InfluenzaA__AIL94539
augaaggccauccugguggugcugcuguacaccuucgccaccgccaacgccgacacccugugcaucggcuaccacgccaacaacagcaccgacaccguggacaccgugcuggagaagaacgugaccgugacccacagcgugaaccugcuggaggacaagcacaacggcaagcugugcaagcugagaggcguggccccccugcaccugggcaagugcaacaucgccggcuggauccugggcaaccccgagugcgagagccugagcaccgccagcagcuggagcuacaucguggagaccagcagcagcgacaacggcaccugcuaccccggcgacuucaucaacuacgaggagcugagagagcagcugagcagcgugagcagcuucgagagauucgagaucuuccccaagaccagcagcuggcccaaccacgacagcaacaagggcgugaccgccgccugcccccacgccggcgccaagagcuucuacaagaaccugaucuggcuggugaagaagggcaacagcuaccccaagcugagccagagcuacaucaacgacaagggcaaggaggugcuggugcuguggggcauccaccaccccagcaccaccgccgaccagcagagccuguaccagaacgccgacgccuacguguucgugggcaccagcagauacagcaagaaguucaagcccgagaucgccaucagacccaaggugagagaccaggagggcagaaugaacuacuacuggacccugguggagcccggcgacaagaucaccuucgaggccaccggcaaccugguggugcccagauacgccuucaccauggagagaaacgccggcagcggcaucaucaucagcgacacccccgcccacgacugcaacaccaccugccagacccccgagggcgccaucaacaccagccugcccuuccagaacauccaccccaucaccaucggcaagugccccaaguacgugaagagcaccaagcugagacuggccaccggccugagaaacgugcccagcauccagagcagaggccuguucggcgccaucgccggcuucaucgagggcggcuggaccggcaugguggacggcugguacggcuaccaccaccagaacgagcagggcagcggcuacgccgccgaccugaagagcacccagaacgccaucgacaagaucaccaacaaggugaacagcgugaucgagaagaugaacacccaguucaccgccgugggcaaggaguucaaccaccuggagaagagaaucgagaaccugaacaagaagguggacgacggcuuccuggacaucuggaccuacaacgccgagcugcuggugcugcuggagaacgagagaacccuggacuaccacgacagcaacgugaagaaccuguacgagaaggugagaaaccagcugaagaacaacgccaaggaggugggcaacggcugcuucgaguucuaccacaagugcgacaacaccugcauggagagcgugaagaacggcaccuacgacuaccccaaguacagcgaggaggccaagcugaacagagagaagaucgacggcgugaagcuggagagcaccagaaucuaccagauccuggccaucuacagcaccguggccagcagccuggugcugguggugagccugggcgccaucagcuucuggaugugcagcaacggcagccugcagugcagaaucugcaucuga

SEQ ID NO: 172704 - RNA, 1701 nt, Artificial Sequence; identical to SEQ ID NO: 172647
  derived and/or modified CDS sequence (opt4) from hemagglutinin__InfluenzaA__AIL94550

SEQ ID NO: 172705 - RNA, 1701 nt, Artificial Sequence
  derived and/or modified CDS sequence (opt4) from hemagglutinin__InfluenzaA__AIL94561
augaagaccaucaucgcccugagcuacauccugugccugguguucgcccagaagcugcccggcaacgacaacagcaccgccacccugugccugggccaccacgccgugcccaacggcaccaucgugaagaccaucaccaacgacagaaucgaggugaccaacgccaccgagcuggugcagaacagcagcaucggcgagaucugcgacagcccccaccagauccuggacggcgagaacugcacccugaucgacgcccugcugggcgacccccagugcgacggcuuccagaacaagaagugggaccuguucguggagagaagcaaggccuacagcaacugcuaccccuacgacgugcccgacuacgccagccugagaagccugguggccagcagcggcacccuggaguucaacaacgagagcuucaacugggccggcgugacccagaacggcaccagcagcgccugcaucagaggcagcaacagcagcuucuucagcagacugaacuggcugacccaccugaacuucaaguaccccgcccugaacgugaccaugcccaacaacgagcaguucgacaagcuguacaucuggggcgugcaccaccccggcaccgacaaggaccagaucuuccuguacgcccagagcagcggcagaaucaccgugagcaccaagagaagccagcaggccgugauccccaacaucggcagcagacccagaaucagaaacauccccagcagaaucagcaucuacuggaccaucgugaagcccggcgacauccugcugaucaacagcaccggcaaccugaucgcccccagaggcuacuucaagaucagaagcggcaagagcagcaucaugagaagcgacgcccccaucggcaagugcaagagcgagugcaucacccccaacggcagcauccccaacgacaagcccuuccagaacgugaacagaaucaccuacggcgccugccccagauacgugaagcagagcacccugaagcuggccaccggcaugagaaacgugcccgagaagcagaccagaggcaucuucggcgccaucgccggcuucaucgagaacggcugggagggcaugguggacggcugguacggcuucagacaccagaacagcgagggcagaggccaggccgccgaccugaagagcacccaggccgccaucgaccagaucaacggcaagcugaacagacugaucggcaagaccaacgagaaguuccaccagaucgagaaggaguucagcgagguggagggcagaauccaggaccuggagaaguacguggaggacaccaagaucgaccuguggagcuacaacgccgagcugcugguggcccuggagaaccagcacaccaucgaccugaccgacagcgagaugaacaagcuguucgagaagaccaagaagcagcugagagagaacgccgaggacaugggcaacggcugcuucaagaucuaccacaagugcgacaacgccugcaucggcagcaucagaaacggcaccuacgaccacgacguguacagagacgaggcccugaacaacagauuccagaucaagggcguggagcugaagagcggcuacaaggacuggauccuguggaucagcuucgccaucagcugcuuccugcugugcguggcccugcugggcuucaucaugugggccugccagagaggcaacaucagaugcaacaucugcaucuga

SEQ ID NO: 172706 - RNA, 1701 nt, Artificial Sequence
  derived and/or modified CDS sequence (opt4) from hemagglutinin__InfluenzaA__AIL94573
augaaggccauccugguggugcugcuguacaccuucgccaccgccaacgccgacacccugugcaucggcuaccacgccaacaacagcaccgacaccguggacaccgugcuggagaagaacgugaucgugacccacagcgugaaccugcuggaggacaagcacaacggcaagcugugcaagcugagaggcguggccccccugcaccugggcaagugcaacaucgccggcuggauccugggcaaccccgagugcgagagccugagcaccgccagcagcuggagcuacaucguggagaccagcagcagcgacaacggcaccugcuaccccggcgacuucaucaacuacgaggagcugagagagcagcugagcagcgugagcagcuucgagagauucgagaucuuccccaagaccagcagcuggcccaaccacgacagcaacaagggcgugaccgccgccugcccccacgccggcgccaagagcuucuacaagaaccugaucuggcuggugaagaagggcaacagcuaccccaagcugagccagagcuacaucaacgacaagggcaaggaggugcuggugcuguggggcauccaccaccccagcaccaccgccgaccagcagagccuguaccagaacgccgacgccuacguguucgugggcaccagcagauacagcaagaaguucaagcccgagaucgccaucagacccaaggugagagaccaggagggcagaaugaacuacuacuggacccugguggagcccggcgacaagaucaccuucgaggccaccggcaaccugguggugcccagauacgccuucaccauggagagaaacgccggcagcggcaucaucaucagcgacacccccgugcacgacugcaacaccaccugccagacccccgagggcgccaucaacaccagccugcccuuccagaacauccaccccaucaccaucggcaagugccccaaguacgugaagagcaccaagcugagacuggccaccggccugagaaacgugcccagcauccagagcagaggccuguucggcgccaucgccggcuucaucgagggcggcuggaccggcaugguggacggcugguacggcuaccaccaccagaacgagcagggcagcggcuacgccgccgaccugaagagcacccagaacgccaucgacaagaucaccaacaaggugaacagcgugaucgagaagaugaacacccaguucaccgccgugggcaaggaguucaaccaccuggagaagagaaucgagaaccugaacaagaagguggacgacggcuuccuggacaucuggaccuacaacgccgagcugcuggugcugcuggagaacgagagaacccuggacuaccacgacagcaacgugaagaaccuguacgagaaggugagaaaccagcugaagaacaacgccaaggagaucggcaacggcugcuucgaguucuaccacaagugcgacaacaccugcauggagagcgugaagaacggcaccuacgacuaccccaaguacagcgaggaggccaagcugaacagagagaagaucgacggcgugaagcuggagagcaccagaguguaccagauccuggccaucuacagcaccguggccagcagccuggugcugguggugagccugggcgccaucagcuucuggaugugcagcaacggcagccugcagugcagaaucugcaucuga

SEQ ID NO: 172707 - RNA, 1701 nt, Artificial Sequence
  derived and/or modified CDS sequence (opt4) from hemagglutinin__InfluenzaA__AIL94584
augaaggccauccugguggugcugcuguacaccuucgccaccgccaacgccgacacccugugcaucggcuaccacgccaacaacagcaccgacaccguggacaccgugcuggagaagaacaucaccgugacccacagcgugaaccugcuggaggacaagcacaacggcaagcugugcaagcugagaggcguggccccccugcaccugggcaagugcaacaucgccggcuggauccugggcaaccccgagugcgagagccugagcaccgccagcagcuggagcuacaucguggagaccagcagcagcgacaacggcaccugcuaccccggcgacuucaucaacuacgaggagcugagagagcagcugagcagcgugagcagcuucgagagauucgagaucuuccccaagaccagcagcuggcccaaccacgacagcaacaagggcgugaccgccgccugcccccacgccggcgccaagagcuucuacaagaaccugaucuggcuggugaagaagggcaacagcuaccccaagcugagccagagcuacaucaacgacaagggcaaggaggugcuggugcuguggggcauccaccaccccagcaccaccgccgaccagcagagccuguaccagaacgccgacgccuacguguucgugggcaccagcagauacagcaagaaguucaagcccgagaucgccaucagacccaaggugagagaccaggagggcagaaugaacuacuacuggacccugguggagcccggcgacaagaucaccuucgaggccaccggcaaccugguggugcccagauacgccuucaccauggagagaaacgccggcagcggcaucaucaucagcgacacccccgugcacgacugcaacaccaccugccagacccccgagggcgccaucaacaccagccugcccuuccagaacauccaccccaucaccaucggcagaugccccaaguacgugaagagcaccaagcugagacuggccaccggccugagaaacgugcccagcauccagagcagaggccuguucggcgccaucgccggcuucaucgagggcggcuggaccggcaugguggacggcugguacggcuaccaccaccagaacgagcagggcagcggcuacgccgccgaccugaagagcacccagaacgccaucgacaagaucaccaacaaggugaacagcgugaucgagaagaugaacacccaguucaccgccgugggcaaggaguucaaccaccuggagaagagaaucgagaaccugaacaagaagguggacgacggcuuccuggacaucuggaccuacaacgccgagcugcuggugcugcuggagaacgagagaacccuggacuaccacgacagcaacgugaagaaccuguacgagaaggugagaaaccagcugaagaacaacgccaaggagaucggcaacggcugcuucgaguucuaccacaagugcgacaacaccugcauggagagcgugaagaacggcaccuacgacuaccccaaguacagcgaggaggccaagcugaacagagagaagaucgacggcgugaagcuggagagcaccagaaucuaccagauccuggccaucuacagcaccguggccagcagccuggugcugguggugagccugggcgccaucagcuucuggaugugcagcaacggcagccugcagugcagaaucugcaucuga

SEQ ID NO: 172708 - RNA, 1701 nt, Artificial Sequence; identical to SEQ ID NO: 172115
  derived and/or modified CDS sequence (opt4) from hemagglutinin__InfluenzaA__AIL94595

SEQ ID NO: 172709 - RNA, 1701 nt, Artificial Sequence; identical to SEQ ID NO: 170054
  derived and/or modified CDS sequence (opt4) from hemagglutinin__InfluenzaA__AIL94606

SEQ ID NO: 172710 - RNA, 1701 nt, Artificial Sequence; identical to SEQ ID NO: 170100
  derived and/or modified CDS sequence (opt4) from hemagglutinin__InfluenzaA__AIL94618

SEQ ID NO: 172711 - RNA, 1701 nt, Artificial Sequence; identical to SEQ ID NO: 172647
  derived and/or modified CDS sequence (opt4) from hemagglutinin__InfluenzaA__AIL94629

SEQ ID NO: 172712 - RNA, 1701 nt, Artificial Sequence; identical to SEQ ID NO: 170054
  derived and/or modified CDS sequence (opt4) from hemagglutinin__InfluenzaA__AIL94640

SEQ ID NO: 172713 - RNA, 1701 nt, Artificial Sequence
  derived and/or modified CDS sequence (opt4) from hemagglutinin__InfluenzaA__AIL94652
augaaggccauccugguggugcugcuguacaccuucgccaccgccaacgccgacacccugugcaucggcuaccacgccaacaacagcaccgacaccguggacaccgugcuggagaagaacgugaccgugacccacagcaucaaccugcuggaggacaagcacaacggcaagcugugcaagcugagaggcguggccccccugcaccugggcaagugcaacaucgccggcuggauccugggcaaccccgagugcgagagccugagcaccgccagcagcuggagcuacaucguggagaccagcagcagcgacaacggcaccugcuaccccggcgacuucaucaacuacgaggagcugagagagcagcugagcagcgugagcagcuucgagagauucgagauguuccccaagaccagcagcuggcccaaccacgacagcaacaagggcgugaccgccgccugcccccacgccggcgccaagagcuucuacaagaaccugaucuggcuggugaagaagggcaacagcuaccccaagcugagcaagagcuacaucaacgacaagggcaaggaggugcuggugcuguggggcauccaccaccccagcaccaccgccgaccagcagagccuguaccagaacgccgacgccuacguguucgugggcaccagcaaguacagcaagaaguucaagcccgagaucgccaucagacccaaggugagagaccaggagggcagaaugaacuacuacuggacccugaucgagcccggcgacaagaucaccuucgaggccaccggcaaccugguggugcccagauacgccuucgccauggagagaaacgccggcagcggcaucaucaucagcgacacccccgugcacgacugcaacaccaccugccagacccccgagggcgccaucaacaccagccugcccuuccagaacauccaccccaucaccaucggcaagugccccaaguacgugaagagcaccaagcugagacuggccaccggccugagaaacgugcccagcauccagagcagaggccuguucggcgccaucgccggcuucaucgagggcggcuggaccggcaugguggacggcugguacggcuaccaccaccagaacgagcagggcagcggcuacgccgccgaccugaagagcacccagaacgccaucgacaagaucaccaacaaggugaacagcgugaucgagaagaugaacacccaguucaccgccgugggcaaggaguucaaccaccuggagaagagaaucgagaaccugaacaagaagguggacgacggcuuccuggacaucuggaccuacaacgccgagcugcuggugcugcuggagaacgagagaacccuggacuaccacgacagcaacgugaagaaccuguacgagaaggugagaaaccagcugaagaacaacgccaaggagaucggcaacggcugcuucgaguucuaccacaagugcgacaacaccugcauggagagcgugaagaacggcaccuacgacuaccccaaguacagcgaggaggccaagcuggacagagagaagaucgacggcgugaagcuggagagcaccagaaucuaccagauccuggccaucuacagcaccguggccagcagccuggugcugguggugagccugggcgccaucagcuucuggaugugcagcaacggcagccugcagugcagaaucugcaucuga

SEQ ID NO: 172714 - RNA, 1701 nt, Artificial Sequence; identical to SEQ ID NO: 170100
  derived and/or modified CDS sequence (opt4) from hemagglutinin__InfluenzaA__AIL94663

SEQ ID NO: 172715 - RNA, 1701 nt, Artificial Sequence; identical to SEQ ID NO: 170100
  derived and/or modified CDS sequence (opt4) from hemagglutinin__InfluenzaA__AIL94674

SEQ ID NO: 172716 - RNA, 1701 nt, Artificial Sequence; identical to SEQ ID NO: 170054
  derived and/or modified CDS sequence (opt4) from hemagglutinin__InfluenzaA__AIL94697

SEQ ID NO: 172717 - RNA, 1701 nt, Artificial Sequence; identical to SEQ ID NO: 170100
  derived and/or modified CDS sequence (opt4) from hemagglutinin__InfluenzaA__AIL94709

SEQ ID NO: 172718 - RNA, 1701 nt, Artificial Sequence; identical to SEQ ID NO: 170100
  derived and/or modified CDS sequence (opt4) from hemagglutinin__InfluenzaA__AIL94720

SEQ ID NO: 172719 - RNA, 1701 nt, Artificial Sequence; identical to SEQ ID NO: 170054
  derived and/or modified CDS sequence (opt4) from hemagglutinin__InfluenzaA__AIL94731

SEQ ID NO: 172720 - RNA, 1701 nt, Artificial Sequence; identical to SEQ ID NO: 172647
  derived and/or modified CDS sequence (opt4) from hemagglutinin__InfluenzaA__AIL94743

SEQ ID NO: 172721 - RNA, 1701 nt, Artificial Sequence
  derived and/or modified CDS sequence (opt4) from hemagglutinin__InfluenzaA__AIL94754
augaaggccauccugguggugcugcuguacaccuucgccaccgccaacgccgacacccugugcaucggcuaccacgccaacaacagcaccgacaccguggacaccgugcuggagaagaacgugaccgugacccacagcgugaaccugcuggaggacaagcacaacggcaagcugugcaagcugagaggcguggccccccugcaccugggcaagugcaacaucgccggcuggauccugggcaaccccgagugcgagagccugagcaccgccagcagcuggagcuacaucguggagaccagcagcagcgacaacggcaccugcuaccccggcgacuucaucaacuacgaggagcugagagagcagcugagcagcgugagcagcuucgagagauucgagaucuuccccaagaccagcagcuggcccaaccacgacagcaacaagggcgugaccgccgccugcccccacgccggcgccaagagcuucuacaagaaccugaucuggcuggugaagaagggcaacagcuaccccaagcugagccagagcuacaucaacgacaagggcaaggaggugcuggugcuguggggcauccaccaccccagcaccaccgccgaccagcagagccuguaccagaacgccgacgccuacguguucgugggcaccagcagauacagcaagaaguucaagcccgagaucgccaucagacccaaggugagagaccaggagggcagaaugaacuacuacuggacccugguggagcccggcgacaagaucaccuucgaggccaccggcaaccugguggugcccagauacgccuucaccauggagagaaacgccggcagcggcaucaucaucagcgacacccccgugcacgacugcaacaccaccugccagacccccgagggcgccaucaacaccagccugcccuuccagaacauccaccccaucaccaucggcaagugccccaaguacgugaagagcaccaagcugagacuggccaccggccugagaaacgugcccagcauccagagcagaggccuguucggcgccaucgccggcuucaucgagggcggcuggaccggcaugguggacggcugguacggcuaccaccaccagaacgagcagggcagcggcuacgccgccgaccugaagagcacccagaacgccaucgacaagaucaccaacaaggugaacagcgugaucgagaagaugaacacccaguucaccgccgugggcaaggaguucaaccaccuggagaagagaaucgagaaccugaacaagaagguggacgacggcuuccuggacaucuggaccuacaacgccgagcugcugauccugcuggagaacgagagaacccuggacuaccacgacagcaacgugaagaaccuguacgagaaggugagaaaccagcugaagaacaacgccaaggagaucggcaacggcugcuucgaguucuaccacaagugcgacaacaccugcauggagagcgccaagaacggcaccuacgacuaccccaaguacagcgaggaggccaagcugaacagagagaagaucgacggcgugaagcuggagagcaccagaaucuaccagauccuggccaucuacagcaccguggccagcagccuggugcugguggugagccugggcgccaucagcuucuggaugugcagcaacggcagccugcagugcagaaucugcaucuga

SEQ ID NO: 172722 - RNA, 1701 nt, Artificial Sequence; identical to SEQ ID NO: 172675
  derived and/or modified CDS sequence (opt4) from hemagglutinin__InfluenzaA__AIL94765

SEQ ID NO: 172723 - RNA, 1701 nt, Artificial Sequence; identical to SEQ ID NO: 170054
  derived and/or modified CDS sequence (opt4) from hemagglutinin__InfluenzaA__AIL94777

SEQ ID NO: 172724 - RNA, 1701 nt, Artificial Sequence; identical to SEQ ID NO: 171962
  derived and/or modified CDS sequence (opt4) from hemagglutinin__InfluenzaA__AIL94789

SEQ ID NO: 172725 - RNA, 1701 nt, Artificial Sequence; identical to SEQ ID NO: 170100
  derived and/or modified CDS sequence (opt4) from hemagglutinin__InfluenzaA__AIL94800

SEQ ID NO: 172726 - RNA, 1701 nt, Artificial Sequence
  derived and/or modified CDS sequence (opt4) from hemagglutinin__InfluenzaA__AIL94811
augaagaccaucaucgcccugagcuacauccugugccugguguucgcccagaagcugcccggcaacgacaacagcaccgccacccugugccugggccaccacgccgugcccaacggcaccaucgugaagaccaucaccaacgacagaaucgaggugaccaacgccaccgagcuggugcagaacagcagcaucggcgagaucugcgacagcccccaccagauccuggacggcgagaacugcacccugaucgacgcccugcugggcgacccccagugcgacggcuuccagaacaagaagugggaccuguucguggagagaagcaaggccuacagcaacugcuaccccuacgacgugcccgacuacgccagccugagaagccugguggccagcagcggcacccuggaguucaacaacgagagcuucaacuggaccggcgugacccagaacggcaccagcagcgccugcaucagaagaagcaacagcagcuucuucagcagacugaacuggcugacccaccugaacuucaaguaccccgcccugaacgugaccaugcccaacaacgagcaguucgacaagcuguacaucuggggcgugcaccaccccggcaccgacaaggaccagaucuuccuguacgcccagagcagcggcagaaucaccgugagcaccaagagaagccagcaggccgugauccccaacaucggcagcagacccagaaucagaaacauccccagcagaaucagcaucuacuggaccaucgugaagcccggcgacauccugcugaucaacagcaccggcaaccugaucgcccccagaggcuacuucaagaucagaagcggcaagagcagcaucaugagaagcgacgcccccaucggcaagugcaagagcgagugcaucacccccaacggcagcauccccaacgacaagcccuuccagaacgugaacagaaucaccuacggcgccugccccagauacgugaagcagaacacccugaagcuggccaccggcaugagaaacgugcccgagaagcagaccagaggcaucuucggcgccaucgccggcuucaucgagaacggcugggagggcaugguggacggcugguacggcuucagacaccagaacagcgagggcagaggccaggccgccgaccugaagagcacccaggccgccaucgaccagaucaacggcaagcugaacagacugaucggcaagaccaacgagaaguuccaccagaucgagaaggaguucagcgagguggagggcagaauccaggaccuggagaaguacguggaggacaccaagaucgaccuguggagcuacaacgccgagcugcugguggcccuggagaaccagcacaccaucgaccugaccgacagcgagaugaacaagcuguucgagaagaccaagaagcagcugagagagaacgccgaggacaugggcaacggcugcuucaagaucuaccacaagugcgacaacgccugcaucggcagcaucagaaacggcaccuacgaccacaacguguacagagacgaggcccugaacaacagauuccagaucaagggcguggagcugaagagcggcuacaaggacuggauccuguggaucagcuucgccaucagcugcuuccugcugugcguggcccugcugggcuucaucaugugggccugccagaagggcaacaucagaugcaacaucugcaucuga

SEQ ID NO: 172727 - RNA, 1701 nt, Artificial Sequence; identical to SEQ ID NO: 169918
  derived and/or modified CDS sequence (opt4) from hemagglutinin__InfluenzaA__AIL94823

SEQ ID NO: 172728 - RNA, 1701 nt, Artificial Sequence
  derived and/or modified CDS sequence (opt4) from hemagglutinin__InfluenzaA__AIL94835
augaagaccaucaucgcccugagcuacauccugugccugguguucgcccagaagcugcccggcaacgacaacagcaccgccacccugugccugggccaccacgccgugcccaacggcaccaucgugaagaccaucaccaacgacagaaucgaggugaccaacgccaccgagcuggugcagaacuacagcaucggcgagaucugcgacagcccccaccagauccuggacggcgagaacugcacccugaucgacgcccugcugggcgacccccagugcgacggcuuccagaacaagaagugggaccuguucguggagagaagcaaggccuacagcaacugcuaccccuacgacgugcccgacuacgccagccugagaagccugguggccagcagcggcacccuggaguucaacaacgagagcuucaacugggccggcgugacccagaacggcaccagcagcgccugcaucagaggcagcaacagcagcuucuucagcagacugaacuggcugacccaccugaacuucaaguaccccgcccugaacgugaccaugcccaacaacgagcaguucgacaagcuguacaucuggggcgugcaccaccccggcaccgacaaggaccagaucuuccuguacgcccagagcagcggcagaaucaccgugagcaccaagagaagccagcaggccgugauccccaacaucggcagcagacccagaaucagaaacauccccagcagaaucagcaucuacuggaccaucgugaagcccggcgacauccugcugaucaacagcaccggcaaccugaucgcccccagaggcuacuucaagaucagaagcggcaagagcagcaucaugagaagcgacgcccccaucggcaagugcaagagcgagugcaucacccccaacggcagcauccccaacgacaagcccuuccagaacgugaacagaaucaccuacggcgccugccccagauacgugaagcagagcacccugaagcuggccaccggcaugagaaacgugcccgagaagcagaccagaggcaucuucggcgccaucgccggcuucaucgagaacggcugggagggcaugguggacggcugguacggcuucagacaccagaacagcgagggcagaggccaggccgccgaccugaagagcacccaggccgccaucgaccagaucaacggcaagcugaacagacugaucggcaagaccaacgagaaguuccaccagaucgagaaggaguucagcgagguggagggcagaauccaggaccuggagaaguacguggaggacaccaagaucgaccuguggagcuacaacgccgagcugcugguggcccuggagaaccagcacaccaucgaccugaccgacagcgagaugaacaagcuguucgagaagaccaagaagcagcugagagagaacgccgaggacaugggcaacggcugcuucaagaucuaccacaagugcgacaacgccugcaucggcagcaucagaaacggcaccuacgaccacgacguguacagagacgaggcccugaacaacagauuccagaucaagggcguggagcugaagagcggcuacaaggacuggauccuguggaucagcuucgccaucagcugcuuccugcugugcguggcccugcugggcuucaucaugugggccugccagaagggcaacaucagaugcaacaucugcaucuga

SEQ ID NO: 172729 - RNA, 1701 nt, Artificial Sequence
  derived and/or modified CDS sequence (opt4) from hemagglutinin__InfluenzaA__AIL94847
augaagaccaucaucgcccugagcuacauccugugccugguguucgcccagaagcugcccggcaacgacaacagcaccgccacccugugccugggccaccacgccgugcccaacggcaccaucgugaagaccaucaccaacgaccagaucgaggugaccaacgccaccgagcuggugcagagcagcagcaccggcgagaucugcgacagcccccaccagauccuggacggcgagaacugcacccugaucgacgcccugcugggcgacccccagugcgacggcuuccagaacaagaagugggaccuguucguggagagaagcaaggccuacagcaacugcuaccccuacgacgugcccgacuacgccagccugagaagccugguggccagcagcggcacccuggaguucaacaacgagagcuucaacuggaccggcgugacccagaacggcaccagcagcgccugcaucagaagaagcaacaacagcuucuucagcagacugaacuggcugacccaccugaaguucaaguaccccgcccugaacgugaccaugcccaacgacgagaaguucgacaagcuguacaucuggggcgugcaccaccccggcaccgacaacgaccagaucuuccuguacgcccaggccagcggcagaaucaccgugagcaccaagagaagccagcagaccgugauccccaacaucggcagcagacccagagugagaaacauccccagcagaaucagcaucuacuggaccaucgugaagcccggcgacauccugcugaucaacagcaccggcaaccugaucgcccccagaggcuacuucaagaucagaagcggcaagagcagcaucaugagaagcgacgcccccaucggcaagugcaacagcgagugcaucacccccaacggcagcauccccaacgacaagcccuuccagaacgugaacagaaucaccuacggcgccugccccagauacgugaagcagaacacccugaagcuggccaccggcaugagaaacgugcccgagaagcagaccagaggcaucuucggcgccaucgccggcuucaucgagaacggcugggagggcaugguggacggcugguacggcuucagacaccagaacagcgagggcaucggccaggccgccgaccugaagagcacccaggccgccaucgaccagaucaacggcaagcugaacagacugaucggcaagaccaacgagaaguuccaccagaucgagaaggaguucagcgagguggagggcagaauccaggaccuggagaaguacguggaggacaccaagaucgaccuguggagcuacaacgccgagcugcugguggcccuggagaaccagcacaccaucgaccugaccgacagcgagaugaacaagcuguucgagaagaccaagaagcagcugagagagaacgccgaggacaugggcaacggcugcuucaagaucuaccacaagugcgacaacgccugcaucggcagcaucagaaacggcaccuacgaccacgacguguacagagacgaggcccugaacaacagauuccagaucaagggcguggagcugaagagcggcuacaaggacuggauccuguggaucagcuucgccaucagcugcuuccugcugugcguggcccugcugggcuucaucaugugggccugccagaagggcaacaucagaugcaacaucugcaucuga

SEQ ID NO: 172730 - RNA, 1701 nt, Artificial Sequence; identical to SEQ ID NO: 165593
  derived and/or modified CDS sequence (opt4) from hemagglutinin__InfluenzaA__AIL94859

SEQ ID NO: 172731 - RNA, 1701 nt, Artificial Sequence
  derived and/or modified CDS sequence (opt4) from hemagglutinin__InfluenzaA__AIL94871
augaagaccaucaucgcccugagcuacauccugugccugguguucgcccagaagcugcccggcaacgacaacagcaccgccacccugugccugggccaccacgccgugcccaacggcaccaucgugaagaccaucaccaacgaccagaucgaggugaccaacgccaccgagcuggugcagagcagcagcaccggcgagaucugcgacagcccccaccagauccuggacggcgagaacugcacccugaucgacgcccugcugggcgacccccagugcgacggcuuccagaacaagaagugggaccuguucguggagagaagcaaggccuacagcaacugcuaccccuacgacgugcccgacuacgccagccugagaagccugguggccagcagcggcacccuggaguucaacaacgagagcuucaacuggaccggcgugacccagaacggcaccagcagcgccugcaucagaagaagcaacaacagcuucuucagcagacugaacuggcugacccaccugaacuucaaguaccccgcccugaacgugaccaugcccaacaacgagcaguucgacaagcuguacaucuggggcgugcaccaccccggcaccgacaaggaccagaucuuccuguacgcccaggccagcggcagaaucaccgugagcaccaagagaagccagcaggccgugauccccaacaucggcagcagacccagagugagaaacauccccagcagaaucagcaucuacuggaccaucgugaagcccggcgacauccugcugaucaacagcaccggcaaccugaucgcccccagaggcuacuucaagaucagaagcggcaagagcagcaucaugagaagcgacgcccccaucggcaagugcaacagcgagugcaucacccccaacggcagcauccccaacgacaagcccuuccagaacgugaacagaaucaccuacggcgccugccccagauacgugaagcagagcacccugaagcuggccaccggcaugagaaacgugcccgagaagcagaccagaggcaucuucggcgccaucgccggcuucaucgagaacggcugggagggcaugguggacggcugguacggcuucagacaccagaacagcgagggcagaggccaggccgccgaccugaagagcacccaggccgccaucgaccagaucaacggcaagcugaacagacugaucggcaagaccaacgagaaguuccaccagaucgagaaggaguucagcgagguggagggcagaauccaggaccuggagaaguacguggaggacaccaagaucgaccuguggagcuacaacgccgagcugcugguggcccuggagaaccagcacaccaucgaccugaccgacagcgagaugaacaagcuguucgagaagaccaagaagcagcugagagagaacgccgaggacaugggcaacggcugcuucaccaucuaccacaagugcgacaacgccugcaucggcagcaucagaaacggcaccuacgaccacaacguguacagagacgaggcccugaacaacagauuccagaucaagggcaucgagcugaagagcggcuacaaggacuggauccuguggaucagcuucgccaucagcugcuuccugcugugcguggcccugcugggcuucaucaugugggccugccagaagggcaacaucagaugcaacaucugcaucuga

SEQ ID NO: 172732 - RNA, 1701 nt, Artificial Sequence; identical to SEQ ID NO: 172140
  derived and/or modified CDS sequence (opt4) from hemagglutinin__InfluenzaA__AIL94883

SEQ ID NO: 172733 - RNA, 1701 nt, Artificial Sequence; identical to SEQ ID NO: 172125
  derived and/or modified CDS sequence (opt4) from hemagglutinin__InfluenzaA__AIL94894

SEQ ID NO: 172734 - RNA, 1701 nt, Artificial Sequence; identical to SEQ ID NO: 169918
  derived and/or modified CDS sequence (opt4) from hemagglutinin__InfluenzaA__AIL94906

SEQ ID NO: 172735 - RNA, 1701 nt, Artificial Sequence; identical to SEQ ID NO: 170054
  derived and/or modified CDS sequence (opt4) from hemagglutinin__InfluenzaA__AIL94918

SEQ ID NO: 172736 - RNA, 1701 nt, Artificial Sequence; identical to SEQ ID NO: 170054
  derived and/or modified CDS sequence (opt4) from hemagglutinin__InfluenzaA__AIL94930

SEQ ID NO: 172737 - RNA, 1701 nt, Artificial Sequence; identical to SEQ ID NO: 170054
  derived and/or modified CDS sequence (opt4) from hemagglutinin__InfluenzaA__AIL94942

SEQ ID NO: 172738 - RNA, 1701 nt, Artificial Sequence; identical to SEQ ID NO: 170100
  derived and/or modified CDS sequence (opt4) from hemagglutinin__InfluenzaA__AIL94954

SEQ ID NO: 172739 - RNA, 1701 nt, Artificial Sequence; identical to SEQ ID NO: 169918
  derived and/or modified CDS sequence (opt4) from hemagglutinin__InfluenzaA__AIL94965

SEQ ID NO: 172740 - RNA, 1701 nt, Artificial Sequence
  derived and/or modified CDS sequence (opt4) from hemagglutinin__InfluenzaA__AIM55837
augaaggccauccugguggugcugcuguacaccuucgccaccgccaccgccgacacccugugcaucggcuaccacgccaacaacagcaccgacaccguggacaccgugcuggagaagaacgugaccgugacccacagcgugaaccugcuggaggacaagcacaacggcaagcugugcaagcugagaggcguggccccccugcaccugggcaagugcaacaucgccggcuggauccugggcaaccccgagugcgagagccugagcaccgccagcagcuggagcuacaucguggagaccagcagcagcgacaacggcaccugcuaccccggcgacuucaucaacuacgaggagcugagagagcagcugagcagcgugagcagcuucgagagauucgagaucuuccccaagaccagcagcuggcccaaccacgacagcaacaagggcgugaccgccgccugcccccacgccggcgccaagagcuucuacaagaaccugaucuggcuggugaagaagggcaacagcuaccccaagcugagccagagcuacaucaacgacaagggcaaggaggugcuggugcuguggggcauccaccaccccagcaccaccgccgaccagcagagccuguaccagaacgccgacgccuacguguucgugggcaccagcagauacagcaagaaguucaagcccgagaucgccaucagacccaaggugagagaccaggagggcagaaugaacuacuacuggacccugguggagcccggcgacaagaucaccuucgaggccaccggcaaccugguggugcccagauacgccuucaccauggagagaaacgccggcagcggcaucaucaucagcgacacccccgugcacgacugcaacaccaccugccagacccccgagggcgccaucaacaccagccugcccuuccagaacauccaccccaucaccaucggcaagugccccaaguacgugaagagcaccaagcugagccuggccaccggccugagaaacgugcccagcauccagagcagaggccuguucggcgccaucgccggcuucaucgagggcggcuggaccggcaugguggacggcugguacggcuaccaccaccagaacgagcagggcagcggcuacgccgccgaccugaagagcacccagaacgccaucgacaagaucaccaacaaggugaacagcgugaucgagaagaugaacacccaguucaccgccgugggcaaggaguucaaccaccuggagaagagaaucgagaaccugaacaagaagguggacgacggcuuccuggacaucuggaccuacaacgccgagcugcuggugcugcuggagaacgagagaacccuggacuaccacgacagcaacgugaagaaccuguacgagaaggugagaaaccagcugaagaacaacgccaaggagaucggcaacggcugcuucgaguucuaccacaagugcgacaacaccugcauggagagcgugaagaacggcaccuacgacuaccccaaguacagcgaggaggccaagcugaacagagagaagaucgacggcgugaagcuggagagcaccagaaucuaccagauccuggccaucuacagcaccguggccagcagccuggugcugguggugagccugggcgccaucagcuucuggaugugcagcaacggcagccugcagugcagaaucugcaucuga

SEQ ID NO: 172741 - RNA, 1701 nt, Artificial Sequence
  derived and/or modified CDS sequence (opt4) from hemagglutinin__InfluenzaA__AIM55848
augaaggccauccugguggugcugcuguacaccuucgccaccgccaacgccgacacccugugcaucggcuaccacgccaacaacagcaccgacaccguggacaccgugcuggagaagaacgugaccgugacccacagcgugaaccugcuggaggacaagcacaacggcaagcugugcaagcugagaggcguggccccccugcaccugggcaagugcaacaucgccggcuggauccugggcaaccccgagugcgagagccugagcaccgccagcagcuggagcuacaucguggagaccagcagcagcgacaacggcaccugcuaccccggcgacuucaucaacuacgaggagcugagagagcagcugagcagcgugagcagcuucgagagauucgagaucuuccccaagaccagcagcuggcccaaccacgacagcaacaagggcgugaccgccgccugcccccacgccggcgccaagagcuucuacaagaaccugaucuggcuggugaagaagggcaacagcuaccccaagcugagccagagcuacaucaacgacaagggcaaggaggugcuggugcuguggggcauccaccaccccagcaccaccgccgaccagcagagccuguaccagaacgccgacgccuacguguucgugggcaccagcagauacagcaagaaguucaagcccgagaucgccaucagacccaaggugagagaccaggagggcagaaugaacuacuacuggacccugguggagcccggcgacaagaucaccuucgaggccaccggcaaccugguggugcccagauacgccuucaccauggagagaaacgccggcagcggcaucaucaucagcgacacccccgugcacgacugcaacaccaccugccagacccccgagggcgccaucaacaccagccugcccuuccagaacauccaccccaucaccaucggcaagugccccaaguacgugaagagcaccaagcugagacuggccaccggccugagaaacauccccagcauccagagcagaggccuguucggcgccaucgccggcuucaucgagggcggcuggaccggcaugguggacggcugguacggcuaccaccaccagaacgagcagggcagcggcuacgccgccgaccugaagagcacccagaacgccaucgacaagaucaccaacaaggugaacagcgugaucgagaagaugaacacccaguucaccgccgugggcaaggaguucaaccaccuggagaagagaaucgagaaccugaacaagaagguggacgacggcuuccuggacaucuggaccuacaacaccgagcugcuggugcugcuggagaacgagagaacccuggacuaccacgacagcaacgugaagaaccuguacgagaaggugagaaaccagcugaagaacaacgccaaggagaucggcaacggcugcuucgaguucuaccacaagugcgacaacaccugcauggagagcgugaagaacggcaccuacgacuaccccaaguacagcgaggaggccaagcugaacagagagaagaucgacggcgugaagcuggagagcaccagaaucuaccagauccuggccaucuacagcaccguggccagcagccuggugcugguggugagccugggcgccaucagcuucuggaugugcagcaacggcagccugcagugcagaaucugcaucuga

SEQ ID NO: 172742 - RNA, 1701 nt, Artificial Sequence; identical to SEQ ID NO: 170100
  derived and/or modified CDS sequence (opt4) from hemagglutinin__InfluenzaA__AIM55859

SEQ ID NO: 172743 - RNA, 1701 nt, Artificial Sequence; identical to SEQ ID NO: 170100
  derived and/or modified CDS sequence (opt4) from hemagglutinin__InfluenzaA__AIM55870

SEQ ID NO: 172744 - RNA, 1701 nt, Artificial Sequence; identical to SEQ ID NO: 170100
  derived and/or modified CDS sequence (opt4) from hemagglutinin__InfluenzaA__AIM55881

SEQ ID NO: 172745 - RNA, 1701 nt, Artificial Sequence; identical to SEQ ID NO: 171962
  derived and/or modified CDS sequence (opt4) from hemagglutinin__InfluenzaA__AIM55893

SEQ ID NO: 172746 - RNA, 1701 nt, Artificial Sequence; identical to SEQ ID NO: 171081
  derived and/or modified CDS sequence (opt4) from hemagglutinin__InfluenzaA__AIM55904

SEQ ID NO: 172747 - RNA, 1701 nt, Artificial Sequence; identical to SEQ ID NO: 170100
  derived and/or modified CDS sequence (opt4) from hemagglutinin__InfluenzaA__AIM55915

SEQ ID NO: 172748 - RNA, 1710 nt, Artificial Sequence
  derived and/or modified CDS sequence (opt4) from hemagglutinin__InfluenzaA__AIM55926
augaaggccauccugguggugcugcuguacaccuucgccaccaccaacgccgacacccugugcaucggcuaccacgccaacaacagcaccgacaccguggacaccgugcuggagaagaacgugaccgugacccacagcgugaaccugcuggaggacaagcacaacggcaagcugugcaagcugagaggcguggccccccugcaccugggcaagugcaacaucgccggcuggauccugggcaaccccgagugcgagagccugagcaccgccagcagcuggagcuacaucguggagaccagcagcagcgacaacggcaccugcuaccccggcgacuucaucaacuacgaggagcugagagagcagcugagcagcgugagcagcuucgagagauucgagaucuuccccaagaccagcagcuggcccaaccacgacagcaacaagggcgugaccgccgccugcccccacgccggcgccaagagcuucuacaagaaccugaucuggcuggugaagaagggcaacagcuaccccaagcugagccagagcuacaucaacgacaagggcaaggaggugcuggugcuguggggcauccaccaccccagcaccaccgccgaccagcagagccuguaccagaacgccgacgccuacguguucgugggcaccagcagauacagcaagaaguucaagcccgagaucgccaucagacccaaggugagagaccaggagggcagaaugaacuacuacuggacccugguggagcccggcgacaagaucaccuucgaggccaccggcaaccugguggugcccagauacgccuucaccauggagagaaacgccggcagcggcaucaucaucagcgacacccccgugcacgacugcaacaccaccugccagacccccgagggcgccaucaacaccagccugaccagccugcccuuccagaacauccaccccaucaccaucggcaagugccccaaguacgugaagagcaccaagcugagacuggccaccggccugagaaacgugcccagcauccagagcagaggccuguucggcgccaucgccggcuucaucgagggcggcuggaccggcaugguggacggcugguacggcuaccaccaccagaacgagcagggcagcggcuacgccgccgaccugaagagcacccagaacgccaucgacaagaucaccaacaaggugaacagcgugaucgagaagaugaacacccaguucaccgccgugggcaaggaguucaaccaccuggagaagagaaucgagaaccugaacaagaagguggacgacggcuuccuggacaucuggaccuacaacgccgagcugcuggugcugcuggagaacgagagaacccuggacuaccacgacagcaacgugaagaaccuguacgagaaggugagaaaccagcugaagaacaacgccaaggagaucggcaacggcugcuucgaguucuaccacaagugcgacaacaccugcauggagagcgugaagaacggcaccuacgacuaccccaaguacagcgaggaggccaagcugaacagagagaagaucgacggcgugaagcuggagagcaccagaaucuaccagauccuggccaucuacagcaccguggccagcagccuggugcugguggugagccugggcgccaucagcuucuggaugugcagcaacggcagccugcagugcagaaucugcaucuga

SEQ ID NO: 172749 - RNA, 1701 nt, Artificial Sequence; identical to SEQ ID NO: 170100
  derived and/or modified CDS sequence (opt4) from hemagglutinin__InfluenzaA__AIM55937

SEQ ID NO: 172750 - RNA, 1701 nt, Artificial Sequence; identical to SEQ ID NO: 171081
  derived and/or modified CDS sequence (opt4) from hemagglutinin__InfluenzaA__AIM55948

SEQ ID NO: 172751 - RNA, 1701 nt, Artificial Sequence; identical to SEQ ID NO: 171063
  derived and/or modified CDS sequence (opt4) from hemagglutinin__InfluenzaA__AIM55962

SEQ ID NO: 172752 - RNA, 1701 nt, Artificial Sequence; identical to SEQ ID NO: 171081
  derived and/or modified CDS sequence (opt4) from hemagglutinin__InfluenzaA__AIM55984

SEQ ID NO: 172753 - RNA, 1701 nt, Artificial Sequence; identical to SEQ ID NO: 171962
  derived and/or modified CDS sequence (opt4) from hemagglutinin__InfluenzaA__AIM55995

SEQ ID NO: 172754 - RNA, 1701 nt, Artificial Sequence
  derived and/or modified CDS sequence (opt4) from hemagglutinin__InfluenzaA__AIM56017
augaaggccauccugguggugcugcuguacaccuucgccaccaccaacgccgacacccugugcaucggcuaccacgccaacaacagcaccgacaccguggacaccgugcuggagaagaacgugaccgugacccacagcgugaaccugcuggaggacaagcacaacggcaagcugugcaagcugagaggcguggccccccugcaccugggcaagugcaacaucgccggcuggauccugggcaaccccgagugcgagagccugagcaccgccagcagcuggagcuacaucguggagaccagcagcagcgacaacggcaccugcuaccccggcgacuucaucaacuacgaggagcugagagagcagcugagcagcgugagcagcuucgagagauucgagaucuuccccaagaccagcagcuggcccaaccacgacagcaacaagggcgugaccgccgccugcccccacgccggcgccaagagcuucuacaagaaccugaucuggcuggugaagaagggccacagcuaccccaagcugagccagagcuacaucaacgacaagggcaaggaggugcuggugcuguggggcauccaccaccccagcaccaccgccgaccagcagagccuguaccagaacgccgacgccuacguguucgugggcaccagcagauacagcaagaaguucaagcccgagaucgccaucagacccaaggugagagaccaggagggcagaaugaacuacuacuggacccugguggagcccggcgacaagaucaccuucgaggccaccggcaaccugguggugcccagauacgccuucaccauggagagaaacgccggcagcggcaucaucaucagcgacacccccgugcacgacugcaacaccaccugccagacccccgagggcgccaucaacaccagccugcccuuccagaacauccaccccaucaccaucggcaagugccccaaguacgugaagagcaccaagcugagacuggccaccggccugagaaacgugcccagcauccagagcagaggccuguucggcgccaucgccggcuucaucgagggcggcuggaccggcaugguggacggcugguacggcuaccaccaccagaacgagcagggcagcggcuacgccgccgaccugaagagcacccagaacgccaucgacaagaucaccaacaaggugaacagcgugaucgagaagaugaacacccaguucaccgccgugggcaaggaguucaaccaccuggagaagagaaucgagaaccugaacaagaagguggacgacggcuuccuggacaucuggaccuacaacgccgagcugcuggugcugcuggagaacgagagaacccuggacuaccacgacagcaacgugaagaaccuguacgagaaggugagaaaccagcugaagaacaacgccaaggagaucggcaacggcugcuucgaguucuaccacaagugcgacaacaccugcauggagagcgugaagaacggcaccuacgacuaccccaaguacagcgaggaggccaagcugaacagagagaagaucgacggcgugaagcuggagagcaccagaaucuaccagauccuggccaucuacagcaccguggccagcagccuggugcugguggugagccugggcgccaucagcuucuggaugugcagcaacggcagccugcagugcagaaucugcaucuga

SEQ ID NO: 172755 - RNA, 1701 nt, Artificial Sequence; identical to SEQ ID NO: 172754
  derived and/or modified CDS sequence (opt4) from hemagglutinin__InfluenzaA__AIM56028

SEQ ID NO: 172756 - RNA, 1701 nt, Artificial Sequence
  derived and/or modified CDS sequence (opt4) from hemagglutinin__InfluenzaA__AIM56039
augaaggccauccugguggugcugcuguaccccuucgccaccgccaacgccgacacccugugcaucggcuaccacgccaacaacagcaccgacaccguggacaccgugcuggagaagaacgugaccgugacccacagcgugaaccugcuggaggacaagcacaacggcaagcugugcaagcugagaggcguggccccccugcaccugggcaagugcaacaucgccggcuggauccugggcaaccccgagugcgagagccugagcaccgccagcagcuggagcuacaucguggaggccagcagcagcgacaacggcaccugcuaccccggcgacuucaucaacuacgaggagcugagagagcagcugagcagcgugagcagcuucgagagauucgagaucuuccccaagaccagcagcuggcccaaccacgacagcaacaagggcgugaccgccgccugcccccacgccggcgccaagagcuucuacaagaaccugaucuggcuggugaagaagggcaacagcuaccccaagcugagccagagcuacaucaacgacaagggcaaggaggugcuggugcuguggggcauccaccaccccagcaccaccgccgaccagcagagccuguaccagaacgccgacgccuacguguucgugggcaccagcagauacagcaagaaguucaagcccgagaucgccaucagacccaaggugagagaccaggagggcagaaugaacuacuacuggacccugguggagcccggcgacaagaucaccuucgaggccaccggcaaccugguggugcccagauacgccuucaccauggagagaaacgccggcagcggcaucaucaucagcgacacccccgugcacgacugcaacaccaccugccagacccccgagggcgccaucaacaccagccugcccuuccagaacauccaccccaucaccaucggcaagugccccaaguacgugaagagcaccaagcugagacuggccaccggccugagaaacgugcccagcauccagagcagaggccuguucggcgccaucgccggcuucaucgagggcggcuggaccggcaugguggacggcugguacggcuaccaccaccagaacgagcagggcagcggcuacgccgccgaccugaagagcacccagaacgccaucgacaagaucaccaacaaggugaacagcgugaucgagaagaugaacacccaguucaccgccgugggcaaggaguucaaccaccuggagaagagaaucgagaaccugaacaagaagguggacgacggcuuccuggacaucuggaccuacaacgccgagcugcuggugcugcuggagaacgagagaacccuggacuaccacgacagcaacgugaagaaccuguacgagaaggugagaaaccagcugaagaacaacgccaaggagaucggcaacggcugcuucgaguucuaccacaagugcgacaacaccugcauggagagcgugaagaacggcaccuacgacuaccccaaguacagcgaggaggccaagcugaacagagagaagaucgacggcgugaagcuggagagcaccagaaucuaccagauccuggccaucuacagcaccguggccagcagccuggugcugguggugagccugggcgccaucagcuucuggaugugcagcaacggcagccugcagugcagaaucugcaucuga

SEQ ID NO: 172757 - RNA, 1701 nt, Artificial Sequence
  derived and/or modified CDS sequence (opt4) from hemagglutinin__InfluenzaA__AIM56050
augaaggccauccugguggugcugcuguacaccuucgccaccaccaacgccgacacccugugcaucggcuaccacgccaacaacagcaccgacaccguggacaccgugcuggagaagaacgugaccgugacccacagcgugaaccugcuggaggacaagcacaacggcaagcugugcaagcugagaggcguggccccccugcaccugggcaagugcaacaucgccggcuggauccugggcaaccccgagugcgagagccugagcaccgccagcagcuggagcuacaucguggagaccagcagcagcgacaacggcaccugcuaccccggcgacuucaucaacuacgaggagcugagagagcagcugagcagcgugagcagcuucgagagauucgagaucuuccccaagaccagcagcuggcccaaccacgacagcaacaagggcgugaccgccgccugcccccacgccggcgccaagagcuucuacaagaaccugaucuggcuggugaagaagggcaacagcuaccccaagcugagccagagcuacaucaacgacaagggcaaggaggugcuggugcuguggggcauccaccaccccagcaccaccgccgaccagcagagccuguaccagaacgccgacgccuacguguucgugggcaccagcagauacagcaagaaguucaagcccgagaucgccaucagacccaaggugagagaccaggagggcagaaugaacuacuacuggacccugguggagcccggcgacaagaucaccuucgaggccaccggcaaccugguggugcccagauacgccuucaccauggagagaaacgccggcagcggcaucaucaucagcgacacccccgugcacgacugcaacaccaccugccagacccccgagggcgccaucaacaccagccugcccuuccagaacauccaccccaucaccaucggcaagugccccaaguacgugaagagcaccaagcugagacuggccaccggccugagaaacgugcccagcauccagagcagaggccuguucggcgccaucgccggcuucaucgagggcggcuggaccggcaugguggacggcugguacggcuaccaccaccagaacgagcagggcagcggcuacgccgccgaccugaagagcacccagaacgccaucgacaagaucaccaacaaggugaacagcgugaucgagaagaugaacacccaguucaccgccgugggcaaggaguucaaccaccuggagaagagaaucgagaaccugaacaagaagguggacgacggcuuccuggacaucuggaccuacaacgccgagcugcuggugcugcuggagaacgagagaacccuggacuaccacgacagcaacgugaagaaccuguacgagaaggugagaaaccagcugaagaacaacgccaaggagaucggcaacggcugcuucgaguucuaccacaagugcgacaacaccugcauggagagcgugaagaacggcaccuacgacuaccccaaguacagcgaggaggccaagcugaacagaggcaagaucgacggcgugaagcuggagagcaccagaaucuaccagauccuggccaucuacagcaccguggccagcagccuggugcugguggugagccugggcgccaucagcuucuggaugugcagcaacggcagccugcagugcagaaucugcaucuga

SEQ ID NO: 172758 - RNA, 1701 nt, Artificial Sequence; identical to SEQ ID NO: 170100
  derived and/or modified CDS sequence (opt4) from hemagglutinin__InfluenzaA__AIM56061

SEQ ID NO: 172759 - RNA, 1701 nt, Artificial Sequence; identical to SEQ ID NO: 170100
  derived and/or modified CDS sequence (opt4) from hemagglutinin__InfluenzaA__AIM56072

SEQ ID NO: 172760 - RNA, 1701 nt, Artificial Sequence; identical to SEQ ID NO: 171953
  derived and/or modified CDS sequence (opt4) from hemagglutinin__InfluenzaA__AIM56083

SEQ ID NO: 172761 - RNA, 1701 nt, Artificial Sequence; identical to SEQ ID NO: 170100
  derived and/or modified CDS sequence (opt4) from hemagglutinin__InfluenzaA__AIM56105

SEQ ID NO: 172762 - RNA, 1701 nt, Artificial Sequence; identical to SEQ ID NO: 170100
  derived and/or modified CDS sequence (opt4) from hemagglutinin__InfluenzaA__AIM56116

SEQ ID NO: 172763 - RNA, 1701 nt, Artificial Sequence
  derived and/or modified CDS sequence (opt4) from hemagglutinin__InfluenzaA__AIM56127
augaaggccauccugguggugcugcuguacaccuucgccaccgccaacgccgacacccugugcaucggcuaccacgccaacaacagcaccgacaccguggacaccgugcuggagaagaacgugaccgugacccacagcgugaaccugcuggaggacaagcacaacggcaagcugugcaagcugagaggcguggccccccugcaccugggcaagugcaacaucgccggcuggauccugggcaaccccgagugcgagagccugagcaccgccagcagcuggagcuacaucguggagaccagcagcagcgacaacggcaccugcuaccccggcgacuucaucaacuacgaggagcugagagagcagcugagcagcgugagcagcuucgagagauucgagaucuuccccaaggccagcagcuggcccaaccacgacagcaacaagggcgugaccgccgccugcccccacgccggcgccaagagcuucuacaagaaccugaucuggcuggugaagaagggcaacagcuaccccaagcugagccagagcuacaucaacgacaagggcaaggaggugcuggugcuguggggcauccaccaccccagcaccaccgccgaccagcagagccuguaccagaacgccgacgccuacguguucgugggcaccagcagauacagcaagaaguucaagcccgagaucgccaucagacccaaggugagagaccaggagggcagaaugaacuacuacuggacccugguggagcccggcgacaagaucaccuucgaggccaccggcaaccugguggugcccagauacgccuucaccauggagagaaacgccggcagcggcaucaucaucagcgacacccccgugcacgacugcaacaccaccugccagacccccgagggcgccaucaacaccagccugcccuuccagaacauccaccccaucaccaucggcaagugccccaaguacgugaagagcaccaagcugagacuggccaccggccugagaaacauccccagcauccagagcagaggccuguucggcgccaucgccggcuucaucgagggcggcuggaccggcaugguggacggcugguacggcuaccaccaccagaacgagcagggcagcggcuacgccgccgaccugaagagcacccagaacgccaucgacaagaucaccaacaaggugaacagcgugaucgagaagaugaacacccaguucaccgccgugggcaaggaguucaaccaccuggagaagagaaucgagaaccugaacaagaagguggacgacggcuuccuggacaucuggaccuacaacgccgagcugcuggugcugcuggagaacgagagaacccuggacuaccacgacagcaacgugaagaaccuguacgagaaggugagaaaccagcugaagaacaacgccaaggagaucggcaacggcugcuucgaguucuaccacaagugcgacaacaccugcauggagagcgugaagaacggcaccuacgacuaccccaaguacagcgaggaggccaagcugaacagagagaagaucgacggcgugaagcuggagagcaccagaaucuaccagauccuggccaucuacagcaccguggccagcagccuggugcugguggugagccugggcgccaucagcuucuggaugugcagcaacggcagccugcagugcagaaucugcaucuga

SEQ ID NO: 172764 - RNA, 1701 nt, Artificial Sequence; identical to SEQ ID NO: 170100
  derived and/or modified CDS sequence (opt4) from hemagglutinin__InfluenzaA__AIM56138

SEQ ID NO: 172765 - RNA, 1701 nt, Artificial Sequence; identical to SEQ ID NO: 170100
  derived and/or modified CDS sequence (opt4) from hemagglutinin__InfluenzaA__AIM56149

SEQ ID NO: 172766 - RNA, 1701 nt, Artificial Sequence; identical to SEQ ID NO: 171953
  derived and/or modified CDS sequence (opt4) from hemagglutinin__InfluenzaA__AIM56160

SEQ ID NO: 172767 - RNA, 1701 nt, Artificial Sequence; identical to SEQ ID NO: 170100
  derived and/or modified CDS sequence (opt4) from hemagglutinin__InfluenzaA__AIM56171

SEQ ID NO: 172768 - RNA, 1701 nt, Artificial Sequence
  derived and/or modified CDS sequence (opt4) from hemagglutinin__InfluenzaA__AIM56182
augaaggccauccugguggugcugcuguacaccuucgccaccgccaacgccgacacccugugcaucggcuaccacgccaacaacagcaccgacaccguggacaccgugcuggagaagaacgugaccgugacccacagcgugaaccugcuggaggacaagcacaacggcaagcugugcaagcugagaggcguggccccccugcaccugggcaagugcaacaucgccggcuggauccugggcaaccccgagugcgagagccugagcaccgccagcagcuggagcuacaucguggagaccagcagcagcgacaacggcaccugcuaccccggcgacuucaucaacuacgaggagcugagagagcagcugagcagcgugagcagcuucgagagauucgagaucuuccccaaggccagcagcuggcccaaccacgacagcaacaagggcgugaccgccgccugcccccacgccggcgccaagagcuucuacaagaaccugaucuggcuggugaagaagggcaacagcuaccccaagcugagccagagcuacaucaacgacaagggcaaggaggugcuggugcuguggggcauccaccaccccagcaccaccgccgaccagcagagccuguaccagaacgccgacgccuacguguucgugggcaccagcagauacagcaagaaguucaagcccgagaucgccaucagacccaaggugagagaccaggagggcagaaugaacuacuacuggacccugguggagcccggcgacaagaucaccuucgaggccaccggcaaccugguggugcccagauacgccuucaccauggagagaaacgccggcagcggcaucaucaucagcgacacccccgugcacgacugcaacaccaccugccagacccccgagggcgccaucaacaccagccugcccuuccagaacauccaccccaucaccaucggcaagugccccaaguacgugaagagcaccaagcugagacuggccaccggccugagaaacauccccagcauccagagcagaggccuguucggcgccaucgccggcuucaucgagggcggcuggaccggcaugguggacggcugguacggcuaccaccaccagaacgagcagggcagcggcuacgccgccgaccugaagagcacccagaacgccaucgacaagaucaccaacaaggugaacagcgugaucgagaagaugaacacccaguucaccgccgugggcaaggaguucaaccaccuggagaagagaaucgagaaccugaacaagaagguggacgacggcuuccuggacaucuggaccuacaacgccgagcugcuggugcugcuggagaacgagagaacccuggacuaccacgacagcaacgugaagaaccuguacgagaaggugagaaaccagcugaagaacaacgccaaggagaucggcaacggcugcuucgaguucuaccacaagugcgacaacaccugcauggagagcgugaagaacggcaccuacgacuaccccaaguacagcgaggaggccaagcugaacaaggagaagaucgacggcgugaagcuggagagcaccagaaucuaccagauccuggccaucuacagcaccguggccagcagccuggugcugguggugagccugggcgccaucagcuucuggaugugcagcaacggcagccugcagugcagaaucugcaucuga

SEQ ID NO: 172769 - RNA, 1701 nt, Artificial Sequence
  derived and/or modified CDS sequence (opt4) from hemagglutinin__InfluenzaA__AIM56193
augaaggccauccugguggugcugcuguacaccuucgccaccgccaacgccgacacccugugcaucggcuaccacgccaacaacagcaccgacaccguggacaccgugcuggagaagaacgugaccgugacccacagcgugaaccugcuggaggacaagcacaacggcaagcugugcaagcugagaggcguggccccccugcaccugggcaagugcaacaucgccggcuggauccugggcaaccccgagugcgagagccugagcaccgccagcagcuggagcuacaucguggagaccagcagcagcgacaacggcaccugcuaccccggcgacuucaucaacuacgaggagcugagagagcagcugagcagcgugagcagcuucgagagauucgagaucuuccccaagaccagcagcuggcccaaccacgacagcaacaagggcgugaccgccgccugcccccacgccggcgccaagagcuucuacaagaaccugaucuggcuggugaagaagggcaacagcuaccccaagcugagccagagcuacaucaacgacaagggcaaggaggugcuggugcuguggggcauccaccaccccagcaccaccgccgaccagcagagccuguaccagaacgccgacgccuacguguucgugggcaccagcagauacagcaagaaguucaagcccgagaucgccaucagacccaaggugagagaccaggagggcagaaugaacuacuacuggacccugguggagcccggcgacaaggugaccuucgaggccaccggcaaccugguggugcccagauacgccuucaccauggagagaaacgccggcagcggcaucaucaucagcgacacccccgugcacgacugcaacaccaccugccagacccccgagggcgccaucaacaccagccugcccuuccagaacauccaccccaucaccaucggcaagugccccaaguacgugaagagcaccaagcugagacuggccaccggccugagaaacgugcccagcauccagagcagaggccuguucggcgccaucgccggcuucaucgagggcggcuggaccggcaugguggacggcugguacggcuaccaccaccagaacgagcagggcagcggcuacgccgccgaccugaagagcacccagaacgccaucgacaagaucaccaacaaggugaacagcgugaucgagaagaugaacacccaguucaccgccgugggcaaggaguucaaccaccuggagaagagaaucgagaaccugaacaagaagguggacgacggcuuccuggacaucuggaccuacaacgccgagcugcuggugcugcuggagaacgagagaacccuggacuaccacgacagcaacgugaagaaccuguacgagaaggugagaaaccagcugaagaacaacgccaaggagaucggcaacggcugcuucgaguucuaccacaagugcgacaacaccugcauggagagcgugaagaacggcaccuacgacuaccccaaguacagcgaggaggccaagcugaacagagagaagaucgacggcgugaagcuggagagcaccagaaucuaccagauccuggccaucuacagcaccguggccagcagccuggugcugguggugagccugggcgccaucagcuucuggaugugcagcaacggcagccugcagugcagaaucugcaucuga

SEQ ID NO: 172770 - RNA, 1701 nt, Artificial Sequence; identical to SEQ ID NO: 170100
  derived and/or modified CDS sequence (opt4) from hemagglutinin__InfluenzaA__AIM56204

SEQ ID NO: 172771 - RNA, 1701 nt, Artificial Sequence; identical to SEQ ID NO: 170100
  derived and/or modified CDS sequence (opt4) from hemagglutinin__InfluenzaA__AIM56215

SEQ ID NO: 172772 - RNA, 1701 nt, Artificial Sequence; identical to SEQ ID NO: 170100
  derived and/or modified CDS sequence (opt4) from hemagglutinin__InfluenzaA__AIM56226

SEQ ID NO: 172773 - RNA, 1701 nt, Artificial Sequence; identical to SEQ ID NO: 172511
  derived and/or modified CDS sequence (opt4) from hemagglutinin__InfluenzaA__AIM56237

SEQ ID NO: 172774 - RNA, 1701 nt, Artificial Sequence; identical to SEQ ID NO: 170100
  derived and/or modified CDS sequence (opt4) from hemagglutinin__InfluenzaA__AIM56259

SEQ ID NO: 172775 - RNA, 1701 nt, Artificial Sequence
  derived and/or modified CDS sequence (opt4) from hemagglutinin__InfluenzaA__AIM56270
augaaggccauccugguggugcugcuguacaccuucgccaccgccaacgccgacacccugugcaucggcuaccacgccaacaacagcaccgacaccguggacaccgugcuggagaagaacgugaccgugacccacagcgugaaccugcuggaggacaagcacaacggcaagcugugcaagcugagaggcguggccccccugcaccugggcaagugcaacaucgccggcuggauccugggcaaccccgagugcgagagccugagcaccgccagcagcuggagcuacaucguggagaccagcagcagcgacaacggcaccugcuaccccggcgacuucaucaacuacgaggagcugagagagcagcugagcagcgugagcagcuucgagagauucgagaucuuccccaagaccagcagcuggcccaaccacgacagcaacaagggcgugaccgccgccugcccccacgccggcgccaagagcuucuacaagaaccugaucuggcuggugaagaagggcaacagcuaccccaagcugagccagagcuacaucaacgacaagggcaaggaggugcuggugcuguggggcauccaccaccccagcaccaccgccgaccagcagagccuguaccagaacgccgacgccuacguguucgugggcaccagcagauacagcaagaaguucaagcccgagaucgccaucagacccaaggugagagaccaggagggcagaaugaacuacuacuggacccugguggagcccggcgacaagaucaccuucgaggccaccggcaaccugguggugcccagauacgccuucaccauggagagaaacgccggcagcggcaucaucaucagcgacacccccgugcacgacugcaacaccaccugccagacccccgagggcgccgugaacaccagccugcccuuccagaacauccaccccaucaccaucggcaagugccccaaguacgugaagagcaccaagcugagacuggccaccggccugagaaacgugcccagcauccagagcagaggccuguucggcgccaucgccggcuucaucgagggcggcuggaccggcaugguggacggcugguacggcuaccaccaccagaacgagcagggcagcggcuacgccgccgaccugaagagcacccagaacgccaucgacaagaucaccaacaaggugaacagcgugaucgagaagaugaacacccaguucaccgccgugggcaaggaguucaaccaccuggagaagagaaucgagaaccugaacaagaagguggacgacggcuuccuggacaucuggaccuacaacgccgagcugcuggugcugcuggagaacgagagaacccuggacuaccacgacagcaacgugaagaaccuguacgagaaggugagaaaccagcugaagaacaacgccaaggagaucggcaacggcugcuucgaguucuaccacaagugcgacaacaccugcauggagagcgugaagaacggcaccuacgacuaccccaaguacagcgaggaggccaagcugaacagagagaagaucgacggcgugaagcuggagagcaccagaaucuaccagauccuggccaucuacagcaccguggccagcagccuggugcugguggugagccugggcgccaucagcuucuggaugugcagcaacggcagccugcagugcagaaucugcaucuga

SEQ ID NO: 172776 - RNA, 1701 nt, Artificial Sequence; identical to SEQ ID NO: 170100
  derived and/or modified CDS sequence (opt4) from hemagglutinin__InfluenzaA__AIM56281

SEQ ID NO: 172777 - RNA, 1701 nt, Artificial Sequence
  derived and/or modified CDS sequence (opt4) from hemagglutinin__InfluenzaA__AIM56292
augaaggccauccugguggugcugcuguacacccuggccaccgccaacgccgacacccugugcaucggcuaccacgccaacaacagcaccgacaccguggacaccgugcuggagaagaacgugaccgugacccacagcgugaaccugcuggaggacaagcacaacggcaagcugugcaagcugagaggcguggccccccugcaccugggcaagugcaacaucgccggcuggauccugggcaaccccgagugcgagagccugagcaccgccagcagcuggagcuacaucguggagaccagcagcagcgacaacggcaccugcuaccccggcgacuucaucaacuacgaggagcugagagagcagcugagcagcgugagcagcuucgagagauucgagaucuuccccaagaccagcagcuggcccaaccacgacagcaacaagggcgugaccgccgccugcccccacgccggcgccaagagcuucuacaagaaccugaucuggcuggugaagaagggcaacagcuaccccaagcugagccagagcuacaucaacgacaagggcaaggagauccuggugcuguggggcauccaccaccccagcaccaccgccgaccagcagagccuguaccagaacgccgacgccuacguguucgugggcaccagcagauacagcaagaaguucaagcccgagaucgccaucagacccaaggugagagaccaggagggcagaaugaacuacuacuggacccugguggagcccggcgacaagaucaccuucgaggccaccggcaaccugguggugcccagauacgccuucaccauggagagaaacgccggcagcggcaucaucaucagcgacacccccgugcacgacugcaacaccaccugccagacccccgagggcgccaucaacaccagccugcccuuccagaacauccaccccaucaccaucggcaagugccccaaguacgugaagagcaccaagcugagacuggccaccggccugagaaacgugcccagcauccagagcagaggccuguucggcgccaucgccggcuucaucgagggcggcuggaccggcaugguggacggcugguacggcuaccaccaccagaacgagcagggcagcggcuacgccgccgaccugaagagcacccagaacgccaucgacaagaucaccaacaaggugaacagcgugaucgagaagaugaacacccaguucaccgccgugggcaaggaguucaaccaccuggagaagagaaucgagaaccugaacaagaagguggacgacggcuuccuggacaucuggaccuacaacgccgagcugcuggugcugcuggagaacgagagaacccuggacuaccacgacagcaacgugaagaaccuguacgagaaggugagaaaccagcugaagaacaacgccaaggagaucggcaacggcugcuucgaguucuaccacaagugcgacaacaccugcauggagagcgugaagaacggcaccuacgacuaccccaaguacagcgaggaggccaagcugaacagagagaagaucgacggcgugaagcuggagagcaccagaaucuaccagauccuggccaucuacagcaccguggccagcagccuggugcugguggugagccugggcgccaucagcuucuggaugugcagcaacggcagccugcagugcagaaucugcaucuga

SEQ ID NO: 172778 - RNA, 1701 nt, Artificial Sequence
  derived and/or modified CDS sequence (opt4) from hemagglutinin__InfluenzaA__AIM56303
augaaggccauccugguggugcugcuguacacccuggccaccgccaacgccgacacccugugcaucggcuaccacgccaacaacagcaccgacaccguggacaccgugcuggagaagaacgugaccgugacccacagcgugaaccugcuggaggacaagcacaacggcaagcugugcaagcugagaggcguggccccccugcaccugggcaagugcaacaucgccggcuggauccugggcaaccccgagugcgagagccugagcaccgccagcagcuggagcuacaucguggagaccagcagcagcgacaacggcaccugcuaccccggcgacuucaucaacuacgaggagcugagagagcagcugagcagcgugagcagcuucgagagauucgagaucuuccccaagaccagcagcuggcccaaccacgacagcaacaagggcgugaccgccgccugcccccacgccggcgccaagagcuucuacaagaaccugaucuggcuggugaagaagggcaacagcuaccccaagcugagccagagcuacaucaacgacaagggcaaggaggugcuggugcuguggggcauccaccaccccagcaccaccgccgaccagcagagccuguaccagaacgccgacgccuacguguucgugggcaccagcagauacagcaagaaguucaagcccgagaucgccaucagacccaaggugagagaccaggagggcagaaugaacuacuacuggacccugguggagcccggcgacaagaucaccuucgaggccaccggcaaccugguggugcccagauacgccuucaccauggagagaaacgccggcagcggcaucaucaucagcgacacccaggugcacgacugcaacaccaccugccagacccccgagggcgccaucaacaccagccugcccuuccagaacauccaccccaucaccaucggcaagugccccaaguacgugaagagcaccaagcugagacuggccaccggccugagaaacgugcccagcauccagagcagaggccuguucggcgccaucgccggcuucaucgagggcggcuggaccggcaugguggacggcugguacggcuaccaccaccagaacgagcagggcagcggcuacgccgccgaccugaagagcacccagaacgccaucgacaagaucaccaacaaggugaacagcgugaucgagaagaugaacacccaguucaccgccgugggcaaggaguucaaccaccuggagaagagaaucgagaaccugaacaagaagguggacgacggcuuccuggacaucuggaccuacaacgccgagcugcuggugcugcuggagaacgagagaacccuggacuaccacgacagcaacgugaagaaccuguacgagaaggugagaaaccagcugaagaacaacgccaaggagaucggcaacggcugcuucgaguucuaccacaagugcgacaacaccugcauggagagcgugaagaacggcaccuacgacuaccccaaguacagcgaggaggccaagcugaacagagagaagaucgacggcgugaagcuggagagcaccagaaucuaccagauccuggccaucuacagcaccguggccagcagccuggugcugguggugagccugggcgccaucagcuucuggaugugcagcaacggcagccugcagugcagaaucugcaucuga

SEQ ID NO: 172779 - RNA, 1701 nt, Artificial Sequence
  derived and/or modified CDS sequence (opt4) from hemagglutinin__InfluenzaA__AIM56314
augaaggccauccugguggugcugcuguacaccuucgccaccgccaacgccgacacccugugcaucggcuaccacgccaacaacagcaccgacaccguggacaccgugcuggagaagaacgugaccgugacccacagcgugaaccugcuggaggacaagcacaacggcaagcugugcaagcugagaggcguggccccccugcaccugggcaagugcaacaucgccggcuggauccugggcaaccccgagugcgagagccugagcaccgccagcagcuggagcuacaucguggagaccagcagcagcgacaacggcaccugcuaccccggcgacuucaucaacuacgaggagcugagagagcagcugagcagcgugagcagcuucgagagauucgagaucuuccccaagaccagcagcuggcccaaccacgacagcaacaagggcgugaccgccgccugcccccacgccggcgccaagagcuucuacaagaaccugaucuggcuggugaagaagggcaacagcuaccccaagcugagccagagcuacaucaacgacaagggcaaggaggugcuggugcuguggggcauccaccaccccagcaccaccgccgaccagcagagccuguaccagaacgccgacgccuacguguucgugggcaccagcagauacagcaagaaguucaagcccgagaucgccaucagacccaaggugagagaccaggagggcagaaugaacuacuacuggacccugguggagcccggcgacaagaucaccuucgaggccaccggcaaccugguggugcccagauacgccuucaccauggagagaaacgccggcagcggcaucaucaucagcgacacccccgugcacgacugcaacaccaccugccagacccccgagggcgccaucaacaccagccugcccuuccagaacauccaccccaucaccaucggcaagugccccaaguacgugaagagcaccaagcugagacuggccaccggccugagaaacgugcccagcauccagagcagaggccuguucggcgccaucgccggcuucaucgagggcggcuggaccggcaugguggacggcugguacggcuaccaccaccagaacgagcagggcagcggcuacgccgccgaccugaagagcacccagaacgccaucgacaagaucaccaacaaggugaacagcgugaucgagaagaugaacacccaguucaccgccgugggcaaggaguucaaccaccuggagaagagaaucgagaaccugaacaagaagguggacgacggcuuccuggacaucuggaccuacaacgccgagcugcuggugcugcuggagaacgagagaacccuggacuaccacgacagcaacgugaagaagcuguacgagaaggugagaaaccagcugaagaacaacgccaaggagaucggcaacggcugcuucgaguucuaccacaagugcgacaacaccugcauggagagcgugaagaacggcaccuacgacuaccccaaguacagcgaggaggccaagcugaacagagagaagaucgacggcgugaagcuggagagcaccagaaucuaccagauccuggccaucuacagcaccguggccagcagccuggugcugguggugagccugggcgccaucagcuucuggaugugcagcaacggcagccugcagugcagaaucugcaucuga

SEQ ID NO: 172780 - RNA, 1701 nt, Artificial Sequence; identical to SEQ ID NO: 170100
  derived and/or modified CDS sequence (opt4) from hemagglutinin__InfluenzaA__AIM56325

SEQ ID NO: 172781 - RNA, 1701 nt, Artificial Sequence
  derived and/or modified CDS sequence (opt4) from hemagglutinin__InfluenzaA__AIM56336
augaaggccauccugguggugcugcuguacaccuucgccaccgccaacgccgacacccugugcaucggcuaccacgccaacaacagcaccgacaccguggacaccgugcuggagaagaacgugaccgugacccacagcgugaaccugcuggaggacaagcacaacggcaagcugugcaagcugagaggcguggccccccugcaccugggcaagugcaacaucgccggcuggauccugggcaaccccgagugcgagagccugagcaccgccagcagcuggagcuacaucguggagaccagcagcagcgacaacggcaccugcuaccccggcgacuucaucaacuacgaggagcugagagagcagcugagcagcgugagcagcuucgagagauucgagaucuuccccaagaccagcagcuggcccaaccacgacagcaacaagggcgugaccgccgccugcccccacgccggcgccaagagcuucuacaagaaccugaucuggcuggugaagaagggcaacagcuaccccaagcugagccagagcuacaucaacgacaagggcaaggaggugcuggugcuguggggcauccaccaccccagcaccaccgccgaccagcagagccuguaccagaacgccgacgccuacguguucgugggcaccagcagauacagcaagaaguucaagcccgagaucgccaucagacccaaggugagagaccaggagggcagaaugaacuacuacuggacccugguggagcccggcgacaagaucaccuucgaggccaccggcaaccugguggugcccagauacgccuucaccauggagagaaacgccggcagcggcaucaucaucagcgacacccccgugcacgacugcaacaccaccugccagacccccgagggcgccaucaacaccagccugcccuuccagaacauccaccccaucaccaucggcaagugccccaaguacgugaagagcaccaagcugagacuggccaccggccugagaaacauccccagcauccagagcagaggccuguucggcgccaucgccggcuucaucgagggcggcuggaccggcaugguggacggcugguacggcuaccaccaccagaacgagcagggcagcggcuacgccgccgaccugaagagcacccagaacgccaucgacaagaucaccaacaaggugaacagcgugaucgagaagaugaacacccaguucaccgccgugggcaaggaguucaaccaccuggagaagagaaucgagaaccugaacaagaagguggacgacggcuuccuggacaucuggaccuacaacgccgagcugcuggugcugcuggagaacgagagaacccuggacuaccacgacagcaacgugaagaaccuguacgagaagaucagaaaccagcugaagaacaacgccaaggagaucggcaacggcugcuucgaguucuaccacaagugcgacaacaugugcauggagagcgugaagaacggcaccuacgacuaccccaaguacagcgaggaggccaagcugaacagagagaagaucgacggcgugaagcuggagagcaccagaaucuaccagauccuggccaucuacagcaccguggccagcagccuggugcugguggugagccugggcgccaucagcuucuggaugugcagcaacggcagccugcagugcagaaucugcaucuga

SEQ ID NO: 172782 - RNA, 1701 nt, Artificial Sequence
  derived and/or modified CDS sequence (opt4) from hemagglutinin__InfluenzaA__AIM56347
augaaggccauccugguggugcugcuguacaccuucgccaccgccaacgccgacacccugugcaucggcuaccacgccaacaacagcaccgacaccguggacaccgugcuggagaagaacgugaccgugacccacagcgugaaccugcuggaggacaagcacaacggcaagcugugcaagcugagaggcguggccccccugcaccugggcaagugcaacaucgccggcuggauccugggcaaccccgagugcgagagccugagcaccaccagcagcuggagcuacaucguggagaccagcagcagcgacaacggcaccugcuaccccggcgacuucaucaacuacgaggagcugagagagcagcugagcagcgugagcagcuucgagagauucgagaucuuccccaagaccagcagcuggcccaaccacgacagcaacaagggcgugaccgccgccugcccccacgccggcgccaagagcuucuacaagaaccugaucuggcuggugaagaagggcaacagcuaccccaagcugagccagagcuacaucaacgacaagggcaaggaggugcuggugcuguggggcauccaccaccccagcaccaccgccgaccagcagagccuguaccagaacgccgacgccuacguguucgugggcaccagcagauacagcaagaaguucaagcccgagaucgccaucagacccaaggugagagaccaggagggcagaaugaacuacuacuggacccugguggagcccggcgacaagaucaccuucgaggccaccggcaaccugguggugcccagauacgccuucaccauggagagaaacgccggcagcggcaucaucaucagcgacacccccgugcacgacugcaacaccaccugccagacccccgagggcgccaucaacaccagccugcccuuccagaacauccaccccaucaccaucggcaagugccccaaguacgugaagagcaccaagcugagacuggccaccggccugagaaacgugcccagcauccagagcagaggccuguucggcgccaucgccggcuucaucgagggcggcuggaccggcaugguggacggcugguacggcuaccaccaccagaacgagcagggcagcggcuacgccgccgaccugaagagcacccagaacgccaucgacaagaucaccaacaaggugaacagcgugaucgagaagaugaacacccaguucaccgccgugggcaaggaguucaaccaccuggagaagagaaucgagaaccugaacaagaagguggacgacggcuuccuggacaucuggaccuacaacgccgagcugcuggugcugcuggagaacgagagaacccuggacuaccacgacagcaacgugaagaaccuguacgagaaggugagaaaccagcugaagaacaacgccaaggagaucggcaacggcugcuucgaguucuaccacaagugcgacaacaccugcauggagagcgugaagaacggcaccuacgacuaccccaaguacagcgaggaggccaagcugaacagagagaagaucgacggcgugaagcuggagagcaccagaaucuaccagauccuggccaucuacagcaccguggccagcagccuggugcugguggugagccugggcgccaucagcuucuggaugugcagcaacggcagccugcagugcagaaucugcaucuga

SEQ ID NO: 172783 - RNA, 1701 nt, Artificial Sequence
  derived and/or modified CDS sequence (opt4) from hemagglutinin__InfluenzaA__AIM56358
augaaggccauccugguggugcugcuguacaccuucgccaccgccaacgccgacacccugugcaucggcuaccacgccaacaacagcaccgacaccguggacaccgugcuggagaagaacgugaccgugacccacagcgugaaccugcuggaggacaagcacaacggcaagcugugcaagcugagaggcguggccccccugcaccugggcaagugcaacaucgccggcuggauccugggcaaccccgagugcgagagccugagcaccgccagcagcuggagcuacaucguggagaccagcagcagcgacaacggcaccugcuaccccggcgacuucaucaacuacgaggagcugagagagcagcugagcagcgugagcagcuucgagagauucgagaucuuccccaagaccagcagcuggcccaaccacgacagcaacaagggcgugaccgccgccugcccccacgccggcgccaagagcuucuacaagaaccugaucuggcuggugaagaagggcaacagcuaccccaagcugagccagagcuacaucaacgacaagggcaaggaggugcuggugcuguggggcauccaccaccccagcaccaccgccgaccagcagagccuguaccagaacgccgacgccuacguguucgugggcaccagcagauacagcaagaaguucaagcccgagaucgccaucagacccaaggugagagaccaggagggcagaaugaacuacuacuggacccuggugaagcccggcgacaagaucaccuucgaggccaccggcaaccugguggugcccagauacgccuucaccauggagagaaacgccggcagcggcaucaucaucagcgacacccccgugcacgacugcaacaccaccugccagacccccgagggcgccaucaacaccagccugcccuuccagaacauccaccccaucaccaucggcaagugccccaaguacgugaagagcaccaagcugagacuggccaccggccugagaaacgugcccagcauccagagcagaggccuguucggcgccaucgccggcuucaucgagggcggcuggaccggcaugguggacggcugguacggcuaccaccaccagaacgagcagggcagcggcuacgccgccgaccugaagagcacccagaacgccaucgacaagaucaccaacaaggugaacagcgugaucgagaagaugaacacccaguucaccgccgugggcaaggaguucaaccaccuggagaagagaaucgagaaccugaacaagaagguggacgacggcuuccuggacaucuggaccuacaacgccgagcugcuggugcugcuggagaacgagagaacccuggacuaccacgacagcaacgugaagaaccuguacgagaaggugagaaaccagcugaagaacaacgccaaggagaucggcaacggcugcuucgaguucuaccacaagugcgacaacaccugcauggagagcgugaagaacggcaccuacgacuaccccaaguacagcgaggaggccaagcugaacagagagaagaucgacggcgugaagcuggagagcaccagaaucuaccagauccuggccaucuacagcaccguggccagcagccuggugcugguggugagccugggcgccaucagcuucuggaugugcagcaacggcagccugcagugcagaaucugcaucuga

SEQ ID NO: 172784 - RNA, 1701 nt, Artificial Sequence; identical to SEQ ID NO: 170100
  derived and/or modified CDS sequence (opt4) from hemagglutinin__InfluenzaA__AIM56369

SEQ ID NO: 172785 - RNA, 1701 nt, Artificial Sequence
  derived and/or modified CDS sequence (opt4) from hemagglutinin__InfluenzaA__AIM56380
augaaggccauccugguggugcugcuguacaccuucgccaccgccaacgccgacacccugugcaucggcuaccacgccaacaacagcaccgacaccguggacaccgugcuggagaagaacgugaccgugacccacagcgugaaccugcuggaggacaagcacaacggcaagcugugcaagcugagaggcguggccccccugcaccugggcaagugcaacaucgccggcuggauccugggcaaccccgagugcgagagccugagcaccgccagcagcuggagcuacaucguggagaccagcagcagcgacaacggcaccugcuaccccggcgacuucaucaacuacgaggagcugagagagcagcugagcagcgugagcagcuucgagagauucgagaucuuccccaagaccagcagcuggcccaaccacgacagcaacaagggcgugaccgccgccugcccccacgccggcgccaagagcuucuacaagaaccugaucuggcuggugaagaagggcaacagcuaccccaagcugagccagagcuacaucaacgacaagggcaaggaggugcuggugcuguggggcauccaccaccccagcaccaccgccgaccagcagagccuguaccagaacgccgacgccuacguguucgugggcaccagcagauacagcaagaaguucaagcccgagaucgccaucagacccaaggugagagaccaggagggcagaaugaacuacuacuggacccugguggagcccggcgacaagaucaccuucgaggccaccggcaaccugguggugcccagauacgccuucaccauggagagaaacgccggcagcggcaucaucaucagcgacacccccgugcacgacugcaacaccaccugccagacccccgagggcgccaucaacaccagccugcccuuccagaacauccaccccaucaccaucggcaagugccccaaguacgugaagagcaccaagcugagacuggccaccggccugagaaacgugcccagcauccagagcagaggccuguucggcgccaucgccggcuucaucgagggcggcuggaccggcaugguggacggcugguacggcuaccaccaccagaacgagcagggcagcggcuacgccgccgaccugaagagcacccagaacgccaucgacaagaucaccaacaaggugaacagcgugaucgagaagaugaacacccaguucaccgccgugggcaaggaguucaaccaccuggagaagagaaucgagaaccugaacaagaagguggacgacggcuuccuggacaucuggaccuacaacgccgagcugcuggugcugcuggagaacgagagaacccuggacuaccacgacagcaacgugaagaaccuguacgagaaggugagaaaccagcugaagaacaacgccaaggagaucggcaacggcugcuucgaguucuaccacaagugcgacaacaccugcauggagagcgugaagaacggcaccuacgacuaccccaaguacagcgaggaggccaagcugagcagagagaagaucgacggcgugaagcuggagagcaccagaaucuaccagauccuggccaucuacagcaccguggccagcagccuggugcugguggugagccugggcgccaucagcuucuggaugugcagcaacggcagccugcagugcagaaucugcaucuga

SEQ ID NO: 172786 - RNA, 1701 nt, Artificial Sequence; identical to SEQ ID NO: 170100
  derived and/or modified CDS sequence (opt4) from hemagglutinin__InfluenzaA__AIM56391

SEQ ID NO: 172787 - RNA, 1701 nt, Artificial Sequence; identical to SEQ ID NO: 170100
  derived and/or modified CDS sequence (opt4) from hemagglutinin__InfluenzaA__AIM56402

SEQ ID NO: 172788 - RNA, 1701 nt, Artificial Sequence; identical to SEQ ID NO: 171953
  derived and/or modified CDS sequence (opt4) from hemagglutinin__InfluenzaA__AIM56413

SEQ ID NO: 172789 - RNA, 1701 nt, Artificial Sequence; identical to SEQ ID NO: 170100
  derived and/or modified CDS sequence (opt4) from hemagglutinin__InfluenzaA__AIM56425

SEQ ID NO: 172790 - RNA, 1701 nt, Artificial Sequence; identical to SEQ ID NO: 170100
  derived and/or modified CDS sequence (opt4) from hemagglutinin__InfluenzaA__AIM56436

SEQ ID NO: 172791 - RNA, 1701 nt, Artificial Sequence; identical to SEQ ID NO: 170100
  derived and/or modified CDS sequence (opt4) from hemagglutinin__InfluenzaA__AIM56447

SEQ ID NO: 172792 - RNA, 1701 nt, Artificial Sequence; identical to SEQ ID NO: 170100
  derived and/or modified CDS sequence (opt4) from hemagglutinin__InfluenzaA__AIM56469

SEQ ID NO: 172793 - RNA, 1701 nt, Artificial Sequence
  derived and/or modified CDS sequence (opt4) from hemagglutinin__InfluenzaA__AIM56480
augaaggccauccugguggugcugcuguacaccuucgccaccaccaacgccgacacccugugcaucggcuaccacgccaacaacagcaccgacaccguggacaccgugcuggagaagaacgugaccgugacccacagcgugaaccugcuggaggacaagcacaacggcaagcugugcaagcugagaggcguggccccccugcaccugggcaagugcaacaucgccggcuggauccugggcaaccccgagugcgagagccugagcaccgccagcagcuggagcuacaucguggagaccagcagcagcgacaacggcaccugcuaccccggcgacuucaucaacuacgaggagcugagagagcagcugagcagcgugagcagcuucgagagauucgagaucuuccccaagaccagcagcuggcccaaccacgacagcaacaagggcgugaccgccgccugcccccacgccggcgccaagagcuucuacaagaaccugaucuggcuggugaagaagggcaacagcuaccccaagcugagccagagcuacaucaacgacaagggcaaggaggugcuggugcuguggggcauccaccaccccagcaccaccgccgaccagcagagccuguaccagaacgccgacgccuacguguucgugggcaccagcagauacagcaagaaguucaagcccgagaucgccaucagacccaaggugagagaccaggagggcagaaugaacuacuacuggacccugguggagcccggcgacaagaucaccuucgaggccaccggcaaccugguggugcccagauacgccuucaccauggagagaaacgccggcagcggcaucaucaucagcgacacccccgugcacgacugcaacaccaccugccagacccccgagggcgccaucaacaccagccugcccuuccagaacauccaccccaucacccugggcaagugccccaaguacgugaagagcaccaagcugagacuggccaccggccugagaaacgugcccagcauccagagcagaggccuguucggcgccaucgccggcuucaucgagggcggcuggaccggcaugguggacggcugguacggcuaccaccaccagaacgagcagggcagcggcuacgccgccgaccugaagagcacccagaacgccaucgacaagaucaccaacaaggugaacagcgugaucgagaagaugaacacccaguucaccgccgugggcaaggaguucaaccaccuggagaagagaaucgagaaccugaacaagaagguggacgacggcuuccuggacaucuggaccuacaacgccgagcugcuggugcugcuggagaacgagagaacccuggacuaccacgacagcaacgugaagaaccuguacgagaaggugagaaaccagcugaagaacaacgccaaggagaucggcaacggcugcuucgaguucuaccacaagugcgacaacaccugcauggagagcgugaagaacggcaccuacgacuaccccaaguacagcgaggaggccaagcugaacagagagaagaucgacggcgugaagcuggagagcaccagaaucuaccagauccuggccaucuacagcaccguggccagcagccuggugcugguggugagccugggcgccaucagcuucuggaugugcagcaacggcagccugcagugcagaaucugcaucuga

SEQ ID NO: 172794 - RNA, 1701 nt, Artificial Sequence; identical to SEQ ID NO: 170100
  derived and/or modified CDS sequence (opt4) from hemagglutinin__InfluenzaA__AIM56491

SEQ ID NO: 172795 - RNA, 1710 nt, Artificial Sequence
  derived and/or modified CDS sequence (opt4) from hemagglutinin__InfluenzaA__AIM56502
augaaggccauccugguggugcugcuguacaccuucgccaccgccaacgccgacacccugugcaucggcuaccacgccaacaacagcaccgacaccguggacaccgugcuggagaagaacgugaccgugacccacagcgugaaccugcuggaggacaagcacaacggcaagcugugcaagcugagaggcguggccccccugcaccugggcaagugcaacaucgccggcuggauccugggcaaccccgagugcgagagccugagcaccgccagcagcuggagcuacaucguggagaccagcagcagcgacaacggcaccugcuaccccggcgacuucaucaacuacgaggagcugagagagcagcugagcagcgugagcagcuucgagagauucgagaucuuccccaaggccagcagcuggcccaaccacgacagcaacaagggcgugaccgccgccugcccccacgccggcgccaagagcuucuacaagaaccugaucuggcuggugaagaagggcaacagcuaccccaagcugagccagagcuacaucaacgacaagggcaaggaggugcuggugcuguggggcauccaccaccccagcaccaccgccgaccagcagagccuguaccagaacgccgacgccuacguguucgugggcaccagcagauacagcaagaaguucaagcccgagaucgccaucagacccaaggugagagaccaggagggcagaaugaacuacuacuggacccugguggagcccggcgacaagaucaccuucgaggccaccggcaaccugguggugcccagauacgccuucaccauggagagaaacgccggcagcggcaucaucaucagcgacacccccgugcacgacugcaacaccaccugccagacccccgagggcgccaucaacaccagccugaccagccugcccuuccagaacauccaccccaucaccaucggcaagugccccaaguacgugaagagcaccaagcugagacuggccaccggccugagaaacauccccagcauccagagcagaggccuguucggcgccaucgccggcuucaucgagggcggcuggaccggcaugguggacggcugguacggcuaccaccaccagaacgagcagggcagcggcuacgccgccgaccugaagagcacccagaacgccaucgacaagaucaccaacaaggugaacagcgugaucgagaagaugaacacccaguucaccgccgugggcaaggaguucaaccaccuggagaagagaaucgagaaccugaacaagaagguggacgacggcuuccuggacaucuggaccuacaacgccgagcugcuggugcugcuggagaacgagagaacccuggacuaccacgacagcaacgugaagaaccuguacgagaaggugagaaaccagcugaagaacaacgccaaggagaucggcaacggcugcuucgaguucuaccacaagugcgacaacaccugcauggagagcgugaagaacggcaccuacgacuaccccaaguacagcgaggaggccaagcugaacagagagaagaucgacggcgugaagcuggagagcaccagaaucuaccagauccuggccaucuacagcaccguggccagcagccuggugcugguggugagccugggcgccaucagcuucuggaugugcagcaacggcagccugcagugcagaaucugcaucuga

SEQ ID NO: 172796 - RNA, 1701 nt, Artificial Sequence; identical to SEQ ID NO: 170100
  derived and/or modified CDS sequence (opt4) from hemagglutinin__InfluenzaA__AIM56513

SEQ ID NO: 172797 - RNA, 1701 nt, Artificial Sequence; identical to SEQ ID NO: 172045
  derived and/or modified CDS sequence (opt4) from hemagglutinin__InfluenzaA__AIM56524

SEQ ID NO: 172798 - RNA, 1701 nt, Artificial Sequence; identical to SEQ ID NO: 170100
  derived and/or modified CDS sequence (opt4) from hemagglutinin__InfluenzaA__AIM56535

SEQ ID NO: 172799 - RNA, 1701 nt, Artificial Sequence; identical to SEQ ID NO: 170100
  derived and/or modified CDS sequence (opt4) from hemagglutinin__InfluenzaA__AIM56546

SEQ ID NO: 172800 - RNA, 1701 nt, Artificial Sequence; identical to SEQ ID NO: 171953
  derived and/or modified CDS sequence (opt4) from hemagglutinin__InfluenzaA__AIM56557

SEQ ID NO: 172801 - RNA, 1701 nt, Artificial Sequence
  derived and/or modified CDS sequence (opt4) from hemagglutinin__InfluenzaA__AIM56568
augaaggccauccugguggugcugcuguacaccuucgccaccgccaacgccgacacccugugcaucggcuaccacgccaacaacagcaccgacaccguggacaccgugcuggagaagaacgugaccgugacccacagcgugaaccugcuggaggacaagcacaacggcaagcugugcaagcugagaggcguggccccccugcaccugggcaagugcaacaucgccggcuggauccugggcaaccccgagugcgagagccugagcaccgccagcagcuggagcuacaucguggagaccagcagcagcgacaacggcaccugcuaccccggcgacuucaucaacuacgaggagcugagagagcagcugagcagcgugagcagcuucgagagauucgagaucuucagcaagaccagcagcuggcccaaccacgacagcaacaagggcgugaccgccgccugcccccacgccggcgccaagagcuucuacaagaaccugaucuggcuggugaagaagggcaacagcuaccccaagcugagccagagcuacaucaacgacaagggcaaggaggugcuggugcuguggggcauccaccaccccagcaccaccgccgaccagcagagccuguaccagaacgccgacgccuacguguucgugggcaccagcagauacagcaagaaguucaagcccgagaucgccaucagacccaaggugagagaccaggagggcagaaugaacuacuacuggacccugguggagcccggcgacaagaucaccuucgaggccaccggcaaccugguggugcccagauacgccuucaccauggagagaaacgccggcagcggcaucaucaucagcgacacccccgugcacgacugcaacaccaccugccagacccccgagggcgccaucaacaccagccugcccuuccagaacauccaccccaucaccaucggcaagugccccaaguacgugaagagcaccaagcugagacuggccaccggccugagaaacgugcccagcauccagagcagaggccuguucggcgccaucgccggcuucaucgagggcggcuggaccggcaugguggacggcugguacggcuaccaccaccagaacgagcagggcagcggcuacgccgccgaccugaagagcacccagaacgccaucgacaagaucaccaacaaggugaacagcgugaucgagaagaugaacacccaguucaccgccgugggcaaggaguucaaccaccuggagaagagaaucgagaaccugaacaagaagguggacgacggcuuccuggacaucuggaccuacaacgccgagcugcuggugcugcuggagaacgagagaacccuggacuaccacgacagcaacgugaagaaccuguacgagaaggugagaaaccagcugaagaacaacgccaaggagaucggcaacggcugcuucgaguucuaccacaagugcgacaacaccugcauggagagcgugaagaacggcaccuacgacuaccccaaguacagcgaggaggccaagcugaacagagagaagaucgacggcgugaagcuggagagcaccagaaucuaccagauccuggccaucuacagcaccguggccagcagccuggugcugguggugagccugggcgccaucagcuucuggaugugcagcaacggcagccugcagugcagaaucugcaucuga

SEQ ID NO: 172802 - RNA, 1701 nt, Artificial Sequence
  derived and/or modified CDS sequence (opt4) from hemagglutinin__InfluenzaA__AIM56579
augaaggccauccugguggugcugcuguacaccuucgccaccaccaacgccgacacccugugcaucggcuaccacgccaacaacagcaccgacaccguggacaccgugcuggagaagaacgugaccgugacccacagcgugaaccugcuggaggacgagcacaacggcaagcugugcaagcugagaggcguggccccccugcaccugggcaagugcaacaucgccggcuggauccugggcaaccccgagugcgagagccugagcaccgccagcagcuggagcuacaucguggagaccagcagcagcgacaacggcaccugcuaccccggcgacuucaucaacuacgaggagcugagagagcagcugagcagcgugagcagcuucgagagauucgagaucuuccccaagaccagcagcuggcccaaccacgacagcaacaagggcgugaccgccgccugcccccacgccggcgccaagagcuucuacaagaaccugaucuggcuggugaagaagggcaacagcuaccccaagcugagccagagcuacaucaacgacaagggcaaggaggugcuggugcuguggggcauccaccaccccagcaccaccgccgaccagcagagccuguaccagaacaccgacgccuacguguucgugggcaccagcagauacagcaagaaguucaagcccgagaucgccaucagacccaaggugagagaccaggagggcagaaugagcuacuacuggacccugguggagcccggcgacaagaucaccuucgaggccaccggcaaccugguggugcccagauacgccuucaccauggagagaaacgccggcagcggcaucaucaucagcgacacccccgugcacgacugcaacaccaccugccagacccccgagggcgccaucaacaccagccugcccuuccagaacauccaccccaucaccaucggcaagugccccaaguacgugaagagcaccaagcugagacuggccaccggccugagaaacgugcccagcauccagagcagaggccuguucggcgccaucgccggcuucaucgagggcggcuggaccggcaugguggacggcugguacggcuaccaccaccagaacgagcagggcagcggcuacgccgccgaccugaagagcacccagaacgccaucgacaagaucaccaacaaggugaacagcgugaucgagaagaugaacacccaguucaccgccgugggcaaggaguucaaccaccuggagaagagaaucgagaaccugaacaagaagguggacgacggcuuccuggacaucuggaccuacaacgccgagcugcuggugcugcuggagaacgagagaacccuggacuaccacgacagcaacgugaagaaccuguacgagaaggugagaaaccagcugaagaacaacgccaaggagaucggcaacggcugcuucgaguucuaccacaagugcgacaacaccugcauggagagcgugaagaacggcaccuacgacuaccccaaguacagcgaggaggccaagcugaacagagagaagaucgacggcgugaagcuggagagcaccagaaucuaccagauccuggccaucuacagcaccguggccagcagccuggugcugguggugagccugggcgccaucagcuucuggaugugcagcaacggcagccugcagugcagaaucugcaucuga

SEQ ID NO: 172803 - RNA, 1710 nt, Artificial Sequence
  derived and/or modified CDS sequence (opt4) from hemagglutinin__InfluenzaA__AIM56590
augaaggccauccugguggugcugcuguacaccuucgccaccgccaacgccgacacccugugcaucggcuaccacgccaacaacagcaccgacaccguggacaccgugcuggagaagaacgugaccgugacccacagcgugaaccugcuggaggacaagcacaacggcaagcugugcaagcugagaggcguggccccccugcaccugggcaagugcaacaucgccggcuggauccugggcaaccccgagugcgagagccugagcaccgccagcagcuggagcuacaucguggagaccagcagcagcgacaacggcaccugcuaccccggcgacuucaucaacuacgaggagcugagagagcagcugagcagcgugagcagcuucgagagauucgagaucuuccccaagaccagcagcuggcccaaccacgacagcaacaagggcgugaccgccgccugcccccacgccggcgccaagagcuucuacaagaaccugaucuggcuggugaagaagggcaacagcuaccccaagcugagccagagcuacaucaacgacaagggcaaggaggugcuggugcuguggggcauccaccaccccagcaccaccgccgaccagcagagccuguaccagaacgccgacgccuacguguucgugggcaccagcagauacagcaagaaguucaagcccgagaucgccaucagacccaaggugagagaccaggagggcagaaugaacuacuacuggacccugguggagcccggcgacaagaucaccuucgaggccaccggcaaccugguggugcccagauacgccuucaccauggagagaaacgccggcagcggcaucaucaucagcgacacccccgugcacgacugcaacaccaccugccagacccccgagggcgccaucaacaccagccugaccagccugcccuuccagaacauccaccccaucaccaucggcaagugccccaaguacgugaagagcaccaagcugagacuggccaccggccugagaaacgugcccagcauccagagcagaggccuguucggcgccaucgccggcuucaucgagggcggcuggaccggcaugguggacggcugguacggcuaccaccaccagaacgagcagggcagcggcuacgccgccgaccugaagagcacccagaacgccaucgacaagaucaccaacaaggugaacagcgugaucgagaagaugaacacccaguucaccgccgugggcaaggaguucaaccaccuggagaagagaaucgagaaccugaacaagaagguggacgacggcuuccuggacaucuggaccuacaacgccgagcugcuggugcugcuggagaacgagagaacccuggacuaccacgacagcaacgugaagaaccuguacgagaaggugagaaaccagcugaagaacaacgccaaggagaucggcaacggcugcuucgaguucuaccacaagugcgacgacaccugcauggagagcgugaagaacggcaccuacgacuaccccaaguacagcgaggaggccaagcugaacagagagaagaucgacggcgugaagcuggagagcaccagaaucuaccagauccuggccaucuacagcaccguggccagcagccuggugcugguggugagccugggcgccaucagcuucuggaugugcagcaacggcagccugcagugcagaaucugcaucuga

SEQ ID NO: 172804 - RNA, 1710 nt, Artificial Sequence
  derived and/or modified CDS sequence (opt4) from hemagglutinin__InfluenzaA__AIM56601
augaaggccauccugguggugcugcuguacaccuucgccaccgccaacgccgacacccugugcaucggcuaccacgccaacaacagcaccgacaccguggacaccgugcuggagaagaacgugaccgugacccacagcgugaaccugcuggaggacaagcacaacggcaagcugugcaagcugagaggcguggccccccugcaccugggcaagugcaacaucgccggcuggauccugggcaaccccgagugcgagagccugagcaccgccagcagcuggagcuacaucguggagaccagcagcagcgacaacggcaccugcuaccccggcgacuucaucaacuacgaggagcugagagagcagcugagcagcgugagcagcuucgagagauucgagaucuuccccaagaccagcagcuggcccaaccacgacagcaacaagggcgugaccgccgccugcccccacgccggcgccaagagcuucuacaagaaccugaucuggcuggugaagaagggcaacagcuaccccaagcugagccagagcuacaucaacgacaagggcaaggaggugcuggugcuguggggcauccaccaccccagcaccaccgccgaccagcagagccuguaccagaacgccgacgccuacguguucgugggcaccagcagauacagcaagaaguucaagcccgagaucgccaucagacccaaggugagagaccaggagggcagaaugaacuacuacuggacccugguggagcccggcgacaagaucaccuucgaggccaccggcaaccugguggugcccagauacgccuucaccauggagagaaacgccggcagcggcaucaucaucagcgacacccccgugcacgacugcaacaccaccugccagacccccgagggcgccaucaacaccagccugaccagccugcccuuccagaacauccaccccaucaccaucggcaagugccccaaguacgugaagagcaccaagcugagacuggccaccggccugagaaacgugcccagcauccagagcagaggccuguucggcgccaucgccggcuucaucgagggcggcuggaccggcaugguggacggcugguacggcuaccaccaccagaacgagcagggcagcggcuacgccgccgaccugaagagcacccagaacgccaucgacaagaucaccaacaaggugaacagcgugaucgagaagaugaacacccaguucaccgccgugggcaaggaguucaaccaccuggagaagagaaucgagaaccugaacaagaagguggacgacggcuuccuggacaucuggaccuacaacgccgagcugcuggugcugcuggagaacgagagaacccuggacuaccacgacagcaacgugaagaaccuguacgagaaggugagaaaccagcugaagaacaacgccaaggagaucggcaacggcugcuucgaguucuaccacaagugcgacaacaccugcauggagagcgugaagaacggcaccuacgacuaccccaaguacagcgaggaggccaagcugaacagagagaagaucgacggcgugaagcuggagagcaccagaaucuaccagauccuggccaucuacagcaccguggccagcagccuggugcugguggugagccugggcgccaucagcuucuggaugugcagcaacggcagccugcagugcagaaucugcaucuga

SEQ ID NO: 172805 - RNA, 1710 nt, Artificial Sequence
  derived and/or modified CDS sequence (opt4) from hemagglutinin__InfluenzaA__AIM56612
augaaggccauccugguggugcugcuguacaccuucgccaccgccaacgccgacacccugugcaucggcuaccacgccaacaacagcaccgacaccguggacaccgugcuggagaagaacgugaccgugacccacagcgugaaccugcuggaggacaagcacaacggcaagcugugcaagcugagaggcguggccccccugcaccugggcaagugcaacaucgccggcuggauccugggcaaccccgagugcgagagccugagcaccgccagcagcuggagcuacaucguggagaccagcagcagcgacaacggcaccugcuaccccggcgacuucaucaacuacgaggagcugagagagcagcugagcagcgugagcagcuucgagagauucgagaucuuccccaagaccagcagcuggcccaaccacgacagcaacaagggcgugaccgccgccugcccccacgccggcgccaagagcuucuacaagaaccugaucuggcuggugaagaagggcaacagcuaccccaagcugagccagagcuacaucaacgacaagggcaaggaggugcuggugcuguggggcauccaccaccccagcaccaccgccgaccagcagagccuguaccagaacgccgacgccuacguguucgugggcaccagcagauacagcaagaaguucaagcccgagaucgccaucagacccaaggugagagaccaggagggcagaaugaacuacuacuggacccugguggagcccggcgacaagaucaccuucgaggccaccggcaaccugguggugcccagauacgccuucaccauggagagaaacaccggcagcggcaucaucaucagcgacacccccgugcacgacugcaacaccaccugccagacccccgagggcgccaucaacaccagccugaccagccugcccuuccagaacauccaccccaucaccaucggcaagugccccaaguacgugaagagcaccaagcugagacuggccaccggccugagaaacgugcccagcauccagagcagaggccuguucggcgccaucgccggcuucaucgagggcggcuggaccggcaugguggacggcugguacggcuaccaccaccagaacgagcagggcagcggcuacgccgccgaccugaagagcacccagaacgccaucgacaagaucaccaacaaggugaacagcgugaucgagaagaugaacacccaguucaccgccgugggcaaggaguucaaccaccuggagaagagaaucgagaaccugaacaagaagguggacgacggcuuccuggacaucuggaccuacaacgccgagcugcuggugcugcuggagaacgagagaacccuggacuaccacgacagcaacgugaagaaccuguacgagaaggugagaaaccagcugaagaacaacgccaaggagaucggcaacggcugcuucgaguucuaccacaagugcgacaacaccugcauggagagcgugaagaacggcaccuacgacuaccccaaguacagcgaggaggccaagcugaacagagagaagaucgacggcgugaagcuggagagcaccagaaucuaccagauccuggccaucuacagcaccguggccagcagccuggugcugguggugagccugggcgccaucagcuucuggaugugcagcaacggcagccugcagugcagaaucugcaucuga

SEQ ID NO: 172806 - RNA, 1701 nt, Artificial Sequence
  derived and/or modified CDS sequence (opt4) from hemagglutinin__InfluenzaA__AIM56623
augaaggccauccugguggugcugcuguacaccuucgccaccgccaacgccgacacccugugcaucggcuaccacgccaacaacagcaccgacaccguggacaccgugcuggagaagaacgugaccgugacccacagcgugaaccugcuggaggacaagcacaacggcaagcugugcaagcugagaggcguggccccccugcaccugggcaagugcaacaucgccggcuggauccugggcaaccccgagugcgagagccugagcaccgccagcagcuggagcuacaucguggagaccagcagcagcgacaacggcaccugcuaccccggcgacuucaucaacuacgaggagcugagagagcagcugagcagcgugagcagcuucgagagauucgagaucuuccccaagaccagcagcuggcccaaccacgacagcaacaagggcgugaccgccgccugcccccacgccggcgccaagagcuucuacaagaaccugaccuggcuggugaagaagggcaacagcuaccccaagcugagccagagcuacaucaacgacaagggcaaggaggugcuggugcuguggggcauccaccaccccagcaccaccgccgaccagcagagccuguaccagaacgccgacgccuacguguucgugggcaccagcagauacagcaagaaguucaagcccgagaucgccaucagacccaaggugagagaccaggagggcagaaugaacuacuacuggacccugguggagcccggcgacaagaucaccuucgaggccaccggcaaccugguggugcccagauacgccuucaccauggagagaaacgccggcagcggcaucaucaucagcgacacccccgugcacgacugcaacaccaccugccagacccccgagggcgccaucaacaccagccugcccuuccagaacauccaccccaucaccaucggcaagugccccaaguacgugaagagcaccaagcugagacuggccaccggccugagaaacgugcccagcauccagagcagaggccuguucggcgccaucgccggcuucaucgagggcggcuggaccggcaugguggacggcugguacggcuaccaccaccagaacgagcagggcagcggcuacgccgccgaccugaagagcacccagaacgccaucgacaagaucaccaacaaggugaacagcgugaucgagaagaugaacacccaguucaccgccgugggcaaggaguucaaccaccuggagaagagaaucgagaaccugaacaagaagguggacgacggcuuccuggacaucuggaccuacaacgccgagcugcuggugcugcuggagaacgagagaacccuggacuaccacgacagcaacgugaagaaccuguacgagaaggugagaaaccagcugaagaacaacgccaaggagaucggcaacggcugcuucgaguucuaccacaagugcgacaacaccugcauggagagcgugaagaacggcaccuacgacuaccccaaguacagcgaggaggccaagcugaacagagagaagaucgacggcgugaagcuggagagcaccagaaucuaccagauccuggccaucuacagcaccguggccagcagccuggugcugguggugagccugggcgccaucagcuucuggaugugcagcaacggcagccugcagugcagaaucugcaucuga

SEQ ID NO: 172807 - RNA, 1701 nt, Artificial Sequence
  derived and/or modified CDS sequence (opt4) from hemagglutinin__InfluenzaA__AIM56634
augaaggccauccugguggugcugcuguacaccuucgccaccgccaacgccgacacccugugcaucggcuaccacgccaacaacagcaccgacaccguggacaccgugcuggagaagaacgugaccgugacccacagcgugaaccugcuggaggacaagcacaacggcaagcugugcaagcugagaggcguggccccccugcaccugggcaagugcaacaucgccggcuggauccugggcaaccccgagugcgagagccugagcaccgccaacagcuggagcuacaucguggagaccagcagcagcgacaacggcaccugcuaccccggcgacuucaucaacuacgaggagcugagagagcagcugagcagcgugagcagcuucgagagauucgagaucuuccccaagaccagcagcuggcccaaccacgacagcaacaagggcgugaccgccgccugcccccacgccggcgccaagagcuucuacaagaaccugaucuggcuggugaagaagggcaacagcuaccccaagcugagccagagcuacaucaacgacaagggcaaggaggugcuggugcuguggggcauccaccaccccagcaccaccgccgaccagcagagccuguaccagaacgccgacgccuacguguucgugggcaccagcagauacagcaagaaguucaagcccgagaucgccaucagacccaaggugagagaccaggagggcagaaugaacuacuacuggacccugguggagcccggcgacaagaucaccuucgaggccaccggcaaccugguggugcccagauacgccuucaccauggagagaaacgccggcagcggcaucaucaucagcgacacccccgugcacgacugcaacaccaccugccagacccccgagggcgccaucaacaccagccugcccuuccagaacauccaccccaucaccaucggcaagugccccaaguacgugaagagcaccaagcugagacuggccaccggccugagaaacgugcccagcauccagagcagaggccuguucggcgccaucgccggcuucaucgagggcggcuggaccggcaugguggacggcugguacggcuaccaccaccagaacgagcagggcagcggcuacgccgccgaccugaagagcacccagaacgccaucgacaagaucaccaacaaggugaacagcgugaucgagaagaugaacacccaguucaccgccgugggcaaggaguucaaccaccuggagaagagaaucgagaaccugaacaagaagguggacgacggcuuccuggacaucuggaccuacaacgccgagcugcuggugcugcuggagaacgagagaacccuggacuaccacgacagcaacgugaagaaccuguacgagaaggugagaaaccagcugaagaacaacgccaaggagaucggcaacggcugcuucgaguucuaccacaagugcgacaacaccugcauggagagcgugaagaacggcaccuacgacuaccccaaguacagcgaggaggccaagcugaacagagagaagaucgacggcgugaagcuggagagcaccagaaucuaccagauccuggccaucuacagcaccguggccagcagccuggugcugguggugagccugggcgccaucagcuucuggaugugcagcaacggcagccugcagugcagaaucugcaucuga

SEQ ID NO: 172808 - RNA, 1710 nt, Artificial Sequence
  derived and/or modified CDS sequence (opt4) from hemagglutinin__InfluenzaA__AIM56645
augaaggccauccugguggugcugcuguacaccuucgccaccgccaacgccgacacccugugcaucggcuaccacgccaacaacagcaccgacaccguggacaccgugcuggagaagaacgugaccgugacccacagcgugaaccugcuggaggacaagcacaacggcaagcugugcaagcugagaggcguggccccccugcaccugggcaagugcaacaucgccggcuggauccugggcaaccccgagugcgagagccugagcaccgccagcagcuggagcuacaucguggagaccagcagcagcgacaacggcaccugcuaccccggcgacuucaucaacuacgaggagcugagagagcagcugagcagcgugagcagcuucgagagauucgagaucuuccccaagaccagcagcuggcccaaccacgacagcaacaagggcgugaccgccgccugcccccacgccggcgccaagagcuucuacaagaaccugaucuggcuggugaagaagggcaacagcuaccccaagcugagccagagcuacaucaacgacaagggcaaggaggugcuggugcuguggggcauccaccaccccagcaccaccgccgaccagcagagccuguaccagaacgccgacgccuacguguucgugggcaccagcagauacagcaagaaguucaagcccgagaucgccaucagacccaaggugagagaccaggagggcagaaugaacuacuacuggacccugguggagcccggcgacaagaucaccuucgaggccaccggcaaccugguggugcccagauacgccuucaccauggagagaaacgccggcagcggcaucaucaucagcgacacccccgugcacgacugcaacaccaccugccagacccccgagggcgccaucaacaccagccugaccagccugcccuuccagaacauccaccccaucaccaucggcaagugccccaaguacgugaagagcaccaagcugagacuggccaccggccugagaaacgugcccagcauccagagcagaggccuguucggcgccaucgccggcuucaucgagggcggcuggaccggcaugguggacggcugguacggcuaccaccaccagaacgagcagggcagcggcuacgccgccgaccagaagagcacccagaacgccaucgacaagaucaccaacaaggugaacagcgugaucgagaagaugaacacccaguucaccgccgugggcaaggaguucaaccaccuggagaagagaaucgagaaccugaacaagaagguggacgacggcuuccuggacaucuggaccuacaacgccgagcugcuggugcugcuggagaacgagagaacccuggacuaccacgacagcaacgugaagaaccuguacgagaaggugagaaaccagcugaagaacaacgccaaggagaucggcaacggcugcuucgaguucuaccacaagugcgacaacaccugcauggagagcgugaagaacggcaccuacgacuaccccaaguacagcgaggaggccaagcugaacagagagaagaucgacggcgugaagcuggagagcaccagaaucuaccagauccuggccaucuacagcaccguggccagcagccuggugcugguggugagccugggcgccaucagcuucuggaugugcagcaacggcagccugcagugcagaaucugcaucuga

SEQ ID NO: 172809 - RNA, 1701 nt, Artificial Sequence
  derived and/or modified CDS sequence (opt4) from hemagglutinin__InfluenzaA__AIM56656
augaaggccauccugguggugcugcuguacaccuucgccaccgccaacgccgacacccugugcaucggcuaccacgccaacaacagcaccgacaccguggacaccgugcuggagaagaacgugaccgugacccacagcgugaaccugcuggaggacaagcacaacggcaagcugugcaagcugagaggcguggccccccugcaccugggcaagugcaacaucgccggcuggauccugggcaaccccgagugcgagagccugagcaccgccagcagcuggagcuacaucguggagaccagcagcagcgacaacggcaccugcuaccccggcgacuucaucaacuacgaggagcugagagagcagcugagcagcgugagcagcuucgagagauucgagaucuuccccaagaccaacagcuggcccaaccacgacagcaacaagggcgugaccgccgccugcccccacgccggcgccaagagcuucuacaagaaccugaucuggcuggugaagaagggcaacagcuaccccaagcugagccagagcuacaucaacgacaagggcaaggaggugcuggugcuguggggcauccaccaccccagcaccaccgccgaccagcagagccuguaccagaacgccgacgccuacguguucgugggcaccagcagauacagcaagaaguucaagcccgagaucgccaucagacccaaggugagagaccaggagggcagaaugaacuacuacuggacccugguggagcccggcgacaagaucaccuucgaggccaccggcaacaucguggugcccagauacgccuucaccauggagagaaacgccggcagcggcaucaucaucagcgacacccccgugcacgacugcaacaccaccugccagacccccgagggcgccaucaacaccagccugcccuuccagaacauccaccccaucaccaucggcaagugccccaaguacgugaagagcaccaagcugagacuggccaccggccugagaaacgugcccagcauccagagcagaggccuguucggcgccaucgccggcuucaucgagggcggcuggaccggcaugguggacggcugguacggcuaccaccaccagaacgagcagggcagcggcuacgccgccgaccugaagagcacccagaacgccaucgacaagaucaccaacaaggugaacagcgugaucgagaagaugaacacccaguucaccgccgugggcaaggaguucaaccaccuggagaagagaaucgagaaccugaacaagaagguggacgacggcuuccuggacaucuggaccuacaacgccgagcugcuggugcugcuggagaacgagagaacccuggacuaccacgacagcaacgugaagaaccuguacgagaaggugagaaaccagcugaagaacaacgccaaggagaucggcaacggcugcuucgaguucuaccacaagugcgacaacaccugcauggagagcgugaagaacggcaccuacgacuaccccaaguacagcgaggaggccaagcugaacagagagaagaucgacggcgugaagcuggagagcaccagaaucuaccagauccuggccaucuacagcaccguggccagcagccuggugcugguggugagccugggcgccaucagcuucuggaugugcagcaacggcagccugcagugcagaaucugcaucuga

SEQ ID NO: 172810 - RNA, 1701 nt, Artificial Sequence; identical to SEQ ID NO: 170100
  derived and/or modified CDS sequence (opt4) from hemagglutinin__InfluenzaA__AIM56667

SEQ ID NO: 172811 - RNA, 1701 nt, Artificial Sequence
  derived and/or modified CDS sequence (opt4) from hemagglutinin__InfluenzaA__AIM56678
augaaggccauccugguggugcugcuguacaccuucgccaccgccaacgccgacacccugugcaucggcuaccacgccaacaacagcaccgacaccguggacaccgugcuggagaagaacgugaccgugacccacagcgugaaccugcuggaggacaagcacaacggcaagcugugcaagcugagaggcgugcccccccugcaccugggcaagugcaacaucgccggcuggauccugggcaaccccgagugcgagagccugagcaccgccagcagcuggagcuacaucguggagaccagcagcagcgacaacggcaccugcuaccccggcgacuucaucaacuacgaggagcugagagagcagcugagcagcgugagcagcuucgagagauucgagaucuuccccaagaccagcagcuggcccaaccacgacagcaacaagggcgugaccgccgccugcccccacgccggcgccaagagcuucuacaagaaccugaucuggcuggugaagaagggcaacagcuaccccaagcugagccagagcuacaucaacgacaagggcaaggaggugcuggugcuguggggcauccaccaccccagcaccaccgccgaccagcagagccuguaccagaacgccgacgccuacguguucgugggcaccagcagauacagcaagaaguucaagcccgagaucgccaucagacccaaggugagagaccaggagggcagaaugaacuacuacuggacccugguggagcccggcgacaagaucaccuucgaggccaccggcaaccugguggugcccagauacgccuucaccauggagagaaacgccggcagcggcaucaucaucagcgacacccccgugcacgacugcaacaccaccugccagacccccgagggcgccaucaacaccagccugcccuuccagaacauccaccccaucaccaucggcaagugccccaaguacgugaagagcaccaagcugagacuggccaccggccugagaaacgugcccagcauccagagcagaggccuguucggcgccaucgccggcuucaucgagggcggcuggaccggcaugguggacggcugguacggcuaccaccaccagaacgagcagggcagcggcuacgccgccgaccugaagagcacccagaacgccaucgacaagaucaccaacaaggugaacagcgugaucgagaagaugaacacccaguucaccgccgugggcaaggaguucaaccaccuggagaagagaaucgagaaccugaacaagaagguggacgacggcuuccuggacaucuggaccuacaacgccgagcugcuggugcugcuggagaacgagagaacccuggacuaccacgacagcaacgugaagaaccuguacgagaaggugagaaaccagcugaagaacaacgccaaggagaucggcaacggcugcuucgaguucuaccacaagugcgacaacaccugcauggagagcgugaagaacggcaccuacgacuaccccaaguacagcgaggaggccaagcugaacagagagaagaucgacggcgugaagcuggagagcaccagaaucuaccagauccuggccaucuacagcaccguggccagcagccuggugcugguggugagccugggcgccaucagcuucuggaugugcagcaacggcagccugcagugcagaaucugcaucuga

SEQ ID NO: 172812 - RNA, 1701 nt, Artificial Sequence; identical to SEQ ID NO: 172448
  derived and/or modified CDS sequence (opt4) from hemagglutinin__InfluenzaA__AIM56689

SEQ ID NO: 172813 - RNA, 1701 nt, Artificial Sequence; identical to SEQ ID NO: 170100
  derived and/or modified CDS sequence (opt4) from hemagglutinin__InfluenzaA__AIM56700

SEQ ID NO: 172814 - RNA, 1710 nt, Artificial Sequence
  derived and/or modified CDS sequence (opt4) from hemagglutinin__InfluenzaA__AIM56711
augaaggccauccugguggugcugcuguacaccuucgccaccgccaacgccgacacccugugcaucggcuaccacgccaacaacagcaccgacaccguggacaccgugcuggagaagaacgugaccgugacccacagcgugaaccugcuggaggacaagcacaacggcaagcugugcaagcugagaggcgugcccccccugcaccugggcaagugcaacaucgccggcuggauccugggcaaccccgagugcgagagccugagcaccgccagcagcuggagcuacaucguggagaccagcagcagcgacaacggcaccugcuaccccggcgacuucaucaacuacgaggagcugagagagcagcugagcagcgugagcagcuucgagagauucgagaucuuccccaagaccagcagcuggcccaaccacgacagcaacaagggcgugaccgccgccugcccccacgccggcgccaagagcuucuacaagaaccugaucuggcuggugaagaagggcaacagcuaccccaagcugagccagagcuacaucaacgacaagggcaaggaggugcuggugcuguggggcauccaccaccccagcaccaccgccgaccagcagagccuguaccagaacgccgacgccuacguguucgugggcaccagcagauacagcaagaaguucaagcccgagaucgccaucagacccaaggugagagaccaggagggcagaaugaacuacuacuggacccugguggagcccggcgacaagaucaccuucgaggccaccggcaaccugguggugcccagauacgccuucaccauggagagaaacgccggcagcggcaucaucaucagcgacacccccgugcacgacugcaacaccaccugccagacccccgagggcgccaucaacaccagccugaccagccugcccuuccagaacauccaccccaucaccaucggcaagugccccaaguacgugaagagcaccaagcugagacuggccaccggccugagaaacgugcccagcauccagagcagaggccuguucggcgccaucgccggcuucaucgagggcggcuggaccggcaugguggacggcugguacggcuaccaccaccagaacgagcagggcagcggcuacgccgccgaccugaagagcacccagaacgccaucgacaagaucaccaacaaggugaacagcgugaucgagaagaugaacacccaguucaccgccgugggcaaggaguucaaccaccuggagaagagaaucgagaaccugaacaagaagguggacgacggcuuccuggacaucuggaccuacaacgccgagcugcuggugcugcuggagaacgagagaacccuggacuaccacgacagcaacgugaagaaccuguacgagaaggugagaaaccagcugaagaacaacgccaaggagaucggcaacggcugcuucgaguucuaccacaagugcgacaacaccugcauggagagcgugaagaacggcaccuacgacuaccccaaguacagcgaggaggccaagcugaacagagagaagaucgacggcgugaagcuggagagcaccagaaucuaccagauccuggccaucuacagcaccguggccagcagccuggugcugguggugagccugggcgccaucagcuucuggaugugcagcaacggcagccugcagugcagaaucugcaucuga

SEQ ID NO: 172815 - RNA, 1701 nt, Artificial Sequence; identical to SEQ ID NO: 172448
  derived and/or modified CDS sequence (opt4) from hemagglutinin__InfluenzaA__AIM56722

SEQ ID NO: 172816 - RNA, 1701 nt, Artificial Sequence; identical to SEQ ID NO: 170100
  derived and/or modified CDS sequence (opt4) from hemagglutinin__InfluenzaA__AIM56733

SEQ ID NO: 172817 - RNA, 1701 nt, Artificial Sequence; identical to SEQ ID NO: 170100
  derived and/or modified CDS sequence (opt4) from hemagglutinin__InfluenzaA__AIM56744

SEQ ID NO: 172818 - RNA, 1701 nt, Artificial Sequence
  derived and/or modified CDS sequence (opt4) from hemagglutinin__InfluenzaA__AIM56755
augaaggccauccugguggugcugcuguacaccuucgccaccgccaacgccgacacccugugcaucggcuaccacgccaacaacagcaccgacaccguggacaccgugcuggagaagaacgugaccgugacccacagcgugaaccugcuggaggacaagcacaacggcaagcugugcaagcugagaggcguggccccccugcaccugggcaagugcaacaucgccggcuggauccugggcaaccccgagugcgagagccugagcaccgccagcagcuggagcuacaucguggagaccagcagcagcgacaacggcaccugcuaccccggcgacuucaucaacuacgaggagcugagagagcagcugagcagcgugagcagcuucgagagauucgagaucuuccccaagaccagcagcuggcccagccacgacagcaacaagggcgugaccgccgccugcccccacgccggcgccaagagcuucuacaagaaccugaucuggcuggugaagaagggcaacagcuaccccaagcugagccagagcuacaucaacgacaagggcaaggaggugcuggugcuguggggcauccaccaccccagcaccaccgccgaccagcagagccuguaccagaacgccgacgccuacguguucgugggcaccagcagauacagcaagaaguucaagcccgagaucgccaucagacccaaggugagagaccaggagggcagaaugaacuacuacuggacccugguggagcccggcgacaagaucaccuucgaggccaccggcaaccugguggugcccagauacgccuucaccauggagagaaacgccggcagcggcaucaucaucagcgacacccccgugcacgacugcaacaccaccugccagacccccgagggcgccaucaacaccagccugcccuuccagaacauccaccccaucaccaucggcaagugccccaaguacgugaagagcaccaagcugagacuggccaccggccugagaaacgugcccagcauccagagcagaggccuguucggcgccaucgccggcuucaucgagggcggcuggaccggcaugguggacggcugguacggcuaccaccaccagaacgagcagggcagcggcuacgccgccgaccugaagagcacccagaacgccaucgacaagaucaccaacaaggugaacagcgugaucgagaagaugaacacccaguucaccgccgugggcaaggaguucaaccaccuggagaagagaaucgagaaccugaacaagaagguggacgacggcuuccuggacaucuggaccuacaacgccgagcugcuggugcugcuggagaacgagagaacccuggacuaccacgacagcaacgugaagaaccuguacgagaaggugagaaaccagcugaagaacaacgccaaggagaucggcaacggcugcuucgaguucuaccacaagugcgacaacaccugcauggagagcgugaagaacggcaccuacgacuaccccaaguacagcgaggaggccaagcugaacagagagaagaucgacggcgugaagcuggagagcaccagaaucuaccagauccuggccaucuacagcaccguggccagcagccuggugcugguggugagccugggcgccaucagcuucuggaugugcagcaacggcagccugcagugcagaaucugcaucuga

SEQ ID NO: 172819 - RNA, 1710 nt, Artificial Sequence; identical to SEQ ID NO: 172804
  derived and/or modified CDS sequence (opt4) from hemagglutinin__InfluenzaA__AIM56766

SEQ ID NO: 172820 - RNA, 1701 nt, Artificial Sequence
  derived and/or modified CDS sequence (opt4) from hemagglutinin__InfluenzaA__AIM56777
augaaggccauccugguggugcugcuguacaccuucgccaccgccaacgccgacacccugugcaucggcuaccacgccaacaacagcaccgacaccguggacaccgugcuggagaagaacgugaccgugacccacagcgugaaccugcuggagggcaagcacaacggcaagcugugcaagcugagaggcguggccccccugcaccugggcaagugcaacaucgccggcuggauccugggcaaccccgagugcgagagccugagcaccgccagcagcuggagcuacaucguggagaccagcagcagcgacaacggcaccugcuaccccggcgacuucaucaacuacgaggagcugagagagcagcugagcagcgugagcagcuucgagagauucgagaucuuccccaagaccagcagcuggcccaaccacgacagcaacaagggcgugaccgccgccugcccccacgccggcgccaagagcuucuacaagaaccugaucuggcuggugaagaagggcaacagcuaccccaagcugagccagagcuacaucaacgacaagggcaaggaggugcuggugcuguggggcauccaccaccccagcaccaccgccgaccagcagagccuguaccagaacgccgacgccuacguguucgugggcaccagcagauacagcaagaaguucaagcccgagaucgccaucagacccaaggugagagaccaggagggcagaaugaacuacuacuggacccugguggagcccggcgacaagaucaccuucgaggccaccggcaaccugguggugcccagauacgccuucaccauggagagaaacgccggcagcggcaucaucaucagcgacacccccgugcacgacugcaacaccaccugccagacccccgagggcgccaucaacaccagccugcccuaccagaacauccaccccaucaccaucggcaagugccccaaguacgugaagagcaccaagcugagacuggccaccggccugagaaacgugcccagcauccagagcagaggccuguucggcgccaucgccggcuucaucgagggcggcuggaccggcaugguggacggcugguacggcuaccaccaccagaacgagcagggcagcggcuacgccgccgaccugaagagcacccagaacgccaucgacaagaucaccaacaaggugaacagcgugaucgagaagaugaacacccaguucaccgccgugggcaaggaguucaaccaccuggagaagagaaucgagaaccugaacaagaagguggacgacggcuuccuggacaucuggaccuacaacgccgagcugcuggugcugcuggagaacgagagaacccuggacuaccacgacagcaacgugaagaaccuguacgagaaggugagaaaccagcugaagaacaacgccaaggagaucggcaacggcugcuucgaguucuaccacaagugcgacaacaccugcauggagagcgugaagaacggcaccuacgacuaccccaaguacagcgaggaggccaagcugaacagagagaagaucgacggcgugaagcuggagagcaccagaaucuaccagauccuggccaucuacagcaccguggccagcagccuggugcugguggugagccugggcgccaucagcuucuggaugugcagcaacggcagccugcagugcagaaucugcaucuga

SEQ ID NO: 172821 - RNA, 1701 nt, Artificial Sequence; identical to SEQ ID NO: 170100
  derived and/or modified CDS sequence (opt4) from hemagglutinin__InfluenzaA__AIM56788

SEQ ID NO: 172822 - RNA, 1701 nt, Artificial Sequence; identical to SEQ ID NO: 170100
  derived and/or modified CDS sequence (opt4) from hemagglutinin__InfluenzaA__AIM56799

SEQ ID NO: 172823 - RNA, 1701 nt, Artificial Sequence; identical to SEQ ID NO: 170100
  derived and/or modified CDS sequence (opt4) from hemagglutinin__InfluenzaA__AIM56810

SEQ ID NO: 172824 - RNA, 1701 nt, Artificial Sequence; identical to SEQ ID NO: 170100
  derived and/or modified CDS sequence (opt4) from hemagglutinin__InfluenzaA__AIM56821

SEQ ID NO: 172825 - RNA, 1683 nt, Artificial Sequence
  derived and/or modified CDS sequence (opt4) from hemagglutinin__InfluenzaA__AIN76383
augaacacccagauccugguguucgcccugaucgccaucgugcccaccaacgccgacaagaucugccugggccaccacgccgugagcaacggcaccaaggugaacacccugaccgagagaggcguggagguggugaacgccaccgagaccguggagagaaccaacauccccagaaucugcagcaagggcaagaagaccguggaccugggccagugcggccugcugggcaccaucaccggccccccccagugcgaccaguuccuggaguucagcgccgaccugaucaucgagagaagagagggcagcgacgugugcuaccccggcaaguucgugaacgaggaggcccugagacagauccugagagagagcggcggcaucgacaaggaggccaugggcuucaccuacagcggcaucagaaccaacggcaccaccagcgccugcagaagaagcggcagcagcuucuacgccgagaugaaguggcugcugagcaacaccgacaacgccgccuucccccagaugaccaagagcuacaagaacaccagaaagagccccgcccugaucguguggggcauccaccacagcgugagcaccgccgagcagaccaagcuguacggcagcggcaacaagcuggugaccgugggcagcagcaacuaccagcagagcuucgugcccagccccggcgccagaccccaggugaacggccugagcggcagaaucgacuuccacuggcugaugcugaaccccaacgacaccgugaccuucagcuucaacggcgccuucaucgcccccgacagagccagcuuccugagaggcaagagcaugggcauccagagcggcgugcagguggacgccaacugcgagggcgacugcuaccacagcggcggcaccaucaucagcaaccugcccuuccagaacaucgacagcagagccgugggcaagugccccagauacgugaagcagaagagccugcugcuggccaccggcaugaagaacgugcccgagauccccaagggcagaggccuguucggcgccaucgccggcuucaucgagaacggcugggagggccugaucgacggcugguacggcuucagacaccagaacgcccagggcgagggcaccgccgccgacuacaagagcacccagagcgccaucgaccagaucaccggcaagcugaacagacugaucgagaagaccaaccagcaguucgagcugaucgacaacgaguucaacgagguggagaagcagaucggcaacgugaucaacuggaccagagacagcaucaccgagguguggagcuacaacgccgagcugcugguggccauggagaaccagcacaccaucgaccuggccgacagcgagauggacaagcuguacgagagagugaagagacagcugagagagaacgccgaggaggacggcaccggcugcuucgagaucuuccacaagugcgacgacgacugcauggccagcaucagaaacaacaccuacgaccacagcaaguacagagaggaggccaugcagaacagaauccagaucgaccccgugaagcugagcagcggcuacaaggacgugauccugugguucagcuucggcgccagcugcuucauccugcuggccaucgugaugggccugguguucaucugcgugaagaacggcaacaugagaugcaccaucugcaucuga

SEQ ID NO: 172826 - RNA, 1689 nt, Artificial Sequence
  derived and/or modified CDS sequence (opt4) from hemagglutinin__InfluenzaA__AIP93103
auggccaucaucuaccugauccugcuguucaccgccgugagaggcgaccagaucugcaucggcuaccacgccaacaacagcaccgagaagguggacaccauccuggagagaaacgugaccgugacccacgccaaggacauccuggagaagacccacaacggcaagcugugcaagcugaacggcauccccccccuggagcugggcgacugcagcaucgccggcuggcugcugggcaaccccgagugcgacagacugcugagagugcccgaguggagcuacaucauggagaaggagaaccccagauacagccugugcuaccccggcagcuucaacgacuacgaggagcugaagcaccugcugagcagcgugaagcacuucgagaaggugaagauccugcccaaggacggcuggacccagcacgagaccgacggcggcagcaaggccugcgccgugagcggcaagcccagcuucuucagaaacaugguguggcugaccaagaagggccccaacuaccccguggccaagagaagcuacaacaacaccagcggcgagcagaugcugaucaucuggggcgugcaccaccccaacgacgaggccgagcagagagcccuguaccagaacgugggcaccuacgugagcgccagcaccagcacccugaacaagagaagcacccccgagaucgccgccagacccaaggugagcggccugggcagcagaauggaguucagcuggacccugcuggacgugugggacaccaucagcuucgagagcaccggcaaccugguggcccccgaguacggcuucaagaucagcaagagaggcagcagcggcaucaugaagaccgagggcacccugggcaacugcgagaccaagugccagaccccccugggcgccaucaacaccacccugcccuuccacaacgugcacccccugaccaucggcgagugccccaaguacgugaagagcgagaagcuggugcuggccaccggccccagaaacgugccccagaucgagagcagaggccuguucggcgccaucgccggcuucaucgagggcggcuggcagggcaugguggacggcugguacggcuaccaccacagcaacgaccagggcagcggcuacgccgccgacaaggagagcacccagaaggccuucgacagaaucaccaacaaggugaacagcgugaucgagaagaugaacacccaguucgaggccgugggcaaggaguucagcaaccuggagaagagacuggagaaccugaacaagaagauggaggacggcuuccuggacguguggaccuacaacgccgagcugcuggugcugauggagaacgagagaacccuggacuuccacgacagcaacgugaagaaccuguacgacaaggugagaaugcagcugagagacaacgugaaggagcugggcaacggcugcuucgaguucuaccacaagugcgacgacgagugcaugaacagcgugaagaacggcaccuacgacuaccccaaguacgaggaggagagcaagcugaagagaaacgagaucaagggcgugaagcugagcagcaugggcguguaccagauccuggccaucuacgccaccguggccggcagccugagccuggccaucaugaucgccggcaucagcuucuggaugugcagcaacggcagccugcagugcagaaucugcaucuga

SEQ ID NO: 172827 - RNA, 1689 nt, Artificial Sequence; identical to SEQ ID NO: 161715
  derived and/or modified CDS sequence (opt4) from hemagglutinin__InfluenzaA__AIP93115

SEQ ID NO: 172828 - RNA, 1701 nt, Artificial Sequence
  derived and/or modified CDS sequence (opt4) from hemagglutinin__InfluenzaA__AIR93971
augaaggccauccugguggugcugcuguacaccuucgccaccaccaacgccgacauccugugcaucggcuaccacgccaacaacagcaccgacaccguggacaccgugcuggagaagaacgugaccgugacccacagcgugaaccugcuggaggacaagcacaacggcaagcugugcaagcugagaggcguggccccccugcaccugggcaagugcaacaucgccggcuggauccugggcaaccccgagugcgagagccugagcaccgccagcagcuggagcuacaucguggagaccagcagcagcgacaacggcaccugcuaccccggcgacuucaucgacuacgaggagcugagagagcagcugagcagcgugagcagcuucgagagauucgagaucuuccccaagaccagcagcuggcccaaccacgacagcaacaagggcgugaccgccgccugcccccacgccggcgccagaagcuucuacaagaaccugaucuggcuggugaagaagggcaacagcuaccccaagcugagcaagagcuacaucaacgacaagggcaaggaggugcuggugcuguggggcauccaccaccccagcaccagcgccgaccagcagagccuguaccagaacgccgacgccuacguguucgugggcaccagcagauacagcaagaaguucaagcccgagaucgccaucagacccaaggugagagacagagagggcagaaugaacuacuacuggacccugguggagcccggcgacaagaucaccuucgaggccaccggcaaccugguggugcccagauacgccuucgccauggagagaaacgccggcagcggcaucaucaccagcgacacccccgugcacgacugcaacaccaccugccagacccccaagggcgccaucaacaccagccugcccuuccagaacauccaccccaucaccaucggcaagugccccaaguacgugaagagcaccaagcugagacuggccaccggccugagaaacgugcccagcauccagagcagaggccuguucggcgccaucgccggcuucaucgagggcggcuggaccggcaugguggacggcugguacggcuaccaccaccagaacgagcagggcagcggcuacgccgccgaccugaagagcacccagaacgccaucgacgagaucaccaacaaggugaacagcgugaucgagaagaugaacacccaguucaccgccgugggcaaggaguucaaccaccuggagaagagaaucgagaaccugaacaagaagguggacgacggcuuccuggacaucuggaccuacaacgccgagcugcuggugcugcuggagaacgagagaacccuggacuaccacgacagcaacgugaagaaccuguacgagaaggugagaagccagcugaagaacaacgccaaggagaucggcaacggcugcuucgaguucuaccacaagugcgacaacaccugcauggagagcgugaagaacggcaccuacgacuaccccaaguacagcgaggaggccaagcugaacagagaggagaucgacggcgugaagcuggagagcaccagaaucuaccagauccuggccaucuacagcaccguggccagcagccuggugcugguggugagccugggcgccaucagcuucuggaugugcagcaacggcagccugcagugcagaaucugcaucuga

SEQ ID NO: 172829 - RNA, 1701 nt, Artificial Sequence
  derived and/or modified CDS sequence (opt4) from hemagglutinin__InfluenzaA__AIR93982
augaaggccauccugguggugcugcuguacaccaucgccaccgccaacgccgacacccugugcaucggcuaccacgccaacaacagcaccgacaccguggacaccgugcuggagaagaacgugaccgugacccacagcgugaaccugcuggaggacaagcacaacggcaagcugugcaagcugagaggcguggccccccugcaccugggcaagugcaacaucgccggcuggauccugggcaaccccgagugcgagagccugagcaccgccagcagcuggagcuacaucguggagaccagcagcagcgacaacggcaccugcuaccccggcgacuucaucgacuacgaggagcugagagagcagcugagcagcgugagcagcuucgagagauucgagaucuuccccaagaccagcagcuggcccaaccacgacagcaacaagggcgugaccgccgccugcccccacgccggcgccagaagcuucuacaagaaccugaucuggcuggugaagaagggcaacagcuaccccaagcugagcaagagcuacaucaacgacaagggcaaggaggugcuggugcuguggggcauccaccaccccagcaccagcgccgaccagcagagccuguaccagaacgccgacgccuacguguucgugggcaccagcagauacagcaagaaguucaagcccgagaucgccaucagacccaaggugagagacagagagggcagaaugaacuacuacuggacccugguggagcccggcgacaagaucaccuucgaggccaccggcaaccugguggugcccagauacgccuucaccauggagagaaacgccggcagcggcaucaucaucagcgacacccccgugcacgacugcaacaccaccugccagacccccaagggcgccaucaacaccagccugcccuuccagaacauccaccccaucaccaucggcaagugccccaaguacgugaagagcaccaagcugagacuggccaccggccugagaaacgugcccagcauccagagcagaggccuguucggcgccaucgccggcuucaucgagggcggcuggaccggcaugguggacggcugguacggcuaccaccaccagaacgagcagggcagcggcuacgccgccgaccugaagagcacccagaacgccaucgacgagaucaccaacaaggugaacagcgugaucgagaagaugaacacccaguucaccgccgugggcaaggaguucaaccaccuggagaagagaaucgagaaccugaacaagaagguggacgacggcuuccuggacaucuggaccuacaacgccgagcugcuggugcugcuggagaacgagagaacccuggacuaccacgacagcaacgugaagaaccuguacgagaaggugagaagccagcugaagaccaacgccaaggagaucggcaacggcugcuucgaguucuaccacaagugcgacaacaccugcauggagagcgugaagaacggcaccuacgacuaccccaaguacagcgaggaggccaagcugaacagagaggagaucgacggcgugaagcuggagagcaccagaaucuaccagauccuggccaucuacagcaccguggccagcagccuggugcugguggugagccugggcgccaucagcuucuggaugugcagcaacggcagccugcagugcagaaucugcaucuga

SEQ ID NO: 172830 - RNA, 1701 nt, Artificial Sequence
  derived and/or modified CDS sequence (opt4) from hemagglutinin__InfluenzaA__AIR93993
augaaggccauccugguggugcugcuguacaccuucgccaccgccaacgccgacacccugugcaucggcuaccacgccaacaacagcaccgacaccguggacaccgugcuggagaagaacgugaccgugacccacagcgugaaccugcuggaggacaagcacaacggcaagcugugcaagcugaagggcguggccccccugcaccugggcaagugcaacaucgccggcuggauccugggcaaccccgagugcggcagccugagcaccgccagcagcuggagcuacaucguggagaccagcagcagcgacaacggcaccugcuaccccggcgacuucaucgacuacgaggagcugagagagcagcugagcagcgugagcagcuucgagagauucgagaucuuccccaagaccagcagcuggcccaaccacgacagcaacaagggcgugaccgccgccugccccaacgccggcagcaagagcuucuacaagaaccugaucuggcuggugaagaagggcaacagcuaccccaagcugagcaagagcuacaucaacgacaagggcaaggaggugcuggugcuguggggcauccaccaccccagcaccagcgccgaccagcagagccuguaccagaacgccgacgccuacguguucgugggcaccagcagauacagcaagaaguucaagcccgagaucgccaucagacccaaggugagaggccaggagggcagaauggacuacuacuggacccugguggagcccggcgacaagaucaccuucgaggccaccggcaaccugguggugcccagauacgccuucgccauggagagaaacaccggcagcggcaucaucaucagcgacacccccgugcacgacugcaacaccaucugccagacccccaagggcgccaucaacaccagccugcccuuccagaacauccaccccaucaccaucggcaagugccccaaguacgugaagagcaccaagcugagacuggccaccggccugagaaacgugcccagcauccagagcagaggccuguucggcgccaucgccggcuucaucgagggcggcuggaccggcaugguggacggcugguacggcuaccaccaccagaacgagcagggcagcggcuacgccgccgaccugaagagcacccagaacgccaucgacgagaucaccaacaaggugaacagcgugaucgagaagaugaacacccaguucaccgccgugggcaaggaguucaaccaccuggagaagagaaucgagaaccugaacaagaagguggacgacggcuuccuggacaucuggaccuacaacgccgagcugcuggugcugcuggagaacgagagaacccuggacuaccacgacagcaacgugaagaaccuguacgagaaggugagaagccagcugaagaacaacgccaaggagaucggcaagggcugcuucgaguucuaccacaagugcgacaccaugugcauggagagcgugaagaacggcaccuacgacuaccccaaguacagcgaggaggccaagcugaacagagaggagaucgacggcgugaagcuggagagcaccagaaucuaccagauccuggccaucuacagcaccguggccagcagccuggugcugguggugagccugggcgccaucagcuucuggaugugcagcaacggcagccugcagugcagaaucugcaucuga

SEQ ID NO: 172831 - RNA, 1701 nt, Artificial Sequence
  derived and/or modified CDS sequence (opt4) from hemagglutinin__InfluenzaA__AIR94000
augaaggccauccugguggugcugcuguacaccuucgccaccgccaacgccgacacccugugcaucggcuaccacgccaacaacagcaccgacaccguggacaccgugcuggagaagaacgugaccgugacccacagcgugaaccugcuggaggacaagcacaacggcaagcugugcaagcugagaggcguggccccccugcaccugggcaagugcaacaucgccggcuggauccugggcaaccccgagugcgagagccugagcaccgccagcagcuggagcuacaucguggagaccagcagcagcgacaacggcaccugcuaccccggcgacuucaucgacuacgaggagcugagagagcagcugagcagcgugagcagcuucgagagauucgagaucuuccccaagaccagcagcuggcccaaccacgacagcaacaagggcgugaccgccgccugcccccacgccggcgccaagagcuucuacaagaaccugaucuggcuggugaagaagggcaacagcuaccccaagcugagcaagagcuacaucaacgacaagggcaaggaggugcuggugcuguggggcauccaccaccccagcaccagcgccgaccagcagagccuguaccagaacgccgacgccuacguguucgugggcaccagcagauacagcaagaaguucaagcccgagaucgccaucagacccaaggugagagaccaggagggcagaaugaacuacuacuggacccugguggagcccggcgacaagaucaccuucgaggccaccggcaaccugguggugcccagauacgccuucgccauggagagaaacgccggcagcggcaucaucaucagcgacacccccgugcacgacugcaacaccaccugccagacccccaagggcgccaucaacaccagcuuccccuuccagaacauccaccccaucaccaucggcaagugccccaaguacgugaagagcaccaagcugagacuggccaccggccugagaaacgugcccagcauccagagcagaggccuguucggcgccaucgccggcuucaucgagggcggcuggaccggcaugguggacggcugguacggcuaccaccaccagaacgagcagggcagcggcuacgccgccgaccugaagagcacccagaacgccaucgacgagaucaccaacaaggugaacagcgugaucgagaagaugaacacccaguucaccgccgugggcaaggaguucaaccaccuggagaagagaaucgagaaccugaacaagaagguggacgacggcuuccuggacaucuggaccuacaacgccgagcugcuggugcugcuggagaacgagagaacccuggacuaccacgacagcaacgugaagaaccuguacgagaaggugagaagccagcugaagaccaacgccaaggagaucggcaacggcugcuucgaguucuaccacaagugcgacaacaccugcauggagagcgugaagaacggcaccuacgacuaccccaaguacagcgaggaggccaagcugaacagagaggagaucgacggcgugaagcuggagagcaccagaaucuaccagauccuggccaucuacagcaccguggccagcagccuggugcugguggugagccugggcgccaucagcuucuggaugugcagcaacggcagccugcagugcagaaucugcaucuga

SEQ ID NO: 172832 - RNA, 1683 nt, Artificial Sequence
  derived and/or modified CDS sequence (opt4) from hemagglutinin__InfluenzaA__AIR94116
auggagaccgccagccugaucaccauccugcugguggugaccgugagcaacgccgacaagaucugcaucggcuaccagagcaccaacagcaccgagaccguggacacccugaccgagaacaacgugcccgugacccacgccaaggagcugcugcacaccgagcacaacggcaugcugugcgccaccagccugggccacccccugauccuggacaccugcaccaucgagggccugaucuacggcaaccccagcugcgaccugcugcugggcggcagagaguggagcuacaucguggagagacccagcgccgugaacggccugugcuaccccggcaacguggagaaccuggaggagcugagaagccuguucagcagcgccagaagcuaccagagaauccagaucuuccccgacaccaucuggaacgugagcuacagcggcaccagcaaggccugcagcgacagcuucuacagaagcaugagauggcugacccagaaggacaacgccuaccccauccaggacgcccaguacaccaacaaccagggcaagaacauccuguucauguggggcaucaaccacccccccaccgacaccgcccagaccaaccuguacaccagaaccgacaccaccaccagcguggccaccgaggagaucaacagaaccuucaagccccugaucggccccagaccccuggugaacggccugaugggcagaaucaacuacuacuggagcgugcugaagcccggccagacccugagaaucaagagcaacggcaaccugaucgcccccugguacggccacauccugagcggcgagagccacggcagaauccugaagaccgaccugaagagaggcagcugcaccgugcagugccagaccgagaagggcggccugaacaccacccugcccuuccagaacgugagcaaguacgccuucggcaacugcagcaaguacaucggcaucaagagccugaagcuggccgugggccugagaaacgugcccagcagaagcagcagaggccuguucggcgccaucgccggcuucaucgagggcggcuggagcggccugguggccggcugguacggcuuccagcacagcaacgaccagggcgugggcauggccgccgacagagacagcacccagaaggccaucgacaagaucaccagcaaggugaacaacaucguggacaagaugaacaagcaguacgagaucaucgaccacgaguucaacgagguggagaccagacugaacaugaucaacaacaagaucgacgaccagauccaggacaucugggccuacaacgccgagcugcuggugcugcuggagaaccagaagacccuggacgagcacgacgccaacgugaacaaccuguacaacaaggugaagagagcccugggcagcaacgccguggaggacggcaagggcugcuucgagcuguaccacaagugcgacgaccagugcauggagaccaucagaaacggcaccuacaacagaagaaaguaccaggaggagagcaagcuggagagacagaagaucgagggcgugaagcuggagagcgagggcaccuacaagauccugaccaucuacagcaccguggccagcagccuggugaucgccaugggcuucgccgccuuccuguucugggccaugagcaacggcagcugcagaugcaacaucugcaucuga

SEQ ID NO: 172833 - RNA, 1701 nt, Artificial Sequence
  derived and/or modified CDS sequence (opt4) from hemagglutinin__InfluenzaA__AIT38333
augaagaccaucaucacccugagcuacauccugugccacguguucgcccagaagauccacggcagcgacagcagcaccgccacccugugccugggccaccacgccgugcccaacggcacccuggugaagaccaucaccaacgaccagaucgaggugaccaacgccaccgagcuggugcagagcagcagcaccggcagaaucugcgacaacccccacagaauccuggacggcaagaacugcacccugaucgacgcccugcugggcgacccccacugcgacgaguuccagaacaaggagugggaccuguucguggagagaagcaacgccuacagcgacugcuaccccuacuacgugcccgacuacgccagccugagaagccugguggccagcagcggcacccuggaguucaacaacgagagcuucaacuggaccggcaucagccaggacggcaccagcagcagcugcagaagaggcagcgugaagagcuucuucagcagacugaacuggcugcacggccuggaguacaaguaccccgcccagaacgugaccaugcugaacaacgacgaguucgacaagcuguacaucuggggcgugcaccaccccagcaccgacagcgaccagaccagccuguacgugcagaccagcggcagagugaccgugagcaccaagagaagccagcagaccgugauccccaacaucggcagcagacccugggugagaggcaucagcagcagaaucagcauccacuggaccaucgugaagcccggcgacauccugcugaucaacagcaccggcaaccugaucgcccccagaggcuacuucaagaucagaggcggcaagagcagcaucaugagaagcgacgcccccaucgacaacugcgacagcgagugcgugacccccaacggcaacauccccaacgacaagcccuuccagaacgugaacagaaucaccuacggccccugccccagauacaucaagcagaacacccugaagcuggccaccggcaugagaaacgugcccgagaagcagaccagaggcgugcugggcgccaucgccggcuucaucgagaacggcugggagggcaugguggacggcugguacggcuucagacaccagaacagcgagggcaccggccaggccgccgaccugaagagcacccaggccgccaucgaccagaucaacggcaagcugaacagacugaucggcaagaccaacgagaaguuccaccagaucgagaaggaguucagcgagaucgagggcagagugcaggaccuggagaaguacguggaggacaccaagaucgaccuguggagcuacaacgccgagcugcugguggugcuggagaaccagcacaccaucgaccugaccgacagcgagaugaacaagcuguucgagagaaccagaagacagcugagagagaacgccgaggacaugggcaacggcugcuucaagaucuaccacaagugcgacaacgccugcaucggcagcaucagaaacggcaccuacgugcacgacguguacagagacgaggcccugaacaacagauuccagaucaagggcguggagcugaagagcggcuacaaggacuggauccuguggaucagcuucgccaucagcugcuuccugcugugcgccgugcugcugggcuucaucaccugggccugccagaagggcaacaucagaugcaacaucugcaucuga

SEQ ID NO: 172834 - RNA, 1698 nt, Artificial Sequence
  derived and/or modified CDS sequence (opt4) from hemagglutinin__InfluenzaA__AIT38344
augaagaucaagcugcugauccugcugugcaccuucaccgccaccuacgccgacaccaucugcaucggcuaccacgccaacaacagcaccgacaccguggacaccgugcuggagaagaacgugaccgugacccacagcgugaaccugcuggaggacagccacaacggcaagcugugccugcugagaggcaucgccccccugcagcugggcaacugcagcguggccggcuggauccugggcaaccccgagugcgagagccugaucagcaaggagagcuggagcuacaucguggagaagcccaaccccgagaacggcaccugcuaccccggcuacuucgccgacuacgaggagcugagagagcagcugagcagcgugagcagcuucgagagauucgagaucuuccccaaggagagcagcuggcccaaccacaccgugaccggcgugagcgccagcugcagcuacaacggcaagggcaacuucuacaagaaccugcuguggcugaccagaaagaacggccuguaccccaaccugagcaagagcuacaccaacaacaaggagaaggaggugcugauccuguggggcgugcaccaccccagcaacaucaaggaccagagaacccuguaccacaccgagaacgccuacgugagcguggugagcagccacuacagcagaagauucacccccgagaucaccaagagacccaaggugagagaccaggagggcagaaucaacuacuacuggacccugcuggagcccggcgacaccaucaucuucgaggccaacggcaaccugaucgcccccugguacgccuucgcccugagcagaggcuucggcagcggcaucaucaccagcaacgcccccauggacgagugcgaggccaagugccagacccccagaggcgccaucaacagcagccugcccuuccagaacgugcaccccgugaccaucggcgagugccccaaguacgugagaagcgccaagcugagaauggugaccggccugagaaacauccccagcauccagagcagaggccuguucggcgccaucgccggcuucaucgagggcggcuggaccggcaugaucgacggcugguacggcuaccaccaccagaacgagcagggcagcggcuacgccgccgacaaggagagcacccagaacgccaucaacggcaucaccaacaaggugaacagcgugaucgagaagaugaacacccaguucaccaccgugggcaaggaguucaacaagcuggagagaagaauggagaaccugaacaagaagguggacgacggcuuccuggacaucuggaccuacaacgccgagcugcuggugcugcuggagaacgagagaacccuggacuuccacgacagcaacgugaagauccuguacgagaaggugaagagccagcugaagaacaacgccaaggagaucggcaacggcugcuucgaguucuaccacaagugcaacaacgagugcauggagagcgugaagaacggcaccuacgacuaccccaaguacagcgaggagagcaagcugaacagagagaagaucgacggcgugaagcuggagagcaugggcguguaccagauccuggccaucuacagcaccguggccagcagccuggugcugcuggugagccugggcgccaucagcuucuggaugugcagcaacggcagccugcagugcagaaucugcaucuga

SEQ ID NO: 172835 - RNA, 1698 nt, Artificial Sequence
  derived and/or modified CDS sequence (opt4) from hemagglutinin__InfluenzaA__AIT38360
augaagaucaagcugcugauccugcugugcaccuucaccgccaccuacgccgacaccaucugcaucggcuaccacgccaacaacagcaccgacaccguggacaccgugcuggagaagaacgugaccgugacccacagcgugaaccugcuggaggacagccacaacggcaagcugugccugcugaagggcaucgccccccugcagcugggcaacugcagcguggccggcuggauccugggcaaccccgagugcgagagccugaucagcaaggagagcuggagcuacaucguggagaagcccaaccccgagaacggcaccugcuaccccggcuacuucgccgacuacgaggagcugagagagcagcugagcagcgugagcagcuucgagagauucgagaucuuccccaaggagagcagcuggcccaaccacaccgugaccggcgugagcgccagcugcagcuacaacggcaagggcaacuucuacaagaaccugcuguggcugaccagaaagaacggccuguaccccaaccugagcaagagcuacaccaacaacaaggagaaggaggugcugauccuguggggcgugcaccaccccagcaacaucgaggaccagagaacccuguaccacaccgagaacgccuacgugagcguggugagcagccacuacagcagaagauucacccccgagaucaccaagagacccaaggugagaggccaggagggcagaaucaacuacuacuggacccugcuggagcccggcgacaccaucaucuucgaggccaacggcaaccugaucgcccccugguacgccuucgcccugagcagaggccugggcagcggcaucaucaccagcaacgcccccauggacgagugcgaggccaagugccagacccccagaggcgccaucaacagcagccugcccuuccagaacgugcaccccgugaccaucggcgagugccccaaguacgugagaagcgccaagcugagaauggugaccggccugagaaacauccccagcauccagagcagaggccuguucggcgccaucgccggcuucaucgagggcggcuggaccggcaugaucgacggcugguacggcuaccaccaccagaacgagcagggcagcggcuacgccgccgacaaggagagcacccagaacgccaucaacggcaucaccaacaaggugaacagcgugaucgagaagaugaacacccaguucaccaccgugggcaaggaguucaacaagcuggagagaagaauggagaaccugaacaagaagguggacgacggcuuccuggacaucuggaccuacaacgccgagcugcuggugcugcuggagaacgagagaacccuggacuuccacgacagcaacgugaagaaccuguacgagaaggugaagagccagcugaagaacaacgccaaggagaucggcaacggcugcuucgaguucuaccacaagugcaacaacgagugcauggagagcgugaagaacggcaccuacgacuaccccaaguacagcgaggagagcaagcugaacagagagaagaucgacggcgugaagcuggagagcaugggcguguaccagauccuggccaucuacagcaccguggccagcagccuggugcugcuggugagccugggcgccaucagcuucuggaugugcagcaacggcagccugcagugcagaaucugcaucuga

SEQ ID NO: 172836 - RNA, 1701 nt, Artificial Sequence; identical to SEQ ID NO: 170100
  derived and/or modified CDS sequence (opt4) from hemagglutinin__InfluenzaA__AIT93147

SEQ ID NO: 172837 - RNA, 1701 nt, Artificial Sequence; identical to SEQ ID NO: 162729
  derived and/or modified CDS sequence (opt4) from hemagglutinin__InfluenzaA__AIU39700

SEQ ID NO: 172838 - RNA, 1701 nt, Artificial Sequence
  derived and/or modified CDS sequence (opt4) from hemagglutinin__InfluenzaA__AIU39702
augaaggccauccugguggugcugcuguacaccuucgccaccgccaacgccgacacccugugcaucggcuaccacgccaacaacagcaccgacaccguggacaccgugcuggagaagaacgugaccgugacccacagcgugaaccugcuggaggacaagcacaacggcaagcugugcaagcugagaggcguggccccccugcaccugggcaagugcaacaucgccggcuggauccugggcaaccccgagugcgagagccugagcaccgccagcagcuggagcuacaucguggagaccagcagcagcgacaacggcaccugcuaccccggcgacuucaucgacuacgaggagcugagagagcagcugagcagcgugagcagcuucgagagauucgagaucuuccccaagaccagcagcuggcccaaccacgacagcaacaagggcgugaccgccgccugcccccacgccggcgccaagagcuucuacaagaaccugaucuggcuggugaagaagggcaacagcuaccccaagcugagcaagagcuacaucaacgacaagggcaaggaggugcuggugcuguggggcauccaccaccccagcaccagcgccgaccagcagagccuguaccagaacgccgacgccuacguguucgugggcaccagcagauacagcaagaaguucaagcccgagaucgccaucagacccaaggugagagaccaggagggcagaaugaacuacuacuggacccugguggagcccggcgacaagaucaccuucgaggccaccggcaaccugguggugcccagauacgccuucgccauggagagaaacgccggcagcggcaucaucaucagcgacacccccgugcacgacugcaacaccaccugccagacccccaagggcgccaucaacaccagcuuccccuuccagaacauccaccccaucaccaucggcaagugccccaaguacgugaagagcaccaagcugagacuggccaccggccugagaaacauccccagcauccagagcagaggccuguucggcgccaucgccggcuucaucgagggcggcuggaccggcaugguggacggcugguacggcuaccaccaccagaacgagcagggcagcggcuacgccgccgaccugaagagcacccagaacgccaucgacgagaucaccaacaaggugaacagcgugaucgagaagaugaacacccaguucaccgccgugggcaaggaguucaaccaccuggagaagagaaucgagaaccugaacaagaagguggacgacggcuuccuggacaucuggaccuacaacgccgagcugcuggugcugcuggagaacgagagaacccuggacuaccacgacagcaacgugaagaaccuguacgagaaggugagaagccagcugaagaacaacgccaaggagaucggcaacggcugcuucgaguucuaccacaagugcgacaacaccugcauggagagcgugaagaacggcaccuacgacuaccccaaguacagcgaggaggccaagcugaacagagaggagaucgacggcgugaagcuggagagcaccagaaucuaccagauccuggccaucuacagcaccguggccagcagccuggugcugguggugagccugggcgccaucagcuucuggaugugcagcaacggcagccugcagugcagaaucugcaucuga

SEQ ID NO: 172839 - RNA, 1701 nt, Artificial Sequence; identical to SEQ ID NO: 166969
  derived and/or modified CDS sequence (opt4) from hemagglutinin__InfluenzaA__AIU39704

SEQ ID NO: 172840 - RNA, 1704 nt, Artificial Sequence
  derived and/or modified CDS sequence (opt4) from hemagglutinin__InfluenzaA__AIU46609
auggagaagaucgugcugcugcuggccaucgugagccuggugaagagcgaccagaucugcaucggcuaccacgccaacaacagcaccgagcagguggacaccaucauggagaagaacgugaccgugacccacgcccaggacauccuggagaagacccacaacggcaagcugugcgaccugaacggcgugaagccccugauccugaaggacugcagcguggccggcuggcugcugggcaaccccaugugcgacgaguucaucagagugcccgaguggagcuacaucguggagagagccaaccccgccaacgaccugugcuaccccggcaaccugaacgacuacgaggagcugaagcaccugcugagcagaaucaaccacuucgagaagauccugaucauccccaagagcagcuggaccaaccacgagaccagccugggcgugagcgccgccugccccuaccagggcacccccagcuucuucagaaacgugguguggcugaucaagaagaacgacgccuaccccaccaucaagaucagcuacaacaacaccaaccaggaggaccugcugauccuguggggcauccaccacagcaacaacgccgccgagcagaccaaccuguacaagaaccccaccaccuacaucagcgugggcaccagcacccugaaccagagacuggugcccaagaucgccaccagaagccaggugaacggccagagaggcagaauggacuucuucuggaccauccugaagcccaacgacgccauccacuucgagagcaacggcaacuucaucgcccccgaguacgccuacaagaucgugaagaagggcgacagcaccaucaugaagagcgagguggaguacggccacugcaacaccaagugccagacccccaucggcgccaucaacagcagcaugcccuuccacaacauccacccccugaccaucggcgagugccccaaguacgugaagagcaacaagcuggugcuggccaccggccugagaaacagcccccugagagagaagagaagaaagagaggccuguucggcgccaucgccggcuucaucgagggcggcuggcagggcaugguggacggcugguacggcuaccaccacagcaacgagcagggcagcggcuacgccgccgacaaggagagcacccagaaggccaucgacggcgugaccaacaaggugaacagcaucaucgacaagaugaacacccaguucgaggccgugggcagagaguucaacaaccuggagagaagaaucgagaaccugaacaagaagauggaggacggcuuccuggacguguggaccuacaacgccgagcugcuggugcugauggagaacgagagaacccuggacuuccacgacagcaacgugaagaaccuguacgacaaggugagacugcagcugagagacaacgccaaggagcugggcaacggcugcuucgaguucuaccacaagugcgacaacgagugcauggagagcgugagaaacggcaccuacgacuacccccaguacagcgaggaggccagacugaagagagaggagaucagcggcgugaagcuggagagcaucggcaccuaccagauccugagcaucuacagcaccguggccagcagccuggcccuggccaucaucguggccggccugagccuguggaugugcagcaacggcagccugcagugcagaaucugcaucuga

SEQ ID NO: 172841 - RNA, 1689 nt, Artificial Sequence
  derived and/or modified CDS sequence (opt4) from hemagglutinin__InfluenzaA__AIU46714
auggccaucaucuaccugauccugcuguucaccgccgugagaggcgaccagaucugcaucggcuaccacgccaacaacagcaccgagaagguggacaccauccuggagagaaacgugaccgugacccacgccaaggacauccuggagaagacccacaacggcaagcugugcaagcugaacggcauccccccccuggagcugggcgacugcagcaucgccggcuggcugcugggcaaccccgagugcgacagacugcugagagugcccgaguggagcuacaucauggagaaggagaaccccaaguacagccugugcuaccccggcagcuucaacgacuacgaggagcugaagcaccugcugagcagcgugaagcacuucgagaaggugaagauccugcccaaggacggcuggacccagcacaagaccgacggcggcagcaaggccugcgccgugagcggcaagcagagcuucuucagaaacaugguguggcugaccaagaagggccagaacuaccccguggccaagagaagcuacaacaacaccagcggcgagcagaugcugaucaucuggggcgugcaccaccccaacgacgaggaggagcagagagcccuguaccagaaggugggcaccuacgugagcgccagcaccagcacccugaacaagagaagcacccccgagaucgccgccagacccgaggugaacggccugggcagcagaauggaguucagcuggacccugcuggacgugugggacaccaucaacuucgagagcaccggcaaccugguggcccccgaguacggcuucaagaucagcaagagaggcagcagcggcaucaucaagaccgagggcacccugggcaacugcgagaccaagugccagaccccccugggcgccaucaacaccacccugcccuuccacaacgugcacccccugaccaucggcgagugccccaaguacgugaagagcgagaagcuggugcuggccaccggccugagaaacgugccccagaucgagagcagaggccuguucggcgccaucgccggcuucaucgagggcggcuggcagggcaugguggacggcugguacggcuaccaccacagcaacgaccagggcagcggcuacgccgccgacaaggagagcacccagaaggccuucgacagaaucaccaacaaggugaacagcgugaucgagaagaugaacacccaguucgaggccgugggcaaggaguucagcaaccuggagagaagacuggagaaccugaacaagaagauggaggacggcuuccuggacguguggaccuacaacgccgagcugcuggugcugauggagaacgagagaacccuggacuuccacgacagcaacgugaagaaccuguacgacaaggugagaaugcagcugagagacaacgugaaggagcugggcaacggcugcuucgaguucuaccacaagugcgacaacgagugcaugaacagcgugaagaacggcaccuacgacuaccccaaguacgaggaggagagcaagcugaagagaaacgagaucaagggcgugaagcugagcagcaugggcguguaccagauccuggccaucuacgccaccguggccggcagccugagccuggccaucaugaucgccggcaucagcuucuggaugugcagcaacggcagccugcagugcagaaucugcaucuga

SEQ ID NO: 172842 - RNA, 1701 nt, Artificial Sequence
  derived and/or modified CDS sequence (opt4) from hemagglutinin__InfluenzaA__AIV09219
augaaggccauccugguggugcugcuguacaccuucgccaccaccaacgccgacauccugugcaucggcuaccacgccaacaacagcaccgacaccguggacaccgugcuggagaagaacgugaccgugacccacagcgugaaccugcuggaggacaagcacaacggcaagcugugcaagcugagaggcguggccccccugcaccugggcaagugcaacaucgccggcuggauccugggcaaccccgagugcgagcugcugagcaccaccagcagcuggagcuacaucguggagaccagcagcagcgacaacggcaccugcuaccccggcgacuucaucgacuacgaggagcugagagagcagcugagcagcgugagcagcuucgagagauucgagaucuuccccaagaccagcagcuggcccgaccacgacagcaacaagggcgugaccgccgccugcccccacgccggcgccggcagcuucuacaagaaccugaucuggcuggugaagaagggcaacagcuaccccaagcugagcaagagcuacaucaacgacaagggcaaggaggugcuggugcuguggggcauccaccacccccccaccagcgccgaccagcagagacuguaccagaacgccgacgccuacguguucgugggcaccagcagauacagcaagaaguucaagcccgagaucgccaucagacccaaggugagagaccaggagggcagaaugaacuacuacuggacccugguggagcccggcgacaagaucaccuucgaggccaccggcaaccugguggugcccagauacgccuucgccauggagagaaacgccggcagcggcaucaucaccagcgacacccccgugcacgacugcaacaccaccugccagacccccaagggcgccaucaacaccagccugcccuuccagaacauccaccccaucaccaucggcaagugccccaaguacgugaagagcaccaagcugagacuggccaccggccugagaaacgugcccagcauccagagcagaggccuguucggcgccaucgccggcuucaucgagggcggcuggaccggcaugguggacggcugguacggcuaccaccaccagaacgagcagggcagcggcuacgccgccgaccugaagagcacccagaacgccaucgacgagaucaccaacaaggugaacagcgugaucgacaagaugaacacccaguucaccgccgugggcaaggaguucaaccaccuggagaagagaaucgagaaccugaacaagaagguggacgacggcuuccuggacaucuggaccuacaacgccgagcugcuggugcugcuggagaacgagagaacccuggacuaccacgacagcaacgugaagaaccuguacgagaaggugagaagccagcugaagaacaacgccaaggagaucggcaacggcugcuucgaguucuaccacaagugcgacaacaccugcauggagagcgugaagaacggcaccuacgacuaccccaaguacagcgaggaggccaagcugaacagagaggagaucgacggcgugaagcuggagagcaccagaaucuaccagauccuggccaucuacagcaccguggccagcagccuggugcugguggugagccugggcgccaucagcuucuggaugugcagcaacggcagccugcagugcagaaucugcaucuga

SEQ ID NO: 172843 - RNA, 1701 nt, Artificial Sequence
  derived and/or modified CDS sequence (opt4) from hemagglutinin__InfluenzaA__AIW60689
augaagaccaucaucgcccugagcuacauccugugccugguguucgcccagaagcugcccggcaacgacaacagcaccgccacccugugccugggccaccacgccgugcccaacggcacccuggugaagaccaucaccaacgaccagaucgaggugaccaacgccaccgagcuggugcagagcagcagcaccggcagaaucugcgacagcccccacagaauccuggacggcaagaacugcacccugaucgacgcccugcugggcgacccccacugcgacggcuuccagaacaaggagugggaccuguucguggagagaagcaaggccuacagcgacugcuaccccuacgacgugcccgacuacgccagccugagaagccugguggccagcagcggcacccuggaguucaccaacgagggcuucaacuggaccggcguggcccaggacggcaccagcuacgccugcaagagaggcagcgugaagagcuucuucagcagacugaacuggcugcacaagcuggaguacaaguaccccgcccugaacgugaccaugcccaacaacgacaaguucgacaagcuguacaucuggggcgugcaccaccccagcaccgacagcgaccagaccagcaucuacgugcaggccagcggcagagugaccgugagcaccaagagaagccagcagaccgugauccccaacaucggcagcagacccugggugagaggcaucagcagcagaaucagcaucuacuggaccaucgugaagcccggcgacauccugcugaucaacagcaccggcaaccugaucgcccccagaggcuacuucaagaucagaagcggcaagagcagcaucaugagaagcgacgcccccaucggcaacugcaacagcgagugcaucacccccaacggcagcauccccaacgacaagcccuuccagaacgugaacagaaucaccuacggcgccugccccagauacgugaagcagaacacccugaagcuggccaccggcaugagaaacgugcccgagaagcagaccagaggcaucuucggcgccaucgccggcuucaucgagaacggcugggagggcaugguggacggcugguacggcuucagacaccagaacuacgagggcaccggccaggccgccgaccugaagagcacccaggccgccaucaaccagaucaacggcaagcugaacagacugaucgagaagaccaacgagaaguuccaccagaucgagaaggaguucagcgagguggagggcagaauccaggaccuggagaaguacguggaggacaccaagaucgaccuguggagcuacaacgccgagcugcugguggcccuggagaaccagcacaccaucgaccugaccgacagcgagaugaacaagcuguucgagagaaccagaaagcagcugagagagaacgccgaggacaugggcaacggcugcuucaagaucuaccacaagugcgacaacgccugcaucggcagcaucagaaacggcaccuacgaccacgacgccuacagagacgaggcccugaacaacagauuccagaucaagggcguggagcugaagagcggcuacaaggacuggauccuguggaucagcuucgccaucagcugcuuccugcugugcguggugcugcugggcuucaucaugugggccugccagaagggcaacaucagaugcaacaucugcaucuga

SEQ ID NO: 172844 - RNA, 1701 nt, Artificial Sequence
  derived and/or modified CDS sequence (opt4) from hemagglutinin__InfluenzaA__AIW60690
augaagaccaucaucgcccugagcuacauccugugccugguguucgcccagaagcugcccggcaacgacaacagcaccgccacccugugccugggccaccacgccgugcccaacggcacccuggugaagaccaucaccaacgaccagaucgaggugaccaacgccaccgagcuggugcagagcagcagcaccggcagaaucugcgacagcccccacagaauccuggacggcaagaacugcacccugaucgacgcccugcugggcgacccccacugcgacggcuuccagaacaaggagugggaccuguucguggagagaagcaaggccuacagcgacugcuaccccuacgacgugcccgacuacgccagccugagaagccugguggccagcagcggcacccuggaguucaccaacgagggcuucaacuggaccggcguggcccaggacggcaccagcuacgccugcaagagaggcagcgugaagagcuucuucagcagacugaacuggcugcacaagcuggaguacaaguaccccgcccugaacgugaccaugcccaacaacgacaaguucgacaagcuguacaucuggggcgugcaccaccccagcaccgacagcgaccagaccagccuguacgugcaggccagcggcagagugaccgugagcaccaagagaagccagcagaccgugauccccaacaucggcagcagacccugggugagaggcgugagcagcagaaucagcaucuacuggaccaucgugaagcccggcgacauccugcugaucaacagcaccggcaaccugaucgcccccagaggcuacuucaagaucagaagcggcaagagcagcaucaugagaagcgacgcccccaucggcaacugcaacagcgagugcaucacccccaacggcagcauccccaacgacaagcccuuccagaacgugaacagaaucaccuacggcgccugccccagauacgugaagcagaacacccugaagcuggccaccggcaugagaaacgugcccgagaagcagaccagaggcaucuucggcgccaucgccggcuucaucgagaacggcugggagggcaugguggacggcugguacggcuucagacaccagaacuacgagggcaccggccaggccgccgaccugaagagcacccaggccgccaucaaccagaucaacggcaagcugaacagacugaucgagaagaccaacgagaaguuccaccagaucgagaaggaguucagcgagguggagggcagaauccaggaccuggagaaguacguggaggacaccaagaucgaccuguggagcuacaacgccgagcugcugguggcccuggagaaccagcacaccaucgaccugaccgacagcgagaugaacaagcuguucgagagaaccagaaagcagcugagagagaacgccgaggacaugggcaacggcugcuucaagaucuaccacaagugcgacaacgccugcaucggcagcaucagaaacggcaccuacgaccacgacgccuacagagacgaggcccugaacaacagauuccagaucaagggcguggagcugaagagcggcuacaaggacuggauccuguggaucagcuucgccaucagcugcuuccugcugugcguggugcugcugggcuucaucaugugggccugccagaagggcaacaucagaugcaacaucugcaucuga

SEQ ID NO: 172845 - RNA, 1701 nt, Artificial Sequence
  derived and/or modified CDS sequence (opt4) from hemagglutinin__InfluenzaA__AIW60691
augaagaccaucaucgcccugagcuacauccugugccugguguucgcccagaagcugcccggcaacgacaacagcaccgccacccugugccugggccaccacgccgugcccaacggcacccuggugaaggccaucaccaacgaccagaucgaggugaccaacgccaccgagcuggugcagagcagcagcaccggcagaaucugcgacagcccccacagaauccuggacggcaagaacugcacccugaucgacgcccugcugggcgacccccacugcgacggcuuccagaacaaggagugggaccuguucguggagagaagcaaggccuacagcgacugcuaccccuacgacgugcccgacuacgccagccugagaagccugguggccagcagcggcacccuggaguucaccaacgagggcuucaacuggaccggcguggcccaggacggcaccagcuacgccugcaagagaggcagcgugaagagcuucuucagcagacugaacuggcugcacaagcuggaguacaaguaccccgcccugaacgugaccaugcccaacaacgacaaguucgacaagcuguacaucuggggcgugcaccaccccagcaccgacagcgaccagaccagacuguacgugcaggccagcggcagagugaccgugagcaccaagagaagccagcagaccgugauccccaacaucggcagcagacccugggugagaggcaucagcagcagaaucagcaucuacuggaccaucgugaagcccggcgacauccugcugaucaacagcaccggcaaccugaucgcccccagaggcuacuucaagaucagaagcggcaagagcagcaucaugagaagcgacgcccccaucggcaacugcaacagcgagugcaucacccccaacggcagcauccccaacgacaagcccuuccagaacgugaacagaaucaccuacggcgccugccccagauacgugaagcagaacacccugaagcuggccaccggcaugagaaacgugcccgagaagcagaccagaggcaucuucggcgccaucgccggcuucaucgagaacggcugggagggcaugguggacggcugguacggcuucagacaccagaacagcgagggcaccggccaggccgccgaccugaagagcacccaggccgccaucaaccagaucaacggcaagcugaacagacugaucgagaagaccaacgagaaguuccaccagaucgagaaggaguucagcgagguggagggcagaauccaggaccuggagaaguacguggaggacaccaagaucgaccuguggagcuacaacgccgagcugcugguggcccuggagaaccagcacaccaucgaccugaccgacagcgagaugaacaagcuguucgagagaaccagaaagcagcugagagagaacgccgaggacaugggcaacggcugcuucaagaucuaccacaagugcgacaacgccugcaucggcagcaucagaaacggcaccuacgaccacgacguguacagagacgaggcccugaacaacagauuccagaucaagggcguggagcugaagagcggcuacaaggacuggauccuguggaucagcuucgccaucagcugcuuccugcugugcguggugcugcugggcuucaucaugugggccugccagaagggcaacaucagaugcaacaucugcaucuga

SEQ ID NO: 172846 - RNA, 1701 nt, Artificial Sequence
  derived and/or modified CDS sequence (opt4) from hemagglutinin__InfluenzaA__AIW60692
augaagaccaucaucgcccugagcuacauccugugccugguguucgcccagaagcugcccggcaacgacaacagcaccgccacccugugccugggccaccacgccgugcccaacggcacccuggugaaggccaucaccaacgaccagaucgaggugaccaacgccaccgagcuggugcagagcagcagcaccggcagaaucugcgacagcccccacagaauccuggacggcaagaacugcacccugaucgacgcccugcugggcgacccccacugcgacggcuuccagaacaaggagugggaccuguucguggagagaagcaaggccuacagcgacugcuaccccuacgacgugcccgacuacgccagccugagaagccugguggccagcagcggcacccuggaguucaccaacgagggcuucaacuggaccggcguggcccaggacggcaccagcuacgccugcaagagaggcagcgugaagagcuucuucagcagacugaacuggcugcacaagcuggaguacaaguaccccgcccugaacgugaccaugcccaacaacgacaaguucgacaagcuguacaucuggggcgugcaccaccccagcaccgacagcgaccagaccagccuguacgugcaggccagcggcagagugaccgugagcaccaagagaagccagcagaccgugauccccaacaucggcagcagacccugggugagaggcaucagcagcagaaucagcaucuacuggaccaucgugaagcccggcgacauccugcugaucaacagcaccggcaaccugaucgcccccagaggcuacuucaagaucagaagcggcaagagcagcaucaugagaagcgacgcccccaucggcaacugcaacagcgagugcaucacccccaacggcagcauccccaacgacaagcccuuccagaacgugaacagaaucaccuacggcgccugccccagauacgugaagcagaacacccugaagcuggccaccggcaugagaaacgugcccgagaagcagaccagaggcaucuucggcgccaucgccggcuucaucgagaacggcugggagggcaugguggacggcugguacggcuucagacaccagaacagcgagggcaccggccaggccgccgaccugaagagcacccaggccgccaucaaccagaucaacggcaagcugaacagacugaucgagaagaccaacgagaaguuccaccagaucgagaaggaguucagcgagguggagggcagaauccaggaccuggagaaguacguggaggacaccaagaucgaccuguggagcuacaacgccgagcugcugguggcccuggagaaccagcacaccaucgaccugaccgacagcgagaugaacaagcuguucgagagaaccagaaagcagcugagagagaacgccgaggacaugggcaacggcugcuucaagaucuaccacaagugcgacaacgccugcaucggcagcaucagaaacggcaccuacgaccacgacguguacagagacgaggcccugaacaacagauuccagaucaagggcguggagcugaagagcggcuacaaggacuggauccuguggaucagcuucgccaucagcugcuuccugcugugcguggugcugcugggcuucaucaugugggccugccagaagggcaacaucagaugcaacaucugcaucuga

SEQ ID NO: 172847 - RNA, 1701 nt, Artificial Sequence
  derived and/or modified CDS sequence (opt4) from hemagglutinin__InfluenzaA__AIW60693
augaagaccaucaucgcccugagcuacauccugugccugguguucgcccagaagcugcccggcaacgacaacagcaccgccacccugugccugggccaccacgccgugcugaacggcacccuggugaagaccaucaccaacgaccagaucgaggugaccaacgccaccgagcuggugcagaacagcagcaccggcagaaucugcgacagcccccaccagauccuggacggcgagaacugcacccugaucgacgcccugcugggcgacccccacugcgacggcuuccagaacaaggagugggaccuguucguggagagaagcaaggccuacagcaacugcuaccccuacgacgugcccgacuacgccagccugagaagccugguggccagcagcggcacccuggaguucaacaacgagagcuucaacuggaccggcguggcccagaacggcaccagcagcgccugcaagagaagaagcaucaagagcuucuucagcagacugaacuggcugcaccagcugaaguacaaguaccccgcccugaacgugaccaugcccaacaacgagaaguucgacaagcuguacaucuggggcgugcaccaccccagcaccgacagcgaccagaccagcaucuacgcccaggccagcggcagagugaccgugagcaccaagagaagccagcagaccgugauccccaacaucggcagcagacccugggugagaggcgugagcagcaucaucagcaucuacuggaccaucgugaagcccggcgacauccugcugaucaacagcaccggcaaccugaucgcccccagaggcuacuucaagaucagaagcggcaagagcagcaucaugagaagcgacgcccccaucggcaagugcaacagcgagugcaucacccccaacggcagcauccccaacgacaagcccuuccagaacgugaacagaaucaccuacggcgccugccccagauacgugaagcagaacacccugaagcuggccaccggcaugagaaacgugcccgagaagcagaccagaggcaucuucggcgccaucgccggcuucaucgagaacggcugggagggcaugguggacggcugguacggcuucagacaccagaacagcgagggcaccggccaggccgccgaccugaagagcacccaggccgccaucaaccagaucaacggcaagcugaacagacugaucgagaagaccaacgagaaguuccaccagaucgagaaggaguucagcgagguggagggcagaauccaggaccuggagaaguacguggaggacaccaagaucgaccuguggagcuacaacgccgagcugcugguggcccuggagaaccagcacaccaucgaccugaccgacagcgagaugaacaagcuguucgagagaaccagaaagcagcugagagagaacgccgaggacaugggcaacggcugcuucaagaucuaccacaagugcgacaacgccugcaucggcagcaucagaaacggcaccuacgaccacgacguguacagagacgaggcccugaacaacagauuccagaucaagggcguggagcugaagagcggcuacaaggacuggauccuguggaucagcuucgccaucagcugcuuccugcugugcguggugcugcugggcuucaucaugugggccugccagaagggcaacaucagaugcaacaucugcaucuga

SEQ ID NO: 172848 - RNA, 1701 nt, Artificial Sequence
  derived and/or modified CDS sequence (opt4) from hemagglutinin__InfluenzaA__AIW60694
augaagaccaucaucgcccugagcuacauccugugccugguguucgcccagaagcugcccggcaacgacaacagcaccgccacccugugccugggccaccacgccgugcugaacggcacccuggugaagaccaucaccaacgaccagaucgaggugaccaacgccaccgagcuggugcagaacagcagcaccggcagaaucugcgacagcccccaccagauccuggacggcgagaacugcacccugaucgacgcccugcugggcgacccccacugcgacggcuuccagaacaaggagugggaccuguucguggagagaagcaaggccuacagcaacugcuaccccuacgacgugcccgacuacgccagccugagaagccugguggccagcagcggcacccuggaguucaacaacgagagcuucaacuggaccggcguggcccagaacggcaccagcagcgccugcaagagaagaagcaucaagagcuucuucagcagacugaacuggcugcaccagcugaaguacaaguaccccgcccugaacgugaccaugcccaacaacgagaaguucgacaagcuguacaucuggggcgugcaccaccccagcaccgacagcgaccagaccagccuguacgcccaggccagcggcagagugaccgugagcaccaagagaagccagcagaccgugauccccaacaucggcagcagacccugggugagaggcgugagcagcagaaucagcaucuacuggaccaucgugaagcccggcgacauccugcugaucaacagcaccggcaaccugaucgcccccagaggcuacuucaagaucagaagcggcaagagcagcaucaugagaagcgacgcccccaucggcaagugcaacagcgagugcaucacccccaacggcagcauccccaacgacaagcccuuccagaacgugaacagaaucaccuacggcgccugccccagauacgugaagcagaacacccugaagcuggccaccggcaugagaaacgugcccgagaagcagaccagaggcaucuucggcgccaucgccggcuucaucgagaacggcugggagggcaugguggacggcugguacggcuucagacaccagaacagcgagggcaccggccaggccgccgaccugaagagcacccaggccgccaucaaccagaucaacggcaagcugaacagacugaucgagaagaccaacgagaaguuccaccagaucgagaaggaguucagcgagguggagggcagaauccaggaccuggagaaguacguggaggacaccaagaucgaccuguggagcuacaacgccgagcugcugguggcccuggagaaccagcacaccaucgaccugaccgacagcgagaugaacaagcuguucgagagaaccagaaagcagcugagagagaacgccgaggacaugggcaacggcugcuucaagaucuaccacaagugcgacaacgccugcaucggcagcaucagaaacggcaccuacgaccacgacguguacagagacgaggcccugaacaacagauuccagaucaagggcguggagcugaagagcggcuacaaggacuggauccuguggaucagcuucgccaucagcugcuuccugcugugcguggugcugcugggcuucaucaugugggccugccagaagggcaacaucagaugcaacaucugcaucuga

SEQ ID NO: 172849 - RNA, 1701 nt, Artificial Sequence
  derived and/or modified CDS sequence (opt4) from hemagglutinin__InfluenzaA__AIW60695
augaagaccaucaucgcccugagcuacauccugugccugguguucgcccagaagcugcccggcaacgacaacagcaccgccacccugugccugggccaccacgccgugcccaacggcacccuggugaagaccaucaccaacgaccagaucgaggugaccaacgccaccgagcuggugcagagcagcagcaccggcggcaucugcgacagcccccaccagauccuggacggcgagaacugcacccugaucgacgcccugcugggcgacccccacugcgacggcuuccagaacaaggagugggaccuguucguggagagaagcaaggccuacagcaacugcuaccccuacgacgugcccgacuacgccagccugagaagccugguggccagcagcggcacccuggaguucaacaacgagagcuucaacuggaccggcguggcccagaacggcaccagcagcgccugcaagagaagaagcaacaagagcuucuucagcagacugaacuggcugcaccagcugaacuacaaguaccccgcccugaacgugaccaugcccaacaacgagaaguucgacaagcuguacaucuggggcgugcaccaccccagcaccgacagcgaccagaucagcaucuacgcccaggcccccggcagagugaccgugagcaccaagagaagccagcagaccgugauccccaacaucggcagcagacccugggugagaggcgugagcagcaucaucagcaucuacuggaccaucgugaagcccggcgacauccugcugaucaacugcaccggcaaccugaucgcccccagaggcuacuucaagaucagaagcggcaagagcagcaucaugagaagcgacgccagcaucggcaagugcaacagcgagugcaucacccccaacggcagcauccccaacgacaagcccuuccagaacgugaacagaaucaccuacggcgccugccccagauacgugaagcagaacacccugaagcuggccaccggcaugagaaacgugcccgagaagcagaccagaggcaucuucggcgccaucgccggcuucaucgagaacggcugggagggcaugguggacggcugguacggcuucagacaccagaacagcgagggcaccggccaggccgccgaccugaagagcacccaggccgccaucaaccagaucaacggcaagcugaacagacugaucgagaagaccaacgagaaguuccaccagaucgagaaggaguucagcgagguggagggcagaauccaggaccuggagaaguacguggaggacaccaagaucgaccuguggagcuacaacgccgagcugcugguggcccuggagaaccagcacaccaucgaccugaccgacagcgagaugaacaagcuguucgagagaaccaagaagcagcugagagagaacgccgaggacaugggcaacggcugcuucaagaucuaccacaagugcgacaacgccugcaucggcagcaucagaaacggcaccuacgaccacgacguguacagagacgaggcccugaacaacagauuccagaucaagggcguggagcugaagagcggcuacaaggacuggauccuguggaucagcuucgccaucagcugcuuccugcugugcguggugcugcugggcuucaucaugugggccugccagaagggcaacaucagaugcaacaucugcaucuga

SEQ ID NO: 172850 - RNA, 1701 nt, Artificial Sequence
  derived and/or modified CDS sequence (opt4) from hemagglutinin__InfluenzaA__AIW60696
augaagaccaucaucgcccugagcuacauccugugccugguguucgcccagaagcugcccggcaacgacaacagcaccgccacccugugccugggccaccacgccgugcccaacggcacccuggugaagaccaucaccaacgaccagaucgaggugaccaacgccaccgagcuggugcagagcagcagcaccggcggcaucugcgacagcccccaccagauccuggacggcgagaacugcacccugaucgacgcccugcugggcgacccccacugcgacggcuuccagaacaaggagugggaccuguucguggagagaagcaaggccuacagcaacugcuaccccuacgacgugcccgacuacgccagccugagaagccugguggccagcagcggcacccuggaguucaacaacgagagcuucaacuggaccggcguggaccagaacggcaccagcagcgccugcaagagaagaagcaacaagagcuucuucagcagacugaacuggcugcaccagcugaaguacaaguaccccgcccugaacguggccaugcccaacaacgagaaguucgacaagcuguacaucuggggcgugcaccaccccagcaccgacagcgaccagaucagccuguacgcccaggcccccggcagagugaccgugagcaccaagagaagccagcagaccgugauccccaacaucggcagcagacccugggugagaggcgugagcagcagaaucagcaucuacuggaccaucgugaagcccggcgacauccugcugaucaacugcaccggcaaccugaucgcccccagaggcuacuucaagaucagaagcggcaagagcagcaucaugagaagcgacgccagcaucggcaagugcaacagcgagugcaucacccccaacggcagcauccccaacgacaagcccuuccagaacgugaacagaaucaccuacggcgccugccccagauacgugaagcagaacacccugaagcuggccaccggcaugagaaacgugcccgagaagcagaccagaggcaucuucggcgccaucgccggcuucaucgagaacggcugggagggcaugguggacggcugguacggcuucagacaccagaacagcgagggcaccggccaggccgccgaccugaagagcacccaggccgccaucaaccagaucaacggcaagcugaacagacugaucgagaagaccaacgagaaguuccaccagaucgagaaggaguucagcgagguggagggcagaauccaggaccuggagaaguacguggaggacaccaagaucgaccuguggagcuacaacgccgagcugcugguggcccuggagaaccagcacaccaucgaccugaccgacagcgagaugaacaagcuguucgagagaaccaagaagcagcugagagagaacgccgaggacaugggcaacggcugcuucaagaucuaccacaagugcgacaacgccugcaucggcagcaucagaaacggcaccuacgaccacgacguguacagagacgaggcccugaacaacagauuccagaucaagggcguggagcugaagagcggcuacaaggacuggauccuguggaucagcuucgccaucagcugcuuccugcugugcguggugcugcugggcuucaucaugugggccugccagaagggcaacaucagaugcaacaucugcaucuga

SEQ ID NO: 172851 - RNA, 1701 nt, Artificial Sequence
  derived and/or modified CDS sequence (opt4) from hemagglutinin__InfluenzaA__AIW60697
augaagaccaucaucgcccugagcuacauccugugccugguguucgcccagaagcugcccggcaacgacaacagcaccgccacccugugccugggccaccacgccgugcccaacggcaccaucgugaagaccaucaccaacgaccagaucgaggugaccaacgccaccgagcuggugcagagcagcagcaccggcggcaucugcgacagcccccaccagauccuggacggcgagaacugcacccugaucgacgcccugcugggcgacccccagugcgacggcuuccagaacaagaagugggaccuguucguggagagaagcaaggccuacagcaacugcuaccccuacgacgugcccgaccacgccagccugagaagccugguggccagcagcggcacccuggaguucaacaacgagagcuucgacuggaccggcgugacccagaacggcaccagcagcagcugcaagagaagaagcaacaagagcuucuucagcagacugaacuggcugacccaccugaaguacaaguaccccgcccugaacgugaccaugcccaacaacgagaaguucgacaagcuguacaucuggggcgugcaccaccccgacaccgacagcgugcagaucagccuguacgcccaggccagcggcagaaucaccgugagcaccaagagaagccagcagaccgugauccccaacaucggcagcagacccagagugagagacaucagcagcagaaucagcaucuacuggaccaucgugaagcccggcgacauccugcugaucaacagcaccggcaaccugaucgcccccagaggcuacuucaagaucagaagcggcaagagcagcaucaugagaagcgacgcccccaucggcaagugcaacagcgagugcaucacccccaacggcagcauccccaacgacaagcccuuccagaacgugaacagaaucaccuacggcgccugccccagauacgugaagcagaacacccugaagcuggccaccggcaugagaaacgugcccgagaagcagaccagaggcaucuucggcgccaucgccggcuucaucgagaacggcugggagggcaugguggacggcugguacggcuucagacaccagaacagcgagggcaccggccaggccgccgaccugaagagcacccaggccgccaucaaccagaucaacggcaagcugaacagacugaucggcaagaccaacgagaaguuccaccagaucgagaaggaguucagcgagguggagggcagaauccaggaccuggagaaguacguggaggacaccaagaucgaccuguggagcuacaacgccgagcugcugguggcccuggagaaccagcacaccaucgaccugaccgacagcgagaugaacaagcuguucgagagaaccaagaagcagcugagagagaacgccgaggacaugggcaacggcugcuucaagaucuaccacaagugcgacaacgccugcaucggcagcaucagaaacggcaccuacgaccacgacguguacagagacgaggcccugaacaacagauuccagaucaagggcguggagcugaagagcggcuacaaggacuggauccuguggaucagcuucgccaucagcugcuuccugcugugcguggcccugcugggcuucaucaugugggccugccagaagggcaacaucagaugcaacaucugcaucuga

SEQ ID NO: 172852 - RNA, 1701 nt, Artificial Sequence
  derived and/or modified CDS sequence (opt4) from hemagglutinin__InfluenzaA__AIW60698
augaagaccaucaucgcccugagcuacauccugugccugguguucgcccagaagcugcccggcaacgacaacagcaccgccacccugugccugggccaccacgccgugcccaacggcaccaucgugaagaccaucaccaacgaccagaucgaggugaccaacgccaccgagcuggugcagagcagcagcaccggcggcaucugcgacagcccccaccagauccuggacggcgagaacugcacccugaucgacgcccugcugggcgacccccagugcgacggcuuccagaacaagaagugggaccuguucguggagagaagcaaggccuacagcaacugcuaccccuacgacgugcccgaccacgccagccugagaagccugguggccagcagcggcacccuggaguucaacaacgagagcuucgacuggaccggcgugacccagaacggcaccagcagcgccugcaagagaagaagcaacaagagcuucuucagcagacugaacuggcugacccaccugaaguacaaguaccccgcccugaacgugaccaugcccaacaacgagaaguucgacaagcuguacaucuggggcgugcaccaccccggcaccgacagcgaccagaucagccuguacgcccaggccagcggcagaaucaccgugagcaccaagagaagccagcagaccgugauccccaacaucggcagcagacccagagugagagacaucagcagcagaaucagcaucuacuggaccaucgugaagcccggcgacauccugcugaucaacagcaccggcaaccugaucgcccccagaggcuacuucaagaucagaagcggcaagagcagcaucaugagaagcgacgcccccaucggcaagugcaacagcgagugcaucacccccaacggcagcauccccaacgacaagcccuuccagaacgugaacagaaucaccuacggcgccugccccagauacgugaagcagaacacccugaagcuggccaccggcaugagaaacgugcccgagaagcagaccagaggcaucuucggcgccaucgccggcuucaucgagaacggcugggagggcaugguggacggcugguacggcuucagacaccagaacagcgagggcaccggccaggccgccgaccugaagagcacccaggccgccaucaaccagaucaacggcaagcugaacagacugaucggcaagaccaacgagaaguuccaccagaucgagaaggaguucagcgagguggagggcagaauccaggaccuggagaaguacguggaggacaccaagaucgaccuguggagcuacaacgccgagcugcugguggcccuggagaaccagcacaccaucgaccugaccgacagcgagaugaacaagcuguucgagagaaccaagaagcagcugagagagaacgccgaggacaugggcaacggcugcuucaagaucuaccacaagugcgacaacgccugcaucggcagcaucagaaacggcaccuacgaccacgacguguacagagacgaggcccugaacaacagauuccagaucaagggcguggagcugaagagcggcuacaaggacuggauccuguggaucagcuucgccaucagcugcuuccugcugugcguggcccugcugggcuucaucaugugggccugccagaagggcaacaucagaugcaacaucugcaucuga

SEQ ID NO: 172853 - RNA, 1701 nt, Artificial Sequence
  derived and/or modified CDS sequence (opt4) from hemagglutinin__InfluenzaA__AIW60699
augaagaccaucaucgcccugagcuacauccugugccugguguucgcccagaagcugcccggcaacgacaacagcaccgccacccugugcaucggccaccacgccgugcccaacggcaccaucgugaagaccaucaccaacgaccagaucgaggugaccaacgccaccgagcuggugcagagcagcagcaccggcggcaucugcgacagcccccaccagauccuggacggcgagaacugcacccugaucgacgcccugcugggcgacccccagugcgacggcuuccagaacaagaagugggaccuguucguggagagaagcaaggccuacagcaacugcuaccccuacgacgugcccgacuacgccagccugagaagccugaucgccagcagcggcacccuggaguucaacaacgagagcuucaacuggaccggcgugacccagaacggcaccagcagcgccugcaagagaagaagcaacaacagcuucuucagcagacugaacuggcugacccaccugaaguucaaguaccccgcccugaacgugaccaugcccaacaacgaggaguucgacaagcuguacaucuggggcgugcaccaccccgugaccgacaacgaccagaucagccuguacgcccaggccagcggcaagaucaccgugagcaccaagagaagccagcagaccgugauccccaacaucggcagcagacccagagugagagacauccccagcagaaucagcaucuacuggaccaucgugaagcccggcgacauccugcugaucaagagcaccggcaaccugaucgcccccagaggcuacuucaagaucagaagcggcaagagcagcaucaugagaagcgacgcccccaucggcaagugcaacagcgagugcaucacccccaacggcagcauccccaacgacaagcccuuccagaacgugaacagaaucaccuacggcgccugccccagauacgugaagcagaacacccugaagcuggccaccggcaugagaaacgugcccgagaagcagaccagaggcaucuucggcgccaucgccggcuucaucgagaacggcugggagggcaugguggacggcugguacggcuucagacaccagaacagcgagggcaucggccaggccgccgaccugaagagcacccaggccgccaucgaccagaucaacggcaagcugaacagacugaucggcaagaccaacgagaaguuccaccagaucgagaaggaguucagcgagguggagggcagaauccaggaccuggagaaguacguggaggacaccaagaucgaccuguggagcuacaacgccgagcugcugguggcccuggagaaccagcacaccaucgaccugaccgacagcgagaugaacaagcuguucgaggagaccaagaagcagcugagagagaacgccgaggacaugggcaacggcugcuucaagaucuaccacaagugcgacaacgccugcaucggcagcaucagaaacggcaccuacgaccacgacguguacagagacgaggcccugaacaacagauuccagaucaagggcguggagcugaagagcggcuacaaggacuggauccuguggaucagcuucgccaucagcugcuuccugcugugcguggcccugcugggcuucaucaugugggccugccagaagggcaacaucagaugcaacaucugcaucuga

SEQ ID NO: 172854 - RNA, 1701 nt, Artificial Sequence
  derived and/or modified CDS sequence (opt4) from hemagglutinin__InfluenzaA__AIW60700
augaagaccaucaucgcccugagcuacauccugugccugguguucgcccagaagcugcccggcaacgacaacagcaccgccacccugugcaucggccaccacgccgugcccaacggcaccaucgugaagaccaucaccaacgaccagaucgaggugaccaacgccaccgagcuggugcagagcagcagcaccggcggcaucugcgacagcccccaccagauccuggacggcgagaacugcacccugaucgacgcccugcugggcgacccccagugcgacggcuuccagaacaagaagugggaccuguucguggagagaagcaaggccuacagcaacugcuaccccuacgacgugcccgacuacgccagccugagaagccugaucgccagcagcggcacccuggaguucaacaacgagagcuucaacuggaccggcgugacccagaacggcaccagcagcgccugcaagagaagaagcaacaacagcuucuucagcagacugaacuggcugacccaccugaaguucaaguaccccgcccugaacgugaccaugcccaacaacgaggaguucgacaagcuguacaucuggggcgugcaccaccccggcaccgacaacgaccagaucagccuguacgcccaggccagcggcaagaucaccgugagcaccaagagaagccagcagaccgugauccccaacaucggcagcagacccagagugagagacauccccagcagaaucagcaucuacuggaccaucgugaagcccggcgacauccugcugaucaacagcaccggcaaccugaucgcccccagaggcuacuucaagaucagaagcggcaagagcagcaucaugagaagcgacgcccccaucggcaagugcaacagcgagugcaucacccccaacggcagcauccccaacgacaagcccuuccagaacgugaacagaaucaccuacggcgccugccccagauacgugaagcagaacacccugaagcuggccaccggcaugagaaacgugcccgagaagcagaccagaggcaucuucggcgccaucgccggcuucaucgagaacggcugggagggcaugguggacggcugguacggcuucagacaccagaacagcgagggcaucggccaggccgccgaccugaagagcacccaggccgccaucgaccagaucaacggcaagcugaacagacugaucggcaagaccaacgagaaguuccaccagaucgagaaggaguucagcgagguggagggcagaauccaggaccuggagaaguacguggaggacaccaagaucgaccuguggagcuacaacgccgagcugcugguggcccuggagaaccagcacaccaucgaccugaccgacagcgagaugaacaagcuguucgaggagaccaagaagcagcugagagagaacgccgaggacaugggcaacggcugcuucaagaucuaccacaagugcgacaacgccugcaucggcagcaucagaaacggcaccuacgaccacgacguguacagagacgaggcccugaacaacagauuccagaucaagggcguggagcugaagagcggcuacaaggacuggauccuguggaucagcuucgccaucagcugcuuccugcugugcguggcccugcugggcuucaucaugugggccugccagaagggcaacaucagaugcaacaucugcaucuga

SEQ ID NO: 172855 - RNA, 1701 nt, Artificial Sequence
  derived and/or modified CDS sequence (opt4) from hemagglutinin__InfluenzaA__AIW60701
augaagaccaucaucgcccugagcuacauccugugccugguguucacccagaagcugcccggcaacgacaacagcaccgccacccugugccugggccaccacgccgugcccaacggcaccaucgugaagaccaucaccaacgaccagaucgaggugaccaacgccaccgagcuggugcagagcagcagcaccggcgagaucugcgacagcccccaccagauccuggacggcgagaacugcacccugaucgacgcccugcugggcgacccccagugcgacggcuuccagaacaagaagugggaccuguucguggagagaagcaaggccuacagcaacugcuaccccuacgacgugcccgacuacgccagccugagaagccugguggccagcagcggcacccuggaguucaacaacgagagcuucaacuggaccggcgugacccagaacggcaccagcagcgccugcaucagaagaagcaacaacagcuucuucagcagacugaacuggcugacccaccugaaguucaaguaccccgcccugaacgugaccaugcccaacaacgagaaguucgacaagcuguacaucuggggcgugcaccaccccggcaccgacaacgaccagaucuuccccuacgcccaggccagcggcagaaucaccgugagcaccaagagaagccagcagaccgugauccccaacaucggcagcagacccagagugagaaacauccccagcagaaucagcaucuacuggaccaucgugaagcccggcgacauccugcugaucaacagcaccggcaaccugaucgcccccagaggcuacuucaagaucagaagcggcaagagcagcaucaugagaagcgacgcccccaucggcaagugcaacagcgagugcaucacccccaacggcagcauccccaacgacaagcccuuccagaacgugaacagaaucaccuacggcgccugccccagauacgugaagcagaacacccugaagcuggccaccggcaugagaaacgugcccgagaagcagaccagaggcaucuucggcgccaucgccggcuucaucgagaacggcugggagggcaugguggacggcugguacggcuucagacaccagaacagcgagggcaucggccaggccgccgaccugaagagcacccaggccgccaucgaccagaucaacggcaagcugaacagacugaucggcaagaccaacgagaaguuccaccagaucgagaaggaguucagcgagguggagggcagaauccaggaccuggagaaguacguggaggacaccaagaucgaccuguggagcuacaacgccgagcugcugguggcccuggagaaccagcacaccaucgaccugaccgacagcgagaugaacaagcuguucgagaagaccaagaagcagcugagagagaacgccgaggacaugggcaacggcugcuucaagaucuaccacaagugcgacaacgccugcaucggcagcaucagaaacggcaccuacgaccacgacguguacagagacgaggcccugaacaacagauuccagaucaagggcguggagcugaagagcggcuacaaggacuggauccuguggaucagcuucgccaucagcugcuuccugcugugcguggcccugcugggcuucaucaugugggccugccagaagggcaacaucagaugcaacaucugcaucuga

SEQ ID NO: 172856 - RNA, 1701 nt, Artificial Sequence
  derived and/or modified CDS sequence (opt4) from hemagglutinin__InfluenzaA__AIW60702
augaagaccaucaucgcccugagcuacauccugugccugguguucacccagaagcugcccggcaacgacaacagcaccgccacccugugccugggccaccacgccgugcccaacggcaccaucgugaagaccaucaccaacgaccagaucgaggugaccaacgccaccgagcuggugcagagcagcagcaccggcgagaucugcgacagcccccaccagauccuggacggcgagaacugcacccugaucgacgcccugcugggcgacccccagugcgacggcuuccagaacaagaagugggaccuguucguggagagaagcaaggccuacagcaacugcuaccccuacgacgugcccgacuacgccagccugagaagccugguggccagcagcggcacccuggaguucaacaacgagagcuucaacuggaccggcgugacccagaacggcaccagcagcgccugcaucagaagaagcaacaacagcuucuucagcagacugaacuggcugacccaccugaaguucaaguaccccgcccugaacgugaccaugcccaacaacgagaaguucgacaagcuguacaucuggggcgugcaccaccccggcaccgacaacgaccagaucuuccuguacgcccaggccagcggcagaaucaccgugagcaccaagagaagccagcagaccgugauccccaacaucggcagcagacccagagugagaaacauccccagcagaaucagcaucuacuggaccaucgugaagcccggcgacauccugcugaucaacagcaccggcaaccugaucgcccccagaggcuacuucaagaucagaagcggcaagagcagcaucaugagaagcgacgcccccaucggcaagugcaacagcgagugcaucacccccaacggcagcauccccaacgacaagcccuuccagaacgugaacagaaucaccuacggcgccugccccagauacgugaagcagaacacccugaagcuggccaccggcaugagaaacgugcccgagaagcagaccagaggcaucuucggcgccaucgccggcuucaucgagaacggcugggagggcaugguggacggcugguacggcuucagacaccagaacagcgagggcaucggccaggccgccgaccugaagagcacccaggccgccaucgaccagaucaacggcaagcugaacagacugaucggcaagaccaacgagaaguuccaccagaucgagaaggaguucagcgagguggagggcagaauccaggaccuggagaaguacguggaggacaccaagaucgaccuguggagcuacaacgccgagcugcugguggcccuggagaaccagcacaccaucgaccugaccgacagcgagaugaacaagcuguucgagaagaccaagaagcagcugagagagaacgccgaggacaugggcaacggcugcuucaagaucuaccacaagugcgacaacgccugcaucggcagcaucagaaacggcaccuacgaccacgacguguacagagacgaggcccugaacaacagauuccagaucaagggcguggagcugaagagcggcuacaaggacuggauccuguggaucagcuucgccaucagcugcuuccugcugugcguggcccugcugggcuucaucaugugggccugccagaagggcaacaucagaugcaacaucugcaucuga

SEQ ID NO: 172857 - RNA, 1701 nt, Artificial Sequence; identical to SEQ ID NO: 172601
  derived and/or modified CDS sequence (opt4) from hemagglutinin__InfluenzaA__AIZ07211

SEQ ID NO: 172858 - RNA, 1701 nt, Artificial Sequence
  derived and/or modified CDS sequence (opt4) from hemagglutinin__InfluenzaA__AIZ07212
augaagaccaucauggcccugagcuacauccugugccugguguucgcccagaagcugcccggcaacgacaacagcaccgccacccugugccugggccaccacgccgugcccaacggcaccaucgugaagaccaucaccaacgacagaaucgaggugaccaacgccaccgagcuggugcagaacagcagcaucggcgagaucugcgacagcccccaccagauccuggacggcgagaacugcacccugaucgacgcccugcugggcgacccccagugcgacggcuuccagaacaagaagugggaccuguucguggagagaagcaaggccuacagcaacugcuaccccuacgacgugcccgacuacgccagccugagaagccugguggccagcagcggcacccuggaguucaacaacgagagcuucaacugggccggcgugacccagaacggcaccagcagcgccugcaucagaggcagcaacagcagcuucuucagcagacugaacuggcugacccacagcaacuucaaguaccccgcccugaacgugaccaugcccaacaacgagcaguucgacaagcuguacaucuggggcgugcaccaccccggcaccgacaaggaccagaucuuccuguacgcccagagcagcggcagaaucaccgugagcaccaagagaagccagcaggccgugauccccaacaucggcagcagacccagaaucagaaacauccccagcagaaucagcaucuacuggaccaucgugaagcccggcgacauccugcugaucaacagcaccggcaaccugaucgcccccagaggcuacuucaagaucagaagcggcaagagcagcaucaugagaagcgacgcccccaucggcaagugcaagagcgagugcaucacccccaacggcagcauccccaacgacaagcccuuccagaacgugaacagaaucaccuacggcgccugccccagauacgugaagcagagcacccugaagcuggccaccggcaugagaaacgugcccgagaagcagaccagaggcaucuucggcgccaucgccggcuucaucgagaacggcugggagggcaugauggacggcugguacggcuucagacaccagaacagcgagggcagaggccaggccgccgaccugaagagcacccaggccgccaucgaccagaucaacggcaagcugaacagacugaucggcaagaccaacgagaaguuccaccagaucgagaaggaguucagcgagguggagggcagaauccaggaccuggagaaguacguggaggacaccaagaucgaccuguggagcuacaacgccgagcugcugguggcccuggagaaccagcacaccaucgaccugaccgacagcgagaugaacaagcuguucgagaagaccaagaagcagcugagagagaacgccgaggacaugggcaacggcugcuucaagaucuaccacaagugcgacaacgccugcaucggcagcaucagaaacggcaccuacgaccacgacguguacagagacgaggcccugaacaacagauuccagaucaagggcguggagcugaagagcggcuacaaggacuggauccuguggaucagcuucgccaucagcugcuuccugcugugcguggcccugcugggcuucaucaugugggccugccagaagggcaacaucagaugcaacaucugcaucuga

SEQ ID NO: 172859 - RNA, 1683 nt, Artificial Sequence
  derived and/or modified CDS sequence (opt4) from hemagglutinin__InfluenzaA__AJD78175
auggagaccgccagccugaucaccauccugcugguggugaccgugagcaacgccgacaagaucugcaucggcuaccagagcaccaacagcaccgagaccguggacacccugaccgagaacaacgugcccgugacccacgccaaggagcugcugcacaccgagcacaacggcaugcugugcgccaccagccugggccagccccugauccuggacaccugcaccaucgagggccugaucuacggcaaccccagcugcgaccugcugcugggcggcagagaguggagcuacaucguggagagacccagcgccgccaacggccugugcuaccccggcaacguggagaaccuggaggagcugagaagccuguucagcagcgccagaagcuaccagagaauccagaucuuccccgacaccaucuggaacgugagcuacagcggcaccagcaaggccugcagcgacagcuucuacagaagcaugagauggcugacccagaaggacaacaccuaccccauccaggacgcccaguacaccaacaaccagggcaagaacauccuguucauguggggcaucaaccacccccccaccgacaccgcccagaccaaccuguacaccagaaccgacaccaccaccagcguggccaccgaggagaucaacagaaccuucaagccccugaucggccccagaccccuggugaacggccugaugggcagaaucaacuacuacuggagcgugcugaagcccggccagacccugagaaucaagagcaacggcaaccugaucgcccccugguacggccacauccugagcggcgagagccacggcagaauccugaagaccgaccugaagagaggcagcugcaccgugcagugccagaccgagaagggcggccugaacaccacccugcccuuccagaacgugagcaaguacgccuucggcaacugcagcaaguacaucggcaucaagagccugaagcuggccgugggccugagaaacgugcccagcagaagcagcagaggccuguucggcgccaucgccggcuucaucgagggcggcuggagcggccugguggccggcugguacggcuuccagcacagcaacgaccagggcgugggcauggccgccgacagagacagcacccagaaggccaucgacaagaucaccagcaaggugaacaacaucguggacaagaugaacaagcaguacgagaucaucgaccacgaguucaacgagguggagaccagacugaacaugaucaacaacaagaucgacgaccagauccaggacaucugggccuacaacgccgagcugcuggugcugcuggagaaccagaagacccuggacgagcacgacgccaacgugaacaaccuguacaacaaggugaagagagcccugggcagcaacgccguggaggacggcaagggcugcuucgagcuguaccacaagugcgacgaccagugcauggagaccaucagaaacggcaccuacaacagaagaaaguaccaggaggagagcaagcuggagagacagaagaucgagggcgugaagcuggagagcgagggcaccuacaagauccugaccaucuacagcaccguggccagcagccuggugaucgccaugggcuucgccgccuuccuguucugggccaugagcaacggcagcugcagaugcaacaucugcaucuga

SEQ ID NO: 172860 - RNA, 1683 nt, Artificial Sequence
  derived and/or modified CDS sequence (opt4) from hemagglutinin__InfluenzaA__AJD78187
auggagaccgccagccugaucaccauccugcugguggugaccgugagcaacgccgacaagaucugcaucggcuaccagagcaccaacagcaccgagaccguggacacccugaccgagaacaacgugcccgugacccacgccaaggagcugcugcacaccgagcacaacggcaugcugugcgccaccagccugggccacccccugauccuggacaccugcaccaucgagggccugaucuacggcaaccccagcugcgaccugcugcugggcggcagagaguggagcuacaucguggagagacccagcgccgugaacggccugugcuaccccggcaacguggagaaccuggaggagcugagaagccuguucagcagcgccagaagcuaccagagaauccagaucuuccccgacaccaucuggaacgugagcuacagcggcaccagcaagaccugcagcgacagcuucuacagaagcaugagauggcugacccagaaggacaacgccuaccccauccaggacgcccaguacaccaacaaccagggcaagaacauccuguucauguggggcaucaaccacccccccaccgacaccacccagaccaaccuguacaccagaaccgacaccaccaccagcguggccaccgaggagaucaacagaaccuucaagccccugaucggccccagaccccuggugaacggccugaugggcagaaucaacuacuacuggagcgugcugaagcccggccagacccugagaaucaagagcaacggcaaccugaucgcccccugguacggccacauccugagcggcgagagccacggcagaauccugaagaccgaccugaagagaggcagcugcaccgugcagugccagaccgagaagggcggccugaacaccacccugcccuuccagaacgugagcaaguacgccuucggcaacugcagcaaguacaucggcaucaagagccugaagcuggccgugggccugagaaacgugcccagcagaagcagcagaggccuguucggcgccaucgccggcuucaucgagggcggcuggagcggccugguggccggcugguacggcuuccagcacagcaacgaccagggcgugggcauggccgccgacagagacagcacccagaaggccaucgacaagaucaccagcaaggugaacaacaucguggacaagaugaacaagcaguacgagaucaucgaccacgaguucagcgagguggagaccagacugaacaugaucaacaacaagaucgacgaccagauccaggacaucugggccuacaacgccgagcugcuggugcugcuggagaaccagaagacccuggacgagcacgacgccaacgugaacaaccuguacaacaaggugaagagagcccugggcagcaacgccguggaggacggcaagggcugcuucgagcuguaccacaagugcgacgaccagugcauggagaccaucagaaacggcaccuacaacagaagaaaguaccaggaggagagcaagcuggagagacagaagaucgagggcgugaagcuggagagcgagggcaccuacaagauccugaccaucuacagcaccguggccagcagccuggugaucgccaugggcuucgccgccuuccuguucugggccaugagcaacggcagcugcagaugcaacaucugcaucuga

SEQ ID NO: 172861 - RNA, 1683 nt, Artificial Sequence
  derived and/or modified CDS sequence (opt4) from hemagglutinin__InfluenzaA__AJD78199
auggagaccgugagccugaucaccauccugcugguggccaccgugagcaacgccgacaagaucugcaucggcuaccagagcaccaacagcaccgagaccguggacacccugaccgagaacaacgugcccgugacccacgccaaggagcugcugcacaccgagcacaacggcaugcugugcgccaccagccugggccagccccugauccuggacaccugcaccaucgagggccugaucuacggcaaccccagcugcgaccugagccuggagggcagagaguggagcuacaucguggagagacccagcgccgugaacggccugugcuaccccggcaacguggagaaccuggaggagcugagaagccuguucagcagcgccagaagcuaccagagaauccagaucuuccccgacaccaucuggaacgugagcuacgacggcaccagcaccgccugcagcggcagcuucuacagaagcaugagauggcugaccagaaagaacggcgacuaccccauccaggacgcccaguacaccaacaaccagggcaagaacauccuguucauguggggcaucaaccacccccccaccgacaccacccagagagaccuguacaccagaaccgacaccaccaccagcguggccaccgaggagaucaacagaaucuucaagccccugaucggccccagaccccuggugaacggccugaugggcagaaucgacuacuacuggagcgugcugaagcccggccagacccugagaaucaagagcgacggcaaccugaucgcccccugguacggccacauccugagcggcgagagccacggcagaauccugaagaccgaccugaagagaggcagcugcaccgugcagugccagaccgagaagggcggccugaacaccacccugcccuuccagaacgugagcaaguacgccuucggcaacugcagcaaguacaucggcaucaagagccugaagcuggccgugggccugagaaacgugcccagcagaagcagcagaggccuguucggcgccaucgccggcuucaucgagggcggcuggagcggccugguggccggcugguacggcuuccagcacagcaacgaccagggcgugggcauggccgccgacagagacagcacccagaaggccaucgacaagaucaccagcaaggugaacaacaucguggacaagaugaacaagcaguacgagaucaucgaccacgaguucagcgagguggagaccagacugaacaugaucaacaacaagaucgacgaccagauccaggacaucugggccuacaacgccgagcugcuggugcugcuggagaaccagaagacccuggacgagcacgacgccaacgugaacaaccuguacaacaaggugaagagagcccugggcagcaacgccguggaggacggcaagggcugcuucgagcuguaccacaagugcgacgaccagugcauggagaccaucagaaacggcaccuacaacagaagaaaguaccaggaggagagcaagcuggagagacagaagaucgagggcgugaagcuggagagcgagggcaccuacaagauccugaccaucuacagcaccguggccagcagccuggugaucgccaugggcuucgccgccuuccuguucugggccaugagcaacggcagcugcagaugcaacaucugcaucuga

SEQ ID NO: 172862 - RNA, 1683 nt, Artificial Sequence
  derived and/or modified CDS sequence (opt4) from hemagglutinin__InfluenzaA__AJD78211
auggagaccgugagccugaucaccauccugcugguggccaccgugagcaacgccgacaagaucugcaucggcuaccagagcaccaacagcaccgagaccguggacacccugaccgagaacaacgugcccgugacccacgccaaggagcugcugcacaccgagcacaacggcaugcugugcgccaccagccugggccagccccugauccuggacaccugcaccaucgagggccugaucuacggcaaccccagcugcgaccugagccuggagggcagagaguggagcuacaucguggagagacccagcgccgugaacggccugugcuaccccggcaacguggagaaccuggaggagcugagaagccuguucagcagcgccagaagcuaccagagaauccagaucuuccccgacaccaucuggaacgugagcuacgacggcaccagcaccgccugcagcggcagcuucuacagaagcaugagauggcugaccagaaagaacggcgacuaccccauccaggacgcccaguacaccaacaaccagggcaagaacauccuguucauguggggcaucaaccacccccccaccgacaccacccagagagaccuguacaccagaaccgacaccaccaccagcguggccaccgaggagaucaacagaaucuucaagccccugaucggccccagaccccuggugaacggccugaugggcagaaucgacuacuacuggagcgugcugaagcccggccagacccugagaaucaagagcgacggcaaccugaucgcccccugguacggccacauccugagcggcgagagccacggcagaauccugaagaccgaccugaagagaggcagcugcaccgugcagugccagaccgagaagggcggccugaacaccacccugcccuuccagaacgugagcaaguacgccuucggcaacugcagcaaguacaucggcaucaagagccugaagcuggccgugggccugagaaacgugcccagcagaagcagaagaggccuguucggcgccaucgccggcuucaucgagggcggcuggagcggccugguggccggcugguacggcuuccagcacagcaacgaccagggcgugggcauggccgccgacagagacagcacccagaaggccaucgacaagaucaccagcaaggugaacaacaucguggacaagaugaacaagcaguacgagaucaucgaccacgaguucagcgagguggagaccagacugaacaugaucaacaacaagaucgacgaccagauccaggacaucugggccuacaacgccgagcugcuggugcugcuggagaaccagaagacccuggacgagcacgacgccaacgugaacaaccuguacaacaaggugaagagagcccugggcagcaacgccguggaggacggcaagggcugcuucgagcuguaccacaagugcgacgaccagugcauggagaccaucagaaacggcaccuacaacagaagaaaguaccaggaggagagcaagcuggagagacagaagaucgagggcgugaagcuggagagcgagggcaccuacaagauccugaccaucuacagcaccguggccagcagccuggugaucgccaugggcuucgccgccuuccuguucugggccaugagcaacggcagcugcagaugcaacaucugcaucuga

SEQ ID NO: 172863 - RNA, 1689 nt, Artificial Sequence
  derived and/or modified CDS sequence (opt4) from hemagglutinin__InfluenzaA__AJI76401
auggccaucaucuaccugauccugcuguucgccaccgugagaggcgaccagaucugcaucggcuaccacgccaacaacagcaccgagaagguggacaccauccuggagagaaacgugaccgugacccacgccaaggacauccuggagaagacccacaacggcaagcugugcaagcugaacggcauccccccccuggagcugggcgacugcagcaucgccggcuggcugcugggcaaccccgagugcgacagacugcugagagugcccgaguggagcuacaucauggagaaggagaaccccagauacagccugugcuaccccggcagccugaacgacuacgaggagcugaagcaccugcugagcagcgugaagcacuucgagaaggugagaauccugcccaaggacagauggaccaaccacaccaccaccggcggcagcaaggccugcgccgugagcggcaagcccagcuucuucagaaacaugguguggcugaccaagaagggccccaacuaccccguggccaagggcagcuacaacaacaccagcggcgagcagaugcugaucaucuggggcgugcaccaccccaucgacgaggccgagcagagagcccuguaccagaacgugggcaccuacgugagcgccagcaccagcacccuguacaagagaagcauccccgagaucgccgccagacccgaggugaacggccugggcagcagaauggaguucagcuggacccugcuggacgugugggacaccaucaacuucgagagcaccggcaaccugguggcccccgaguacggcuucaagaucagcaagagaggcagcagcggcaucaugaagaccgagggcacccugggcaacugcgagaccaagugccagaccccccugggcgccaucaacaccacccugcccuuccacaacgugcacccccugaccaucggcgagugccccaaguacgugaagagcgagaagcuggugcuggccaccggccugagaaacgugccccagaucgagagcagaggccuguucggcgccaucgccggcuucaucgagggcggcuggcagggcaugguggacggcugguacggcuaccaccacagcaacgaccagggcagcggcuacgccgccgacaaggagagcacccagaaggccuucgacggcaucaccaacaaggugaacagcgugaucgagaagaugaacacccaguucgaggccgugggcaaggaguucaacaaccuggagaagagacuggagaaccugaacaagagaauggaggacggcuuccuggacguguggaccuacaacgccgagcugcuggugcugauggagaacgagagaacccuggacuuccacgacagcaacgugaagaaccuguacgagaaggugagaaugcagcugagagacaacgugagagagcugggcaacggcugcuucgaguucuaccacaagugcgacgacgagugcaugaacagcgugaagaacggcaccuacgacuaccccaaguacgaggaggagagcaagcugaagagaaacgagaucaagggcgugaagcugagcagcaugggcguguaccagauccuggccaucuacgccaccguggccggcagccugagccuggccaucaugguggccggcaucagcuucuggaugugcagcaacggcagccugcagugcagaaucugcaucuga

SEQ ID NO: 172864 - RNA, 1701 nt, Artificial Sequence; identical to SEQ ID NO: 172125
  derived and/or modified CDS sequence (opt4) from hemagglutinin__InfluenzaA__AJI80137

SEQ ID NO: 172865 - RNA, 1701 nt, Artificial Sequence; identical to SEQ ID NO: 172125
  derived and/or modified CDS sequence (opt4) from hemagglutinin__InfluenzaA__AJI80149

SEQ ID NO: 172866 - RNA, 1701 nt, Artificial Sequence; identical to SEQ ID NO: 170100
  derived and/or modified CDS sequence (opt4) from hemagglutinin__InfluenzaA__AJI80161

SEQ ID NO: 172867 - RNA, 1701 nt, Artificial Sequence
  derived and/or modified CDS sequence (opt4) from hemagglutinin__InfluenzaA__AJI80172
augaagaccaucaucgcccugagcuacauccugugccugguguucgcccagaagcugcccggcaacgacaacagcaccgccacccugugccugggccaccacgccgugcccaacggcaccaucgugaagaccaucaccaacgacagaaucgaggugaccaacgccaccgagcuggugcagaacagcagcaucggcgagaucugcgacagcccccaccagauccuggacggcgagaacugcagccugaucgacgcccugcugggcgacccccagugcgacggcuuccagaacaagaagugggaccuguucguggagagaagcaaggccuacagcaacugcuaccccuacgacgugcccgacuacgccagccugagaagccugguggccagcagcggcacccuggaguucaacaacgagagcuucaacugggccggcgugacccagaacggcaccagcagcgccugcaucagaggcagcaacagcagcuucuucagcagacugaacuggcugacccaccugaacuucaaguaccccgcccugaacgugaccaugcccaacaacgagcaguucgacaagcuguacaucuggggcgugcaccaccccggcaccgacaaggaccagaucuuccuguacgcccagagcagcggcagaaucaccgugagcaccaagagaagccagcaggccgugauccccaacaucggcagcagacccagaaucagaaacauccccagcagaaucagcaucuacuggaccaucgugaagcccggcgacauccugcugaucaacagcaccggcaaccugaucgcccccagaggcuacuucaagaucagaagcggcaagagcagcaucaugagaagcgacgcccccaucggcaagugcaagagcgagugcaucacccccaacggcagcauccccaacgacaagcccuuccagaacgugaacagaaucaccuacggcgccugccccagauacgugaagcagagcacccugaagcuggccaccggcaugagaaacgugcccgagaagcagaccagaggcaucuucggcgccaucgccggcuucaucgagaacggcugggagggcaugguggacggcugguacggcuucagacaccagaacagcgagggcagaggccaggccgccgaccugaagagcacccaggccgccaucgaccagaucaacggcaagcugaacagacugaucggcaagaccaacgagaaguuccaccagaucgagaaggaguucagcgagguggagggcagaauccaggaccuggagaaguacguggaggacaccaagaucgaccuguggagcuacaacgccgagcugcugguggcccuggagaaccagcacaccaucgaccugaccgacagcgagaugaacaagcuguucgagaagaccaagaagcagcugagagagaacgccgaggacaugggcaacggcugcuucaagaucuaccacaagugcgacaacgccugcaucggcagcaucagaaacggcaccuacgaccacgacguguacagagacgaggcccugaacaacagauuccagaucaagggcguggagcugaagagcggcuacaaggacuggauccuguggaucagcuucgccaucagcugcuuccugcugugcguggcccugcugggcuucaucaugugggccugccagaagggcaacaucagaugcaacaucugcaucuga

SEQ ID NO: 172868 - RNA, 1701 nt, Artificial Sequence
  derived and/or modified CDS sequence (opt4) from hemagglutinin__InfluenzaA__AJI80196
augaagaccaucaucgcccugagcuacauccugugccugguguucgcccagaagcugcccggcaacgacaacagcaccgccacccugugccugggccaccacgccgugcccaacggcaccaucgugaagaccaucaccaacgacagaaucgaggugaccaacgccaccgagcuggugcagaacagcagcaucggcgagaucugcgacagcccccaccagauccuggacggcgagaacugcacccugaucgacgcccugcugggcgacccccagugcgacggcuuccagaacaaggagugggaccuguucguggagagaagcaaggccuacagcaacugcuaccccuacgacgugcccgacuacgccagccugagaagccugguggccagcagcggcacccuggaguucaacaacgagagcuucaacugggccggcgugacccagaacggcaccagcagcgccugcaucagaggcagcaacagcagcuucuucagcagacugaacuggcugacccaccugaacuucaaguaccccgcccugaacgugaccaugcccaacaacgagcaguucgacaagcuguacaucuggggcgugcaccaccccggcaccgacaaggaccagaucuuccuguacgcccagagcagcggcagaaucaccgugagcaccaagagaagccagcaggccgugauccccaacaucggcagcagacccagaaucagaaacauccccagcagaaucagcaucuacuggaccaucgugaagcccggcgacauccugcugaucaacagcaccggcaaccugaucgcccccagaggcuacuucaagaucagaagcggcaagagcagcaucaugagaagcgacgcccccaucggcaagugcaagagcgagugcaucacccccaacggcagcauccccaacgacaagcccuuccagaacaucaacagaaucaccuacggcgccugccccagauacgugaagcagagcacccugaagcuggccaccggcaugagaaacgugcccgagaagcagaccagaggcaucuucggcgccaucgccggcuucaucgagaacggcugggagggcaugguggacggcugguacggcuucagacaccagaacagcgagggcagaggccaggccgccgaccugaagagcacccaggccgccaucgaccagaucaacggcaagcugaacagacugaucggcaagaccaacgagaaguuccaccagaucgagaaggaguucagcgagguggagggcagaauccaggaccuggagaaguacguggaggacaccaagaucgaccuguggagcuacaacgccgaguuccugguggcccuggagaaccagcacaccaucgaccugaccgacagcgagaugaacaagcuguucgagaagaccaagaagcagcugagagagaacgccgaggacaugggcaacggcugcuucaagaucuaccacaagugcgacaacgccugcaucggcagcaucagaaacggcaccuacgaccacgacguguacagagacgaggcccugaacaacagauuccagaucaagggcguggagcugaagagcggcuacaaggacuggauccuguggaucagcuucgccaucagcugcuuccugcugugcguggcccugcugggcuucaucaugugggccugccagaagggcaacaucagaugcaacaucugcaucuga

SEQ ID NO: 172869 - RNA, 1701 nt, Artificial Sequence; identical to SEQ ID NO: 172675
  derived and/or modified CDS sequence (opt4) from hemagglutinin__InfluenzaA__AJI80208

SEQ ID NO: 172870 - RNA, 1701 nt, Artificial Sequence; identical to SEQ ID NO: 170054
  derived and/or modified CDS sequence (opt4) from hemagglutinin__InfluenzaA__AJI80220

SEQ ID NO: 172871 - RNA, 1701 nt, Artificial Sequence; identical to SEQ ID NO: 172867
  derived and/or modified CDS sequence (opt4) from hemagglutinin__InfluenzaA__AJI80232

SEQ ID NO: 172872 - RNA, 1701 nt, Artificial Sequence; identical to SEQ ID NO: 170054
  derived and/or modified CDS sequence (opt4) from hemagglutinin__InfluenzaA__AJI80244

SEQ ID NO: 172873 - RNA, 1701 nt, Artificial Sequence; identical to SEQ ID NO: 169918
  derived and/or modified CDS sequence (opt4) from hemagglutinin__InfluenzaA__AJI80256

SEQ ID NO: 172874 - RNA, 1701 nt, Artificial Sequence; identical to SEQ ID NO: 170054
  derived and/or modified CDS sequence (opt4) from hemagglutinin__InfluenzaA__AJI80268

SEQ ID NO: 172875 - RNA, 1701 nt, Artificial Sequence
  derived and/or modified CDS sequence (opt4) from hemagglutinin__InfluenzaA__AJI80280
augaagaccaucaucgcccugagcuacauccugugccugguguucgcccagaagcugcccggcaacgacaacagcaccgccacccugugccugggccaccacgccgugcccaacggcaccaucgugaagaccaucaccaacgacagaaucgaggugaccaacgccaccgagcuggugcagaacagcagcaucggcaagaucugcgacagcccccaccagauccuggacggcgagaacugcacccugaucgacgcccugcugggcgacccccagugcgacggcuuccagaacaaggagugggaccuguucguggagagaagcaaggccuacagcaacugcuaccccuacgacgugcccgacuacgccagccugagaagccugguggccagcagcggcacccuggaguucaacaacgagagcuucaacugggccggcgugacccagaacggcaccagcagcgccugcaucagaggcagcaacagcagcuucuucagcagacugaacuggcugacccaccugaacuucaaguaccccgcccugaacgugaccaugcccaacaacgagcaguucgacaagcuguacaucuggggcgugcaccaccccggcaccgacaaggaccagaucuuccuguacgcccagagcagcggcagaaucaccgugagcaccaagagaagccagcaggccgugauccccaacaucggcagcagacccagaaucagaaacauccccagcagaaucagcaucuacuggaccaucgugaagcccggcgacauccugcugaucaacagcaccggcaaccugaucgcccccagaggcuacuucaagaucagaagcggcaagagcagcaucaugagaagcgacgcccccaucggcaagugcaagagcgagugcaucacccccaacggcagcauccccaacgacaagcccuuccagaacgugaacagaaucaccuacggcgccugccccagauacgugaagcagagcacccugaagcuggccaccggcaugagaaacgugcccgagaagcagaccagaggcaucuucggcgccaucgccggcuucaucgagaacggcugggagggcaugguggacggcugguacggcuucagacaccagaacagcgagggcagaggccaggccgccgaccugaagagcacccaggccgccaucgaccagaucaacggcaagcugaacagacugaucggcaagaccaacgagaaguuccaccagaucgagaaggaguucagcgagguggagggcagaauccaggaccuggagaaguacguggaggacaccaagaucgaccuguggagcuacaacgccgagcugcugguggcccuggagaaccagcacaccaucgaccugaccgacagcgagaugaacaagcuguucgagaagaccaagaagcagcugagagagaacgccgaggacaugggcaacggcugcuucaagaucuaccacaagugcgacaacgccugcaucggcagcaucagaaacggcaccuacgaccacgacguguacagagacgaggcccugaacaacagauuccagaucaagggcguggagcugaagagcggcuacaaggacuggauccuguggaucagcuucgccaucagcugcuuccugcugugcguggcccugcugggcuucaucaugugggccugccagaagggcaacaucagaugcaacaucugcaucuga

SEQ ID NO: 172876 - RNA, 1701 nt, Artificial Sequence; identical to SEQ ID NO: 172647
  derived and/or modified CDS sequence (opt4) from hemagglutinin__InfluenzaA__AJI80292

SEQ ID NO: 172877 - RNA, 1701 nt, Artificial Sequence; identical to SEQ ID NO: 172675
  derived and/or modified CDS sequence (opt4) from hemagglutinin__InfluenzaA__AJI80303

SEQ ID NO: 172878 - RNA, 1701 nt, Artificial Sequence; identical to SEQ ID NO: 172647
  derived and/or modified CDS sequence (opt4) from hemagglutinin__InfluenzaA__AJI80315

SEQ ID NO: 172879 - RNA, 1701 nt, Artificial Sequence
  derived and/or modified CDS sequence (opt4) from hemagglutinin__InfluenzaA__AJI80326
augaaggccauccugguggugcugcuguacaccuucgccaccgccaacgccgacacccugugcaucggcuaccacgccaacaacagcaccgacaccguggacaccgugcuggagaagaacgugaccgugacccacagcgugaaccugcuggaggacaagcacaacggcaagcugugcaagcugagaggcguggccccccugcaccugggcaagugcaacaucgccggcuggauccugggcaaccccgagugcgagagccugagcaccgccagcagcuggagcuacaucguggagaccagcagcagcgacaacggcaccugcuaccccggcgacuucaucaacuacgaggagcugagagagcagcugagcagcgugagcagcuucgagagauucgagaucuuccccaagaccagcagcuggcccaaccacgacagcaacaagggcgugaccgccgccugcccccacgccggcgccaagagcuucuacaagaaccugaucuggcuggugaagaagggcaacagcuaccccaagcugagccagagcuacaucaacgacaagggcaaggaggugcuggugcuguggggcauccaccaccccagcaccaccgccgaccagcagagccuguaccagaacgccgacgccuacguguucgugggcaccagcagauacagcaagaaguucaagcccgagaucgccaucagacccaaggugagagaccaggagggcagaaugaacuacuacuggacccugguggagcccggcgacaagaucaccuucgaggccaccggcaaccugguggugcccagauacgccuucaccauggagaagaacgccggcagcggcaucaucaucagcgacacccccgugcacgacugcaacaccaccugccagacccccgagggcgccaucaacaccagccugcccuuccagaacauccaccccaucaccaucggcaagugccccaaguacgugaagagcaccaagcugagacuggccaccggccugagaaacgugcccagcauccagagcagaggccuguucggcgccaucgccggcuucaucgagggcggcuggaccggcaugguggacggcugguacggcuaccaccaccagaacgagcagggcagcggcuacgccgccgaccugaagagcacccagaacgccaucgacaagaucaccaacaaggugaacagcgugaucgagaagaugaacacccaguucaccgccgugggcaaggaguucaaccaccuggagaagagaaucgagaaccugaacaagaagguggacgacggcuuccuggacaucuggaccuacaacgccgagcugcuggugcugcuggagaacgagagaacccuggacuaccacgacagcaacgugaagaaccuguacgagaaggugagaaaccagcugaagaacaacgccaaggagaucggcaacggcugcuucgaguucuaccacaagugcgacaacaccugcauggagagcgugaagaacggcaccuacgacuaccccaaguacagcgaggaggccaagcugaacagagagaagaucgacggcgugaagcuggagagcaccagaaucuaccagauccuggccaucuacagcaccguggccagcagccuggugcugguggugagccugggcgccaucagcuucuggaugugcagcaacggcagccugcagugcagaaucugcaucuga

SEQ ID NO: 172880 - RNA, 1701 nt, Artificial Sequence
  derived and/or modified CDS sequence (opt4) from hemagglutinin__InfluenzaA__AJI80337
augaaggccauccugguggugcugcuguacaccuucgccaccgccaacgccgacacccugugcaucggcuaccacgccaacaacagcaccgacaccguggacaccgugcuggagaagaacgugaccgugacccacagcaucaaccugcuggaggacaagcacaacggcaagcugugcaagcugagaggcguggccccccugcaccugggcaagugcaacaucgccggcuggauccugggcaaccccgagugcgagagccugagcaccgccagcagcuggagcuacaucguggagaccagcagcagcgacaacggcaccugcuaccccggcgacuucaucaacuacgaggagcugagagagcagcugagcagcgugagcagcuucgagagauucgagauguuccccaagaccagcagcuggcccaaccacgacagcaacaagggcgugaccgccgccugcccccacgccggcgccaagagcuucuacaagaaccugaucuggcuggugaagaagggcaacagcuaccccaagcugagcaagagcuacaucaacgacaagggcaaggaggugcuggugcuguggggcauccaccaccccagcaccaccgccgaccagcagagccuguaccagaacgccaacgccuacguguucgugggcaccagcaaguacagcaagaaguucaagcccgagaucgccaucagacccaaggugagagaccaggagggcagaaugaacuacuacuggacccugaucgagcccggcgacaagaucaccuucgaggccaccggcaaccugguggugcccagauacgccuucgccauggagagaaacgccggcagcggcaucaucaucagcgacacccccgugcacgacugcaacaccaccugccagacccccgagggcgccaucaacaccagccugcccuuccagaacauccaccccaucaccaucggcaagugccccaaguacgugaagagcaccaagcugagacuggccaccggccugagaaacauccccagcauccagagcagaggccuguucggcgccaucgccggcuucaucgagggcggcuggaccggcaugguggacggcugguacggcuaccaccaccagaacgagcagggcagcggcuacgccgccgaccugaagagcacccagaacgccaucgacaagaucaccaacaaggugaacagcgugaucgagaagaugaacacccaguucaccgccgugggcaaggaguucaaccaccuggagaagagaaucgagaaccugaacaagaagguggacgacggcuuccuggacaucuggaccuacaacgccgagcugcuggugcugcuggagaacgagagaacccuggacuaccacgacagcaacgugaagaaccuguacgagaaggugagaaaccagcugaagaacaacgccaaggagaucggcaacggcugcuucgaguucuaccacaagugcgacaacaccugcauggagagcgugaagaacggcaccuacgacuaccccaaguacagcgaggaggccaagcugaacagagagaagaucgacggcgugaagcuggagagcaccagaaucuaccagauccuggccaucuacagcaccguggccagcagccuggugcugguggugagccugggcgccaucagcuucuggaugugcagcaacggcagccugcagugcagaaucugcaucuga

SEQ ID NO: 172881 - RNA, 1701 nt, Artificial Sequence; identical to SEQ ID NO: 170054
  derived and/or modified CDS sequence (opt4) from hemagglutinin__InfluenzaA__AJI80348

SEQ ID NO: 172882 - RNA, 1701 nt, Artificial Sequence; identical to SEQ ID NO: 169918
  derived and/or modified CDS sequence (opt4) from hemagglutinin__InfluenzaA__AJI80360

SEQ ID NO: 172883 - RNA, 1701 nt, Artificial Sequence; identical to SEQ ID NO: 169918
  derived and/or modified CDS sequence (opt4) from hemagglutinin__InfluenzaA__AJI80372

SEQ ID NO: 172884 - RNA, 1701 nt, Artificial Sequence; identical to SEQ ID NO: 170100
  derived and/or modified CDS sequence (opt4) from hemagglutinin__InfluenzaA__AJI80384

SEQ ID NO: 172885 - RNA, 1701 nt, Artificial Sequence; identical to SEQ ID NO: 170100
  derived and/or modified CDS sequence (opt4) from hemagglutinin__InfluenzaA__AJI80395

SEQ ID NO: 172886 - RNA, 1701 nt, Artificial Sequence; identical to SEQ ID NO: 170100
  derived and/or modified CDS sequence (opt4) from hemagglutinin__InfluenzaA__AJI80406

SEQ ID NO: 172887 - RNA, 1701 nt, Artificial Sequence; identical to SEQ ID NO: 170100
  derived and/or modified CDS sequence (opt4) from hemagglutinin__InfluenzaA__AJI80417

SEQ ID NO: 172888 - RNA, 1701 nt, Artificial Sequence; identical to SEQ ID NO: 170100
  derived and/or modified CDS sequence (opt4) from hemagglutinin__InfluenzaA__AJI80428

SEQ ID NO: 172889 - RNA, 1701 nt, Artificial Sequence; identical to SEQ ID NO: 170054
  derived and/or modified CDS sequence (opt4) from hemagglutinin__InfluenzaA__AJI80439

SEQ ID NO: 172890 - RNA, 1701 nt, Artificial Sequence; identical to SEQ ID NO: 170054
  derived and/or modified CDS sequence (opt4) from hemagglutinin__InfluenzaA__AJI80462

SEQ ID NO: 172891 - RNA, 1701 nt, Artificial Sequence
  derived and/or modified CDS sequence (opt4) from hemagglutinin__InfluenzaA__AJI80474
augaaggccauccugguggugcugcuguacaccuucgccaccgccaacgccgacacccugugcaucggcuaccacgccaacaacagcaccgacaccguggacaccgugcuggagaagaacgugaccgugacccacagcaucaaccugcuggaggacaagcacaacggcaagcugugcaagcugagaggcguggccccccugcaccugggcaagugcaacaucgccggcuggauccugggcaaccccgagugcgagagccugagcaccgccagcagcuggagcuacaucguggagaccagcagcagcgacaacggcaccugcuaccccggcgacuucaucaacuacgaggagcugagagagcagcugagcagcgugagcagcuucgagagauucgagaucuuccccaagaccagcagcuggcccaaccacgacagcaacaagggcgugaccgccgccugcccccacgccggcgccaagagcuucuacaagaaccugaucuggcuggugaagaagggcaacagcuaccccaagcugagccagagcuacaucaacgacaagggcaaggaggugcuggugcuguggggcauccaccaccccagcaccaccgccgaccagcagagccuguaccagaacgccgacgccuacguguucgugggcaccagcagauacagcaagaaguucaagcccgagaucgccaucagacccaaggugagagaccaggagggcagaaugaacuacuacuggacccugguggagcccggcgacaagaucaccuucgaggccaccggcaaccugguggugcccagauacgccuucaccauggagagaaacgccggcagcggcaucaucaucagcgacacccccgugcacgacugcaacaccaccugccagacccccgagggcgccaucaacaccagccugcccuuccagaacauccaccccaucaccaucggcaagugccccaaguacgugaagagcaccaagcugagacuggccaccggccugagaaacgugcccagcauccagagcagaggccuguucggcgccaucgccggcuucaucgagggcggcuggaccggcaugguggacggcugguacggcuaccaccaccagaacgagcagggcagcggcuacgccgccgaccugaagagcacccagaacgccaucgacaagaucaccaacaaggugaacagcgugaucgagaagaugaacacccaguucaccgccgugggcaaggaguucaaccaccuggagaagagaaucgagaaccugaacaagaagguggacgacggcuuccuggacaucuggaccuacaacgccgagcugcuggugcugcuggagaacgagagaacccuggacuaccacgacagcaacgugaagaaccuguacgagaaggugagaaaccagcugaagaacaacgccaaggagaucggcaacggcugcuucgaguucuaccacaagugcgacaacaccugcauggagagcgugaagaacggcaccuacgacuaccccaaguacagcgaggaggccaagcugaacagagagaagaucgacggcgugaagcuggagagcaccagaaucuaccagauccuggccaucuacagcaccguggccagcagccuggugcugguggugagccugggcgccaucagcuucuggaugugcagcaacggcagccugcagugcagaaucugcaucuga

SEQ ID NO: 172892 - RNA, 1701 nt, Artificial Sequence; identical to SEQ ID NO: 172891
  derived and/or modified CDS sequence (opt4) from hemagglutinin__InfluenzaA__AJI80485

SEQ ID NO: 172893 - RNA, 1701 nt, Artificial Sequence; identical to SEQ ID NO: 170100
  derived and/or modified CDS sequence (opt4) from hemagglutinin__InfluenzaA__AJI80496

SEQ ID NO: 172894 - RNA, 1701 nt, Artificial Sequence; identical to SEQ ID NO: 172703
  derived and/or modified CDS sequence (opt4) from hemagglutinin__InfluenzaA__AJI80507

SEQ ID NO: 172895 - RNA, 1701 nt, Artificial Sequence; identical to SEQ ID NO: 170100
  derived and/or modified CDS sequence (opt4) from hemagglutinin__InfluenzaA__AJI80518

SEQ ID NO: 172896 - RNA, 1701 nt, Artificial Sequence; identical to SEQ ID NO: 168192
  derived and/or modified CDS sequence (opt4) from hemagglutinin__InfluenzaA__AJJ98765

SEQ ID NO: 172897 - RNA, 1701 nt, Artificial Sequence
  derived and/or modified CDS sequence (opt4) from hemagglutinin__InfluenzaA__AJJ98777
augaagaccaucaucgcccugagcuacauccugugccugguguucgcccagaagcugcccggcaacgacaacagcaccgccacccugugccugggccaccacgccgugcccaacggcaccaucgugaagaccaucaccaacgaccagaucgaggugaccaacgccaccgagcuggugcagagcuucagcaccggcgagaucugcaacagcccccaccagauccuggacggcgagaacugcacccugaucgacgcccugcugggcgacccccagugcgacggcuuccagaacaagaagugggaccuguucguggagagaagcaaggccuacagcaacugcuaccccuacgacgugcccgacuacgccagccugagaagccugguggccagcagcggcacccuggaguucaacaacgagagcuucaacuggaccggcgugacccagaacggcaccagcagcgccugcaucagaagaagcaacaacagcuucuucagcagacugaacuggcugacccaccugaaguucaaguaccccgcccugaacgugaccaugcccaacaacgaggaguucgacaagcuguacaucuggggcgugcaccaccccggcaccgacaacgaccagaucuuccuguacgcccaggccagcggcagaaucaccgugagcaccaagagaagccagcagaccgugauccccaacaucggcagcagacccagagugagaaacauccccagcagaaucagcaucuacuggaccaucgugaagcccggcgacauccugcugaucaacagcaccggcaaccugaucgcccccagaggcuacuucaagaucagaagcggcaagagcagcaucaugagaagcgacgcccccaucggcaagugcaacagcgagugcaucacccccaacggcagcauccccaacgacaagcccuuccagaacgugaacagaaucaccuacggcgccugccccagauacgugaagcagaacacccugaagcuggccaccggcaugagaaacgugcccgagaagcagaccagaggcaucuucggcgccaucgccggcuucaucgagaacggcugggagggcaugguggacggcugguacggcuucagacaccagaacagcgagggcaucggccaggccgccgaccugaagagcacccaggccgccaucgaccagaucaacggcaagcugaacagacugaucggcaagaccaacgagaaguuccaccagaucgagaaggaguucagcgagguggagggcagaauccaggaccuggagaaguacguggaggacaccaagaucgaccuguggagcuacaacgccgagcugcugguggcccuggagaaccagcacaccaucgaccugaccgacagcgagaugaacaagcuguucgagaagaccaagaagcagcugagagagaacgccgaggacaugggcaacggcugcuucaagaucuaccacaagugcgacaacgccugcaucggcagcaucagaaacggcaccuacgaccacgacguguacagagacgaggcccugaacaacagauuccagaucaagggcguggagcugaagagcggcuacaaggacuggauccuguggaucagcuucgccaucagcugcuuccugcugugcguggcccugcugggcuucaucaugugggccugccagaagggcaacaucagaugcaacaucugcaucuga

SEQ ID NO: 172898 - RNA, 1701 nt, Artificial Sequence; identical to SEQ ID NO: 169513
  derived and/or modified CDS sequence (opt4) from hemagglutinin__InfluenzaA__AJJ98789

SEQ ID NO: 172899 - RNA, 1701 nt, Artificial Sequence
  derived and/or modified CDS sequence (opt4) from hemagglutinin__InfluenzaA__AJJ98801
augaagaccaucaucgcccugagcuacauccugugccugguguucgcccagaagcugcccggcaacgacaacagcaccgccacccugugccugggccaccacgccgugcccaacggcaccaucgugaagaccaucaccaacgaccagaucgaggugaccaacgccaccgagcuggugcagaacagcagcaucggcgagaucugcgacagcccccaccagauccuggacggcgagaacugcacccugaucgacgcccugcugggcgacccccagugcgacggcuuccagaacaagaagugggaccuguucguggagagaaacaaggccuacagcaacugcuaccccuacgacgugcccgacuacgccagccugagaagccugguggccagcagcggcacccuggaguucaacaacgagagcuucaacuggaccggcgugacccagaacggcaccagcagcgccugcaucagaagaagcaacaacagcuucuucagcagacugaacuggcugacccaccugaacuucaaguaccccgcccugaacgugaccaugcccaacaacgagcaguucgacaagcuguacaucuggggcgugcaccaccccggcaccgacaaggaccagaucuuccuguacgcccagagcagcggcagaaucaccgugagcaccaagagaagccagcaggccgugauccccaacaucggcagcagacccagaaucagaaacauccccagcagaaucagcaucuacuggaccaucgugaagcccggcgacauccugcugaucaacagcaccggcaaccugaucgcccccagaggcuacuucaagaucagaagcggcaagagcagcaucaugagaagcgacgcccccaucggcaagugcaagagcgagugcaucacccccaacggcagcauccccaacgacaagcccuuccagaacgugaacagaaucaccuacggcgccugccccagauacgugaagcagagcacccugaagcuggccaccggcaugagaaacgugcccgagaagcagaccagaggcaucuucggcgccaucgccggcuucaucgagaacggcugggagggcaugguggacggcugguacggcuucagacaccagaacagcgagggcagaggccaggccgccgaccugaagagcacccaggccgccaucgaccagaucaacggcaagcugaacagacugaucggcaagaccaacgagaaguuccaccagaucgagaaggaguucagcgagguggagggcagaauccaggaccuggagaaguacguggaggacaccaagaucgaccuguggagcuacaacgccgagcugcugguggcccuggagaaccagcacaccaucgaccugaccgacagcgagaugaacaagcuguucgagaagaccaagaagcagcugagagagaacgccgaggacaugggcaacggcugcuucaagaucuaccacaagugcgacaacgccugcaucggcagcaucagaaacggcaccuacgaccacgacguguacagagacgaggcccugaacaacagauuccagaucaagggcguggagcugaagagcggcuacaaggacuggauccuguggaucagcuucgccaucagcugcuuccugcugugcguggcccugcugggcuucaucaugugggccugccagaagggcaacaucagaugcaacaucugcaucuga

SEQ ID NO: 172900 - RNA, 1701 nt, Artificial Sequence
  derived and/or modified CDS sequence (opt4) from hemagglutinin__InfluenzaA__AJJ98813
augaagaccaucaucgcccugagcuacauccugugccugguguucgcccagaagcugcccggcaacgacaacagcaccgccacccugugccugggccaccacgccgugcccaacggcaccaucgugaagaccaucaccaacgacagaaucgaggugaccaacgccaccgagcuggugcagaacagcagcaucggcgagaucugcgacagcccccaccagauccuggacggcgagaacugcacccugaucgacgcccugcugggcgacccccagugcgacggcuuccagaacaagaagugggaccuguucguggagagaagcaaggccuacagcaacugcuaccccuacgacgugcccgacuacgccagccugagaagccugguggccagcagcggcacccuggaguucaacaacgagagcuucaacuggaccggcgugacccagaacggcaccagcagcgccugcaucagaagaagcaacagcagcuucuucagcagacugaacuggcugacccaccugaacuucaaguaccccgcccugaacgugaccaugcccaacaacgagcaguucgacaagcuguacaucuggggcgugcaccaccccggcaccgacaaggaccagaucuuccuguacgcccagagcagcggcagaaucaccgugagcaccaagagaagccagcaggccguggugcccaacaucggcagcagacccagaaucagaaacauccccagcagaaucagcaucuacuggaccaucgugaagcccggcgacauccugcugaucaacagcaccggcaaccugaucgcccccagaggcuacuucaagaucagaagcggcaagagcagcaucaugagaagcgacgcccccaucggcaagugcaagagcgagugcaucacccccaacggcagcauccccaacgacaagcccuuccagaacgugaacagaaucaccuacggcgccugccccagauacgugaagcagagcacccugaagcuggccaccggcaugagaaacgugcccgagaagcagaccagaggcaucuucggcgccaucgccggcuucaucgagaacggcugggagggcaugguggacggcugguacggcuucagacaccagaacagcgagggcagaggccaggccgccgaccugaagagcacccaggccgccaucgaccagaucaacggcaagcugaacagacugaucggcaagaccaacgagaaguuccaccagaucgagaaggaguucagcgagguggagggcagaauccaggaccuggagaaguacguggaggacaccaagaucgaccuguggagcuacaacgccgagcugcugguggcccuggagaaccagcacaccaucgaccugaccgacagcgagaugaacaagcuguucgagaagaccaagaagcagcugagagagaacgccgaggacaugggcaacggcugcuucaagaucuaccacaagugcgacaacgccugcaucggcagcaucagaaacggcaccuacgaccacgacguguacagagacgaggcccugaacaacagauuccagaucaagggcguggagcugaagagcggcuacaaggacuggauccuguggaucagcuucgccaucagcugcuuccugcugugcguggcccugcugggcuucaucaugugggccugccagaagggcaacaucagaugcaacaucugcaucuga

SEQ ID NO: 172901 - RNA, 1701 nt, Artificial Sequence
  derived and/or modified CDS sequence (opt4) from hemagglutinin__InfluenzaA__AJJ98825
augaagaccaucaucgcccugagcuacauccugugccugguguucgcccaggagcugcccggcaacgacaacagcaccgccacccugugccugggccaccacgccgugcccaacggcaccaucgugaagaccaucaccaacgacagaaucgaggugaccaacgccaccgagcuggugcagaacagcagcaucggcgagaucugcgacagcccccaccagauccuggacggcgagaacugcacccugaucgacgcccugcugggcgacccccagugcgacggcuuccagaacaagaagugggaccuguucguggagagaagcaaggccuacagcaacugcuaccccuacgacgugcccgacuacgccagccugagaagccugguggccagcagcggcacccuggaguucaacaacgagagcuucaacuggaccggcgugacccagaacggcaccagcagcgccugcaucagaagaagcaacaacagcuucuucagcagacugaacuggcugacccaccugaacuucaaguaccccgcccugaacgugaccaugcccaacaacgagcaguucgacaagcuguacaucuggggcgugcaccaccccggcaccgacaaggaccagaucuuccuguacgcccagagcagcggcagaaucaccgugagcaccaagagaagccagcaggccgugauccccaacaucggcagcagacacagaaucagaaacauccccagcagaaucagcaucuacuggaccaucgugaagcccggcgacauccugcugaucaacagcaccggcaaccugaucgcccccagaggcuacuucaagaucagaagcggcaagagcagcaucaugagaagcgacgcccccaucggcaagugcaagagcgagugcaucacccccaacggcagcauccccaacgacaagcccuuccagaacgugaacagaaucaccuacggcgccugccccagauacgugaagcagagcacccugaagcuggccaccggcaugagaaacgugcccgagaagcagaccagaggcaucuucggcgccaucgccggcuucaucgagaacggcugggagggcaugguggacggcugguacggcuucagacaccagaacagcgagggcagaggccaggccgccgaccugaagagcacccaggccgccaucgaccagaucaacggcaagcugaacagacugaucggcaagaccaacgagaaguuccaccagaucgagaaggaguucagcgagguggagggcagaauccaggaccuggagaaguacguggaggacaccaagaucgaccuguggagcuacaacgccgagcugcugguggcccuggagaaccagcacaccaucgaccugaccgacagcgagaugaacaagcuguucgagaagaccaagaagcagcugagagagaacgccgaggacaugggcaacggcugcuucaagaucuaccacaagugcgacaacgccugcaucggcagcaucagaaacggcaccuacgaccacgacguguacagagacgaggcccugaacaacagauuccagaucaagggcguggagcugaagagcggcuacaaggacuggauccuguggaucagcuucgccaucagcugcuuccugcugugcguggcccugcugggcuucaucaugugggccugccagaagggcaacaucagaugcaacaucugcaucuga

SEQ ID NO: 172902 - RNA, 1701 nt, Artificial Sequence
  derived and/or modified CDS sequence (opt4) from hemagglutinin__InfluenzaA__AJJ98837
augaagaccaucaucgcccugagcuacauccugugccugguguucgcccagaagcugcccggcaacgacaacagcaccgccacccugugccugggccaccacgccgugcccaacggcaccaucgugaagaccaucaccaacgaccagaucgaggugaccaacgccaccgagcuggugcagagcagcagcaccggcgagaucugcaacagcccccaccagauccuggacggcgagaacugcacccugaucgacgcccugcugggcgacccccagugcgacggcuuccagaacaagaagugggaccuguucguggagagaagcaaggcccacagcaacugcuaccccuacgacgugcccgacuacgccagccugagaagccugguggccagcagcggcacccuggaguucaacaacgagagcuucaacuggaccggcgugacccagaacggcaccagcagcgccugcaucagaagaagcaacaacagcuucuucagcagacugaacuggcugacccaccugaacuucaaguaccccgcccugaacgugaccaugcccaacaacgagcaguucgacaagcuguacaucuggggcgugcaccaccccggcaccgacaaggaccagaucuuccuguacgcccaggccagcggcagaaucaccgugagcaccaagagaagccagcaggccgugauccccaacaucggcagcagacccagagugagaaacauccccagcagagugagcaucuacuggaccaucgugaagcccggcgacauccugcugaucaacagcaccggcaaccugaucgcccccagaggcuacuucaagaucagaagcggcaagagcagcaucaugagaagcgacgcccccaucggcaagugcaacagcgccugcaucacccccaacggcagcauccccaacgacaagcccuuccagaacgugaacagaaucaccuacggcgccugccccagauacgugaagcagagcacccugaagcuggccaccggcaugagaaacgugcccgagaagcagaccagaggcaucuucggcgccaucgccggcuucaucgagaacggcugggagggcaugguggacggcugguacggcuucagacaccagaacagcgagggcagaggccaggccgccgaccugaagagcacccaggccgccaucgaccagaucaacggcaagcugaacagacugaucggcaagaccaacgagaaguuccaccagaucgagaaggaguucagcgagguggagggcagaauccaggaccuggagaaguacguggaggacaccaagaucgaccuguggagcuacaacgccgagcugcugguggcccuggagaaccagcacaccaucgaccugaccgacagcgagaugaacaagcuguucgagaagaccaagaagcagcugagagagaacgccgaggacaugggcaacggcugcuucaagaucuaccacaagugcgacaacgccugcaucggcagcaucagaaacggcaccuacgaccacgacguguacagagacgaggcccugaacaacagauuccagaucaagggcguggagcugaagagcggcuacaaggacuggauccuguggaucagcuucgccaucagcugcuuccugcugugcguggcccugcugggcuucaucaugugggccugccagaagggcaacaucagaugcaacaucugcaucuga

SEQ ID NO: 172903 - RNA, 1701 nt, Artificial Sequence
  derived and/or modified CDS sequence (opt4) from hemagglutinin__InfluenzaA__AJJ98849
augaagaccaucaucgcccugagcuacauccugugccugguguucgcccaggagcugcccggcaacgacaacagcaccgccacccugugccugggccaccacgccgugcccaacggcaccaucgugaagaccaucaccaacgaccagaucgaggugaccaacgccaccgagcuggugcagagcagcagcaccggcgagaucugcaacagcccccaccagauccuggacggcgagaacugcacccugaucgacgcccugcugggcgacccccagugcgacggcuuccagaacaagaagugggaccuguucguggagagaagcaaggcccacagcaacugcuaccccuacgacgugcccgacuacgccagccugagaagccugguggccagcagcggcacccuggaguucaacaacgagagcuucaacuggaccggcgugacccagaacggcaccagcagcgccugcaucagaagaagcaacaacagcuucuucagcagacugaacuggcugacccaccugaacuucaaguaccccgcccugaacgugaccaugcccaacaacgagcaguucgacaagcuguacaucuggggcgugcaccaccccggcaccgacaaggaccagaucuuccuguacgcccaggccagcggcagaaucaccgugagcaccaagagaagccagcaggccgugauccccaacaucggcagcagacugagagugagaaacauccccagcagagugagcaucuacuggaccaucgugaagcccggcgacauccugcugaucaacagcaccggcaaccugaucgcccccagaggcuacuucaagaucagaagcggcaagagcagcaucaugagaagcgacgcccccaucggcaagugcaacagcgccugcaucacccccaacggcagcauccccaacgacaagcccuuccagaacgugaacagaaucaccuacggcgccugccccagauacgugaagcagaacacccugaagcuggccaccggcaugagaaacgugcccgagaagcagaccagaggcaucuucggcgccaucgccggcuucaucgagaacggcugggagggcaugguggacggcugguacggcuucagacaccagaacagcgagggcagaggccaggccgccgaccugaagagcacccaggccgccaucgaccagaucaacggcaagcugaacagacugaucggcaagaccaacgagaaguuccaccagaucgagaaggaguucagcgagguggagggcagaauccaggaccuggagaaguacguggaggacaccaagaucgaccuguggagcuacaacgccgagcugcugguggcccuggagaaccagcacaccaucgaccugaccgacagcgagaugaacaagcuguucgagaagaccaagaagcagcugagagagaacgccgaggacaugggcaacggcugcuucaagaucuaccacaagugcgacaacgccugcaucggcagcaucagaaacggcaccuacgaccacgacguguacagagacgaggcccugaacaacagauuccagaucaagggcguggagcugaagagcggcuacaaggacuggauccuguggaucagcuucgccaucagcugcuuccugcugugcguggcccugcugggcuucaucaugugggccugccagaagggcaacaucagaugcaacaucugcaucuga

SEQ ID NO: 172904 - RNA, 1701 nt, Artificial Sequence
  derived and/or modified CDS sequence (opt4) from hemagglutinin__InfluenzaA__AJJ98861
augaagaccaucaucgcccugagcuacauccugugccugguguucgcccagaagcugcccggcaacgacaacagcaccgccacccugugccugggccaccacgccgugcccaacggcaccaucgugaagaccaucaccaacgaccagaucgaggugaccaacgccaccgagcuggugcagaucagcagcaccggcgagaucugcgacagcccccaccagauccuggacggcgagaacugcacccugaucgacgcccugcugggcgacccccagugcgacggcuuccagaacaagaagugggaccuguucguggagagaagcaaggccuacagcaacugcuaccccuacgacgugcccgacuacgccagccugagaagccugguggccagcagcggcacccuggaguucaacaacgagagcuucaacuggaccggcgugacccagaacggcaccagcagcgccugcaucagaagaagcaacaacagcuucuucagcagacugaacuggcugacccaccugaaguucaaguaccccgcccugaacgugaccaugcccaacaacgagcaguucgacaagcuguacaucuggggcgugcaccaccccggcaccgacaacgaccagaucuuccuguacgcccaggccagcggcagaaucaccgugagcaccaagagaagccagcagaccgugauccccaacaucggcagcagacccagagugagaaacauccccagcagaaucagcaucuacuggaccaucgugaagcccggcgacauccugcugaucaacagcaccggcaaccugaucgcccccagaggcuacuucaagaucagaagcggcaagagcagcaucaugaagagcgacgcccccaucggcaagugcaacagcgagugcaucacccccaacggcagcauccccaacgacaagcccuuccagaacgugaacagaaucaccuacggcgccugccccagauacgugaagcagaacacccugaagcuggccaccggcaugagaaacgugcccgagaagcagaccagaggcaucuucggcgccaucgccggcuucaucgagaacggcugggagggcaugguggacggcugguacggcuucagacaccagaacagcgagggcagaggccaggccgccgaccugaagagcacccaggccgccaucgaccagaucaacggcaagcugaacagacugaucggcaagaccaacgagaaguuccaccagaucgagaaggaguucagcgagguggagggcagaauccaggaccuggagaaguacguggaggacaccaagaucgaccuguggagcuacaacgccgagcugcugguggcccuggagaaccagcacaccaucgaccugaccgacagcgagaugaacaagcuguucgagaagaccaagaagcagcugagagagaacgccgaggacaugggcaacggcugcuucaagaucuaccacaagugcgacaacgccugcaucggcagcaucagaaacggcaccuacgaccacgacguguacagagacgaggcccugaacaacagauuccagaucaagggcguggagcugaagagcggcuacaaggacuggauccuguggaucagcuucgccaucagcugcuuccugcugugcguggcccugcugggcuucaucaugugggccugccagaagggcaacaucagaugcaacaucugcaucuga

SEQ ID NO: 172905 - RNA, 1701 nt, Artificial Sequence
  derived and/or modified CDS sequence (opt4) from hemagglutinin__InfluenzaA__AJJ98873
augaagaccaucaucgcccugagcuacagccugugccugguguucgcccagaagcugcccggcaacgacaacagcaccgccacccugugccugggccaccacgccgugcccaacggcaccaucgugaagaccaucaccaacgaccagaucgaggugaccaacgccaccgagcuggugcagagcagcagcaccggcgagaucugcgacagcccccaccagauccuggacggcgagaacugcacccugaucgacgcccugcugggcgacccccagugcgacggcuuccagaacaagaagugggaccuguucguggagagaagcaaggccuacagcaacugcuaccccuacgacgugcccgacuacgccagccugagaagccugguggccagcagcggcacccuggaguucaacaacgagagcuucaacuggaccggcgugacccagaacggcaccagcagcgccugcaucagaaagagcaacaacagcuucuucagcagacugaacuggcugacccaccugaaguucaaguaccccgcccugaacgugaccaugcccaacaacgagcaguucgacaagcuguacaucuggggcgugcaccaccccggcaccgacaacgaccagaucuuccuguacgcccaggccagcggcagaaucaccgugagcaccaagagaagccagcagaccgugauccccaacaucggcagcagacccagagugagaaacauccccagcagaaucagcaucuacuggaccaucgugaagcccggcgacauccugcugaucaacagcaccggcaaccugaucgcccccagaggcuacuucaagaucagaagcggcaagagcagcaucaugagaagcgacgcccccaucggcaagugcaacagcgagugcaucacccccaacggcagcauccccaacgacaagcccuuccagaacgugaacagaaucaccuacggcgccugccccagauacgugaagcagaacacccugaagcuggccaccggcaugagaaacgugcccgagaagcagaccagaggcaucuucggcgccaucgccggcuucaucgagaacggcugggagggcaugguggacggcugguacggcuucagacaccagaacagcgagggcagaggccaggccgccgaccugaagagcacccaggccgccaucgaccagaucaacggcaagcugaacagacugaucggcaagaccaacgagaaguuccaccagaucgagaaggaguucagcgagguggagggcagaauccaggaccuggagaaguacguggaggacaccaagaucgaccuguggagcuacaacgccgagcugcugguggcccuggagaaccagcacaccaucgaccugaccgacagcgagaugaacaagcuguucgagaagaccaagaagcagcugagagagaacgccgaggacaugggcaacggcugcuucaagaucuaccacaagugcgacaacgccugcaucggcagcaucagaaacggcaccuacgaccacgacguguacagagacgaggcccugaacaacagauuccagaucaagggcguggagcugaagagcggcuacaaggacuggauccuguggaucagcuucgccaucagcugcuuccugcugugcguggcccugcugggcuucaucaugugggccugccagaagggcaacaucagaugcaacaucugcaucuga

SEQ ID NO: 172906 - RNA, 1701 nt, Artificial Sequence
  derived and/or modified CDS sequence (opt4) from hemagglutinin__InfluenzaA__AJJ98885
augaagaccaucaucgcccugagcaacauccugugccugguguucgcccagaagcugcccggcaacgacaacagcaccgccacccugugccugggccaccacgccgugcccaacggcaccaucgugaagaccaucaccaacgaccagaucgaggugaccaacgccaccgagcuggugcagagcagcagcaccggcgagaucugcgacagcccccaccagauccuggacggcgagaacugcacccugaucgacgcccugcugggcgacccccagugcgacggcuuccagaacaagaagugggaccuguucguggagagaagcaaggccuacagcaacugcuaccccuacgacgugcccgacuacgccagccugagaagccugguggccagcagcggcacccuggaguucaacaacgagagcuucaacuggaccggcgugacccagaacggcaccagcagcgccugcaucagaagaagcaacaacagcuucuucagcagacugaacuggcugacccaccugaaguucaaguaccccgcccugaacgugaccaugcccaacaaggagaaguucgacaagcuguacaucuggggcgugcaccaccccggcaccgacaacgaccagaucuuccuguacgcccaggccagcggcagaaucaccgugagcaccaagagaagccagcagaccgugauccccaacaucggcagcagacccagagugagaaacauccccagcagaaucagcaucuacuggaccaucgugaagcccggcgacauccugcugaucaacagcaccggcaaccugaucgcccccagaggcuacuucaagaucagaagcggcaagagcagcaucaugagaagcgacgcccccaucggcaagugcaacagcgagugcaucacccccaacggcagcauccccaacgacaagcccuuccagaacgugaacagaaucaccuacggcgccugccccagauacgugaagcagaacacccugaagcuggccaccggcaugagaaacgugcccgagaagcagaccagaggcaucuucggcgccaucgccggcuucaucgagaacggcugggagggcaugguggacggcugguacggcuucagacaccagaacagcgagggcaucggccaggccgccgaccugaagagcacccaggccgccaucgaccagaucaacggcaagcugaacagacugaucggcaagaccaacgagaaguuccaccagaucgagaaggaguucagcgagguggagggcagaauccaggaccuggagaaguacguggaggacaccaagaucgaccuguggagcuacaacgccgagcugcugguggcccuggagaaccagcacaccaucgaccugaccgacagcgagaugaacaagcuguucgagaagaccaagaagcagcugagagagaacgccgaggacaugggcaacggcugcuucaagaucuaccacaagugcgacaacgccugcaucggcagcaucagaaacggcaccuacgaccacgacguguacagagacgaggcccugaacaacagauuccagaucaagggcguggagcugaagagcggcuacaaggacuggauccuguggaucagcuucgccaucagcugcuuccugcugugcguggcccugcugggcuucaucaugugggccugccagaagggcaacaucagaugcaacaucugcaucuga

SEQ ID NO: 172907 - RNA, 1701 nt, Artificial Sequence
  derived and/or modified CDS sequence (opt4) from hemagglutinin__InfluenzaA__AJJ98897
augaagaccaucaucgcccugagcuacauccugugccugguguucgcccagaagcugcccggcaacgacaacagcaccgccacccugugccugggccaccacgccgugcccaacggcaccaucgugaagaccaucaccaacgaccagaucgaggugaccaacgccaccgagcuggugcagagcagcagcaccggcgagaucugcgacagcccccaccagauccuggacggcgagaacugcacccugaucgacgcccugcugggcgacccccagugcgacggcuuccagaacaagaagugggaccuguucguggagagaagcaaggccuacagcaacugcuaccccuacgacgugcccgacuacgccagccugagaagccugguggccagcagcggcacccuggaguucaacaacgagagcuucaacuggaccggcgugacccagaacggcaccagcagcgccugcaucagaagaagcaacagcagcuucuucagcagacugaacuggcugacccaccugaaguucaaguaccccgcccugaacgugaccaugcccaacaacgagaaguucgacaagcuguacaucuggggcgugcaccaccccggcaccgacaacgaccagaucuuccuguacgcccaggccagcggcagaaucaccgugagcaccaagagaagccagcagaccgugauccccaacaucggcagcagacccagagugagaaacauccccagcagaaucagcaucuacuggaccaucgugaagcccggcgacauccugcugaucaacagcaccggcaaccugaucgcccccagaggcuacuucaagaucagaagcggcaagagcagcaucaugagaagcgacgcccccaucggcaagugcaacagcgagugcaucacccccaacggcagcauccccaacgacaagcccuuccagaacgugaacagaaucaccuacggcgccugccccagauacgugaagcagaacacccugaagcuggccaccggcaugagaaacgugcccgagaagcagaccagaggcaucuucggcgccaucgccggcuucaucgagaacggcugggagggcaugguggacggcugguacggcuucagacaccagaacagcgagggcaucggccaggccgccgaccugaagagcacccaggccgccaucgaccagaucaacggcaagcugaacagacugaucggcaagaccaacgagaaguuccaccagaucgagaaggaguucagcgagguggagggcagaauccaggaccuggagaaguacguggaggacaccaagguggaccuguggagcuacaacgccgagcugcugguggcccuggagaaccagcacaccaucgaccugaccgacagcgagaugaacaagcuguucgagaagaccaagaagcagcugagagagaacgccgaggacaugggcaacggcugcuucaagaucuaccacaagugcgacaacgccugcaucggcagcaucagaaacggcaccuacgaccacgacguguacagagacgaggcccugaacaacagauuccagaucaagggcguggagcugaagagcggcuacaaggacuggauccuguggaucagcuucgccaucagcugcuuccugcugugcguggcccugcugggcuucaucaugugggccugccagaagggcaacaucagaugcaacaucugcaucuga

SEQ ID NO: 172908 - RNA, 1701 nt, Artificial Sequence; identical to SEQ ID NO: 171830
  derived and/or modified CDS sequence (opt4) from hemagglutinin__InfluenzaA__AJJ98909

SEQ ID NO: 172909 - RNA, 1701 nt, Artificial Sequence
  derived and/or modified CDS sequence (opt4) from hemagglutinin__InfluenzaA__AJJ98921
augaagaccaucaucgcccugagcuacauccugugccugguguucgcccagaagcugcccggcaaggacaacagcaccgccacccugugccugggccaccacgccgugcccaacggcaccaucgugaagaccaucaccaacgaccagaucgaggugaccaacgccaccgagcuggugcagagcagcagcaccggcgagaucugcaacagcccccaccagauccuggacggcgagaacugcacccugaucgacgcccugcugggcgacccccagugcgacggcuuccagaacaagaagugggaccuguucguggagagaagcaaggccuacagcaacugcuaccccuacgacgugcccgacuacgccagccugagaagccugguggccagcagcggcacccuggaguucaacaacgagagcuucaacuggaccggcgugaagcagaacggcaccagcagcgccugcaucagaagaagcaacagcagcuucuucagcagacugaacuggcugacccaccugaacuucaaguaccccgcccugaacgugaccaugcccaacaacgagcaguucgacaagcuguacaucuggggcgugcaccaccccggcaccgacaaggaccagaucuuccuguacgcccagagcagcggcagaaucaccgugagcaccaagagaagccagcaggccgugauccccaacaucggcagcagacccagaaucagaaacauccccagcagaaucagcaucuacuggaccaucgugaagcccggcgacauccugcugaucaacagcaccggcaaccugaucgcccccagaggcuacuucaagaucagaagcggcaagagcagcaucaugagaagcgacgcccccaucggcaagugcaacagcgagugcaucacccccaacggcagcauccccaacgacaagcccuuccagaacgugaacagaaucaccuacggcgccugccccagauacgugaagcagagcacccugaagcuggccaccggcaugagaaacgugcccgagaagcagaccagaggcaucuucggcgccaucgccggcuucaucgagaacggcugggagggcaugguggacggcugguacggcuucagacaccagaacagcgagggcagaggccaggccgccgaccugaagagcacccaggccgccaucgaccagaucaacggcaagcugaacagacugaucggcaagaccaacgagaaguuccaccagaucgagaaggaguucagcgagguggagggcagaauccaggaccuggagaaguacguggaggacaccaagaucgaccuguggagcuacaacgccgagcugcugguggcccuggagaaccagcacaccaucgaccugaccgacagcgagaugaacaagcuguucgagaagaccaagaagcagcugagagagaacgccgaggacaugggcaacggcugcuucaagaucuaccacaagugcgacaacgccugcaucggcagcaucagaaacggcaccuacaaccacgacguguacagagacgaggcccugaacaacagauuccagaucaagggcguggagcugaagagcggcuacaaggacuggauccuguggaucagcuucgccaucagcugcuuccugcugugcguggcccugcugggcuucaucaugugggccugccagaagggcaacaucagaugcaacaucugcaucuga

SEQ ID NO: 172910 - RNA, 1701 nt, Artificial Sequence; identical to SEQ ID NO: 169513
  derived and/or modified CDS sequence (opt4) from hemagglutinin__InfluenzaA__AJJ98933

SEQ ID NO: 172911 - RNA, 1701 nt, Artificial Sequence; identical to SEQ ID NO: 167042
  derived and/or modified CDS sequence (opt4) from hemagglutinin__InfluenzaA__AJJ98945

SEQ ID NO: 172912 - RNA, 1701 nt, Artificial Sequence
  derived and/or modified CDS sequence (opt4) from hemagglutinin__InfluenzaA__AJJ98957
augaagaccaucaucgcccugagcuacauccugugccugguguucgcccagaagcugcccggcaacgacaacagcaccgccacccugugccugggccaccacgccgugcccaacggcaccaucgugaagaccaucaccaacgaccagaucgaggugaccaacgccaccgagcuggugcagagcagcagcaccggcgagaucugcgacagcccccaccagauccuggacggcgagaacugcacccugaucgacgcccugcugggcgacccccagugcgacggcuuccagaacaagaagugggaccuguucguggagagaagcaaggccuacagcaacugcuaccccuacgacgugcccgacuacgccagccugagaagccugguggccagcagcggcacccuggaguucaacaacgagagcuucaacuggaccggcgugacccagaacggcaccagcagcgccugcaucagaagaagcaacaacagcuucuucagcagacugaacuggcugacccacagcaaguucaaguaccccgcccugaacgugaccaugcccaacaacgagcaguucgacaagcuguacaucuggggcgugcaccaccccggcaccgacaacgaccagaucuuccuguacgcccaggccagcggcagaaucaccgugagcaccaagagaagccagcagaccgugauccccaacaucggcagcagacccagagugagaaacauccccagcagaaucagcaucuacuggaccaucgugaagcccggcgacauccugcugaucaacagcaccggcaaccugaucgcccccagaggcuacuucaagaucagaagcggcaagagcagcaucaugagaagcgacgcccccaucggcaagugcaacagcgagugcaucacccccaacggcagcauccccaacgacaagcccuuccagaacgugaacagaaucaccuacggcgccugccccagauacgugaagcagaacacccugaagcuggccaccggcaugagaaacgugcccgagaagcagaccagaggcaucuucggcgccaucgccggcuucaucgagaacggcugggagggcaugguggacggcugguacggcuucagacaccagaacagcgagggcagaggccaggccgccgaccugaagagcacccaggccgccaucgaccagaucaacggcaagcugaacagacugaucggcaagaccaacgagaaguuccaccagaucgagaaggaguucagcgagguggagggcagaauccaggaccuggagaaguacguggaggacaccaagaucgaccuguggagcuacaacgccgagcugcugguggcccuggagaaccagcacaccaucgaccugaccgacagcgagaugaacaagcuguucgagaagaccaagaagcagcugagagagaacgccgaggacaugggcaacggcugcuucaagaucuaccacaagugcgacaacgccugcaucggcagcaucagaaacggcaccuacgaccacgacguguacagagacgaggcccugaacaacagauuccagaucaagggcguggagcugaagagcggcuacaaggacuggauccuguggaucagcuucgccaucagcugcuuccugcugugcguggcccugcugggcuucaucaugugggccugccagaagggcaacaucagaugcaacaucugcaucuga

SEQ ID NO: 172913 - RNA, 1701 nt, Artificial Sequence; identical to SEQ ID NO: 162494
  derived and/or modified CDS sequence (opt4) from hemagglutinin__InfluenzaA__AJJ98969

SEQ ID NO: 172914 - RNA, 1701 nt, Artificial Sequence
  derived and/or modified CDS sequence (opt4) from hemagglutinin__InfluenzaA__AJJ98981
augaagaccaucaucgcccugagcuacauccugugccugguguucgcccagaagcugcccggcaacgacaacagcaccgccacccugugccugggccaccacgccgugcccaacggcaccaucgugaagaccaucaccaacgacagaaucgaggugaccaacgccaccgagcuggugcagaacagcagcaucggcgagaucugcgacagcccccaccacauccuggacggcgagaacugcacccugaucgacgcccugcugggcgacccccagugcgacggcuuccagaacaagaagugggaccuguucguggagagaagcaaggccuacagcaacugcuaccccuacgacgugcccgacuacgccagccugagaagccugguggccagcagcggcacccuggaguucaacaacgagagcuucaacuggaccggcgugacccagaacggcaccagcagcgccugcaucagaagaagcaacagcagcuucuucagcagacugaacuggcugacccaccugaacuucaaguaccccgcccugaacgugaccaugcccaacaacgagcaguucgacaagcuguacaucuggggcgugcaccaccccggcaccgacaaggaccagaucuuccuguacgcccagagcagcggcagaaucaccgugagcaccaagagaagccagcaggccgugauccccaacaucggcagcagacccagaaucagaaacgugcccagcagaaucagcaucuacuggaccaucgugaagcccggcgacauccugcugaucaacagcaccggcaaccugaucgcccccagaggcuacuucaagaucagaagcggcaagagcagcaucaugagaagcgacgcccccaucggcaagugcaagagcgagugcaucacccccaacggcagcauccccaacgacaagcccuuccagaacgugaacagaaucaccuacggcgccugccccagauacgugaagcagagcacccugaagcuggccaccggcaugagaaacgugcccgagaagcagaccagaggcaucuucggcgccaucgccggcuucaucgagaacggcugggagggcaugguggacggcugguacggcuucagacaccagaacagcgagggcagaggccaggccgccgaccugaagagcacccaggccgccaucgaccagaucaacggcaagcugaacagacugaucggcaagaccaacgagaaguuccaccagaucgagaaggaguucagcgagguggagggcagaauccaggaccuggagaaguacguggaggacaccaagaucgaccuguggagcuacaacgccgagcugcugguggcccuggagaaccagcacaccaucgaccugaccgacagcgagaugaacaagcuguucgagaagaccaagaagcagcugagagagaacgccgaggacaugggcaacggcugcuucaagaucuaccacaagugcgacaacgccugcaucggcagcaucagaaacggcaccuacgaccacaacguguacagagacgaggcccugaacaacagauuccagaucaagggcguggagcugaagagcggcuacaaggacuggauccuguggaucagcuucgccaucagcugcuuccugcugugcguggcccugcugggcuucaucaugugggccugccagaagggcaacaucagaugcaacaucugcaucuga

SEQ ID NO: 172915 - RNA, 1701 nt, Artificial Sequence
  derived and/or modified CDS sequence (opt4) from hemagglutinin__InfluenzaA__AJJ98993
augaagaccaucaucgcccugagcuacauccugugccugguguucgcccagaagcugcccggcaacgacaacagcaccgccacccugugccugggccaccacgccgugcccaacggcaccaucgugaagaccaucaccaacgaccagaucgaggugaccaacgccaccgagcuggugcagaacagcagcaucggcgagaucugcgacaacccccaccagauccuggacggcgagaacugcacccugaucgacgcccugcugggcgacccccagugcgacggcuuccagaacaagaagugggaccuguucguggagagaagcaaggccuacagcaacugcuaccccuacgacgugcccgacuacgccagccugagaagccugguggccagcagcggcacccuggaguucaacaacgagagcuucaacuggaccggcgugacccagaacggcaccagcagcgccugcaugagaagaagcaacagcagcuucuucagcagacugaacuggcugacccaccugaacuucaaguaccccgcccugaacgugaccaugcccaacaacgagcaguucgacaagcuguacaucuggggcgugcaccaccccggcaccgacaaggaccagaucuuccuguacgcccagagcagcggcagaaucaccgugagcaccaagagaagccagcaggccgugauccccaacaucggcagcagacccagaaucagaaacauccccagcagaaucagcaucuacuggaccaucgugaagcccggcgacauccugcugaucaacagcaccggcaaccugaucgcccccagaggcuacuucaagaucagaagcggcaagagcagcaucaugagaagcgacgcccccaucggcaagugcaacagcgagugcaucacccccaacggcagcauccccaacgacaagcccuuccagaacgugaacagaaucaccuacggcgccugccccagauacgugaagcagagcacccugaagcuggccaccggcaugagaaacgugcccgagaagcagaccagaggcaucuucggcgccaucgccggcuucaucgagaacggcugggagggcaugguggacggcugguacggcuucagacaccagaacagcgagggcagaggccaggccgccgaccugaagagcacccaggccgccaucgaccagaucaacggcaagcugaacagacugaucggcaagaccaacgagaaguuccaccagaucgagaaggaguucagcgagguggagggcagaauccaggaccuggagaaguacguggaggacaccaagaucgaccuguggagcuacaacgccgagcugcugguggcccuggagaaccagcacaccaucgaccugaccgacagcgagaugaacaagcuguucgagaagaccaagaagcagcugagagagaacgccgaggacaugggcaacggcugcuucaagaucuaccacaagugcgacaacgccugcaucggcagcaucagaaacggcaccuacgaccacgacguguacagagacgaggcccugaacaacagauuccagaucaagggcguggagcugaagagcggcuacaaggacuggauccuguggaucagcuucgccaucagcugcuuccugcugugcguggcccugcugggcuucaucaugugggccugccagaagggcaacaucagaugcaacaucugcaucuga

SEQ ID NO: 172916 - RNA, 1701 nt, Artificial Sequence
  derived and/or modified CDS sequence (opt4) from hemagglutinin__InfluenzaA__AJJ99005
augaagaccaucaucgcccugagcuacauccugugccugguguucgcccagaagcugcccggcaacgacaacagcaccgccacccugugccugggccaccacgccgugcccaacggcaccaucgugaagaccaucaccaacgaccagaucgaggugaccaacgccaccgagcuggugcagagcagcagcaccggcgagaucugcaacagcccccaccagauccuggacggcgagaacugcacccugaucgacgcccugcugggcgacccccagugcgacggcuuccagaacaagaagugggaccuguucguggagagaagcaaggcccacagcaacugcuaccccuacgacgugcccgacuacgccagccugagaagccugguggccagcagcggcacccuggaguucaacaacgagagcuucaacuggaucggcgugacccagaacggcaccagcagcgccugcaucagaagaagcaacaacagcuucuucagcagacugaacuggcugacccaccugaacuucaaguaccccgcccugaacgugaccaugcccaacaacgagcaguucgacaagcuguacaucuggggcgugcaccaccccggcaccgacaaggaccagaucuuccuguacgcccaggccagcggcagaaucaccgugagcaccaagagaagccagcaggccgugauccccaacaucggcagcagacccagagugagaaacauccccagcagagugagcaucuacuggaccaucgugaagcccggcgacauccugcugaucaacagcaccggcaaccugaucgcccccagaggcuacuucaagaucagaagcggcaagagcagcaucaugagaagcgacgcccccaucggcaagugcaacagcgccugcaucacccccaacggcagcauccccaacgacaagcccuuccagaacgugaacagaaucaccuacggcgccugccccagauacgugaagcagaacacccugaagcuggccaccggcaugagaaacgugcccgagaagcagaccagaggcaucuucggcgccaucgccggcuucaucgagaacggcugggagggcaugguggacggcugguacggcuucagacaccagaacagcgagggcagaggccaggccgccgaccugaagagcacccaggccgccaucgaccagaucaacggcaagcugaacagacugaucggcaagaccaacgagaaguuccaccagaucgagaaggaguucagcgagguggagggcagaauccaggaccuggagaaguacguggaggacaccaagaucgaccuguggagcuacaacgccgagcugcugguggcccuggagaaccagcacaccaucgaccugaccgacagcgagaugaacaagcuguucgagaagaccaagaagcagcugagagagaacgccgaggacaugggcaacggcugcuucaagaucuaccacaagugcgacaacgccugcaucggcagcaucagaaacggcaccuacgaccacgacguguacagagacgaggcccugaacaacagauuccagaucaagggcguggagcugaagagcggcuacaaggacuggauccuguggaucagcuucgccaucagcugcuuccugcugugcguggcccugcugggcuucaucaugugggccugccagaagggcaacaucagaugcaacaucugcaucuga

SEQ ID NO: 172917 - RNA, 1701 nt, Artificial Sequence; identical to SEQ ID NO: 163471
  derived and/or modified CDS sequence (opt4) from hemagglutinin__InfluenzaA__AJJ99017

SEQ ID NO: 172918 - RNA, 1701 nt, Artificial Sequence
  derived and/or modified CDS sequence (opt4) from hemagglutinin__InfluenzaA__AJJ99029
augaagaccaucaucgcccugagcuacauccugugccugguguucgcccagaagcugcccggcaacgacaacagcaccgccacccugugccugggccaccacgccgugcccaacggcaccaucgugaagaccaucaccaacgaccagaucgaggugaccaacgccaccgagcuggugcagagcagcagcaccggcgagaucugcgacagcccccaccagauccuggacggcgagaacugcacccugaucgacgcccugcugggcgacccccagugcgacggcuuccagaacaagaagugggaccuguucaucgagagaagcaaggccuacagcaacugcuaccccuacgacgugcccgacuacgccagccugagaagccugguggccagcagcggcacccuggaguucaacaacgagagcuucaacuggaccggcgugacccagaacggcaccagcagcagcugcaucagaagaagcaacaacagcuucuucagcagacugaacuggcugacccaccugaaguucaaguaccccgcccugaacgugaccaugcccaacaacgagcaguucgacaagcuguacaucuggggcgugcaccaccccggcaccgacaacgaccagaucuuccuguacgcccaggccagcggcagaaucaccgugagcaccaagagaagccagcagaccgugauccccaacaucggcagcagacccagagugagaaacauccccagcagaaucagcaucuacuggaccaucgugaagcccggcgacauccugcugaucaacagcaccggcaaccugaucgcccccagaggcuacuucaagaucagaagcggcaagagcagcaucaugagaagcgacgcccccaucggcaagugcaacagcgagugcaucacccccaacggcagcauccccaacgacaagcccuuccagaacgugaacagaaucaccuacggcgccugccccagauacgugaagcagaacacccugaagcuggccaccggcaugagaaacgugcccgagaagcagaccagaggcaucuucggcgccaucgccggcuucaucgagaacggcugggagggcaugguggacggcugguacggcuucagacaccagaacagcgagggcagaggccaggccgccgaccugaagagcacccaggccgccaucgaccagaucaacggcaagcugaacagacugaucggcaagaccaacgagaaguuccaccagaucgagaaggaguucagcgagguggagggcagaauccaggaccuggagaaguacguggaggacaccaagaucgaccuguggagcuacaacgccgagcugcugguggcccuggagaaccagcacaccaucgaccugaccgacagcgagaugaacaagcuguucgagaagaccaagaagcagcugagagagaacgccgaggacaugggcaacggcugcuucaagaucuaccacaagugcgacaacgccugcaucggcagcaucagaaacggcaccuacgaccacaacguguacagagacgaggcccugaacaacagauuccagaucaagggcguggagcugaagagcggcuacaaggacuggauccuguggaucagcuucgccaucagcugcuuccugcugugcguggcccugcugggcuucaucaugugggccugccagaagggcaacaucagaugcaacaucugcaucuga

SEQ ID NO: 172919 - RNA, 1701 nt, Artificial Sequence
  derived and/or modified CDS sequence (opt4) from hemagglutinin__InfluenzaA__AJJ99041
augaagaccaucaucgcccugagcuacauccugugccugguguucgcccagaagcugcccggcaacgacaacagcaccgccacccugugccugggccaccacgccgugcccaacggcaccaucgugaagaccaucaccaacgaccagaucgaggugaccaacgccaccgagcuggugcagagcagcagcaccggcgagaucugcgacagcccccaccagauccuggacggcgagaacugcacccugaucgacgcccugcugggcgacccccagugcgacggcuuccagaacaagaagugggaccuguucguggagagaagcaaggccuacagcaacugcuaccccuacgacgugcccgacuacgccagccugagaagccugguggccagcagcggcacccuggaguucaacaacgagagcuucaacuggaccggcgugacccagaacggcaccagcagcgccugcaagagaggcagcgacaacagcuucuucagcagacugaacuggcugacccaccugaaguucaaguaccccgcccugaacgugaccaugcccaacaacgagaaguucgacaagcuguacaucuggggcgugcaccaccccggcaccgacaacgaccagaucuuccccuacgcccaggccagcggcagaaucaccgugagcaccaagagaagccagcagaccgugauccccaacaucggcagcagacccagagugagaaacauccccagcagaaucagcaucuacuggaccaucgugaagcccggcgacauccugcugaucaacagcaccggcaaccugaucgcccccagaggcuacuucaagaucagaagcggcaagagcagcaucaugagaagcgacgcccccaucggcaagugcaacagcggcugcaucacccccaacggcagcauccccaacgacaagcccuuccagaacgugaacagaaucaccuacggcgccugccccagauacgugaagcagagcacccugaagcuggccaccggcaugagaaacgugcccgagaagcagaccagaggcaucuucggcgccaucgccggcuucaucgagaacggcugggagggcaugguggacggcugguacggcuucagacaccagaacagcgagggcaucggccaggccgccgaccugaagagcacccaggccgccaucaaccagaucaacggcaagcugaacagacugaucggcaagaccaacgagaaguuccaccagaucgagaaggaguucagcgagguggagggcagaauccaggaccuggagaaguacguggaggacaccaagaucgaccuguggagcuacaacgccgagcugcugguggcccuggagaaccagcacaccaucgaccugaccgacagcgagaugaacaagcuguucgagagaaccaagaagcagcugagagagaacgccgaggacaugggcaacggcugcuucaagaucuaccacaagugcgacaacgccugcaucggcagcaucagaaacggcaccuacgaccacgacguguacagagacgaggcccugaacaacagauuccagaucaagggcguggagcugaagagcggcuacaaggacuggauccuguggaucagcuucgccaucagcugcuuccugcugugcguggcccugcugggcuucaucaugugggccugccagaagggcaacaucagaugcaacaucugcaucuga

SEQ ID NO: 172920 - RNA, 1701 nt, Artificial Sequence; identical to SEQ ID NO: 169918
  derived and/or modified CDS sequence (opt4) from hemagglutinin__InfluenzaA__AJJ99053

SEQ ID NO: 172921 - RNA, 1701 nt, Artificial Sequence; identical to SEQ ID NO: 169918
  derived and/or modified CDS sequence (opt4) from hemagglutinin__InfluenzaA__AJJ99065

SEQ ID NO: 172922 - RNA, 1701 nt, Artificial Sequence
  derived and/or modified CDS sequence (opt4) from hemagglutinin__InfluenzaA__AJJ99089
augaagaccaucaucgcccugagcuacauccugugccugguguucgcccagaagcugcccggcaacgacaacagcaccgccacccugugccugggccaccacgccgugcccaacggcaccaucgugaagaccaucaccaacgacagaaucgaggugaccaacgccaccgagcuggugcagaacagcagcaucggcgagaucugcgacagcccccaccagauccuggacggcgagaacugcacccugaucgacgcccugcugggcgacccccagugcgacggcuuccagaacaagaagugggaccuguucguggagagaaacaaggccuacagcaacugcuaccccuacgacgugcccgacuacgccagccugagaagccugguggccagcagcggcacccuggaguucaacaacgagagcuucaacuggaccggcgugacccagaacggcaccagcagcgccugcaucagaagaagcaacagcagcuucuucagcagacugaacuggcugacccaccugaacuucaaguaccccgcccugaacgugaccaugcccaacaacgagcaguucgacaagcuguacaucuggggcgugcaccaccccggcaccgacaaggaccagaucuuccuguacgcccagagcagcggcagaaucaccgugagcaccaagagaagccagcaggccgugauccccaacaucggcagcagacccagaaucagaaacauccccagcagaaucagcaucuacuggaccaucgugaagcccggcgacauccugcugaucaacagcaccggcaaccugaucgcccccagaggcuacuucaagaucagaagcggcaagagcagcaucaugagaagcgacgcccccaucggcaagugcaagagcgagugcaucacccccaacggcagcauccccaacgacaagcccuuccagaacgugaacagaaucaccuacggcgccugccccagauacgugaagcagagcacccugaagcuggccaccggcaugagaaacgugcccgagaagcagaccagaggcaucuucggcgccaucgccggcuucaucgagaacggcugggagggcaugguggacggcugguacggcuucagacaccagaacagcgagggcagaggccaggccgccgaccugaagagcacccaggccgccaucgaccagaucaacggcaagcugaacagacugaucggcaagaccaacgagaaguuccaccagaucgagaaggaguucagcgagguggagggcagaauccaggaccuggagaaguacguggaggacaccaagaucgaccuguggagcuacaacgccgagcugcugguggcccuggagaaccagcacaccaucgaccugaccgacagcgagaugaacaagcuguucgagaagaccaagaagcagcugagagagaacgccgaggacaugggcaacggcugcuucaagaucuaccacaagugcgacaacgccugcaucggcagcaucagaaacggcaccuacgaccacgacguguacagagacgaggcccugaacaacagauuccagaucaagggcguggagcugaagagcggcuacaaggacuggauccuguggaucagcuucgccaucagcugcuuccugcugugcguggcccugcugggcuucaucaugugggccugccagaagggcaacaucagaugcaacaucugcaucuga

SEQ ID NO: 172923 - RNA, 1701 nt, Artificial Sequence; identical to SEQ ID NO: 169608
  derived and/or modified CDS sequence (opt4) from hemagglutinin__InfluenzaA__AJJ99101

SEQ ID NO: 172924 - RNA, 1701 nt, Artificial Sequence; identical to SEQ ID NO: 169513
  derived and/or modified CDS sequence (opt4) from hemagglutinin__InfluenzaA__AJJ99113

SEQ ID NO: 172925 - RNA, 1701 nt, Artificial Sequence
  derived and/or modified CDS sequence (opt4) from hemagglutinin__InfluenzaA__AJJ99125
augaagaccaucaucgcccugagcuacauccugugcaugguguucgcccagaagcugcccggcaacgacaacagcaccgccacccugugccugggccaccacgccgugcccaacggcaccaucgugaagaccaucaccaacgaccagaucgaggugaccaacgccaccgagcuggugcagagcagcagcaccggcgagaucugcaacagcccccaccagauccuggacggcgagaacugcacccugaucgacgcccugcugggcgacccccagugcgacggcuuccagaacaagaagugggaccuguucguggagagaagcaaggcccacagcaacugcuaccccuacgacgugcccgacuacgccagccugagaagccugguggccagcagcggcacccuggaguucaacaacgagagcuucaacuggaccggcgugacccagaacggcaccagcagcgccugcaucagaagaagcagcaacagcuucuucagcagacugaacuggcugacccaccugaacuucaaguaccccgcccugaacgugaccaugcccaacaacgagcaguucgacaagcuguacaucuggggcgugcaccaccccggcaccgacaaggaccagaucuuccuguacgcccaggccagcggcagaaucaccgugagcaccaagagaagccagcaggccgugauccccaacaucggcagcagacccagagugagaaacauccccagcagagugagcaucuacuggaccaucgugaagcccggcgacauccugcugaucaacagcaccggcaaccugaucgcccccagaggcuacuucaagaucagaagcggcaagagcagcaucaugagaagcgacgcccccaucggcaagugcaacagcgccugcaucacccccaacggcagcauccccaacgacaagcccuuccagaacgugaacagaaucaccuacggcgccugccccagauacgugaagcagaacacccugaagcuggccaccggcaugagaaacgugcccgagaagcagaccagaggcaucuucggcgccaucgccggcuucaucgagaacggcugggagggcaugguggacggcugguacggcuucagacaccagaacagcgagggcagaggccaggccgccgaccugaagagcacccaggccgccaucgaccagaucaacggcaagcugaacagacugaucggcaagaccaacgagaaguuccaccagaucgagaaggaguucagcgagguggagggcagaauccaggaccuggagaaguacguggaggacaccaagaucgaccuguggagcuacaacgccgagcugcugguggcccuggagaaccagcacaccaucgaccugaccgacagcgagaugaacaagcuguucgagaagaccaagaagcagcugagagagaacgccgaggacaugggcaacggcugcuucaagaucuaccacaagugcgacaacgccugcaucggcagcaucagaaacggcaccuacgaccacgacguguacagagacgaggcccugaacaacagauuccagaucaagggcguggagcugaagagcggcuacaaggacuggauccuguggaucagcuucgccaucagcugcuuccugcugugcguggcccugcugggcuucaucaugugggccugccagaagggcaacaucagaugcaacaucugcaucuga

SEQ ID NO: 172926 - RNA, 1701 nt, Artificial Sequence
  derived and/or modified CDS sequence (opt4) from hemagglutinin__InfluenzaA__AJJ99137
augaagaccaucaucgcccugagcuacauccugugccugguguucgcccagaagcugcccggcaacgacaacagcaccgccacccugugccugggccaccacgccgugcccaacggcaccaucgugaagaccaucaccaacgaccagaucgaggugaccaacgccaccgagcuggugcagagcagcagcaccggcgagaucugcaacagcccccaccagauccuggacggcgagaacugcacccugaucgacgcccugcugggcgacccccagugcgacggcuuccagaacaagaagugggaccuguucguggagagaagcaaggcccacagcaacugcuaccccuacgacgugcccgacuacgccagccugagaagccugguggccagcagcggcacccuggaguucaacaacgagagcuucaacuggaccggcgugacccagaacggcaccagcagcgccugcaucagaagaagcaacaacagcuucuucagcagacugaacuggcugacccaccugaacuucaaguaccccgcccugaacgugaccaugcccaacaacgagcaguucgacaagcuguacaucuggggcgugcaccaccccggcaccgacaaggaccagaucuuccuguacgcccaggccagcggcagaaucaccgugagcaccaagagaagccagcaggccgugauccccaacaucggcagcagacccagagugagaaacauccccagcagagugagcaucuacuggaccaucgugaagcccggcgacauccugcugaucaacagcaccggcaaccugaucgcccccagaggcuacuucaagaucagaagcggcaagagcagcaucaugagaagcgacgcccccaucggcaagugcaacagcgccugcaucacccccaacggcagcauccccaacgacaagcccuuccagaacgugaacagaaucaccuacggcgccugccccagauacgugaagcagaacacccugaagcuggccaccggcaugagaaacgugcccgagaagcagaccagaggcaucuucggcgccaucgccggcuucaucgagaacggcugggagggcaugguggacggcugguacggcuucagacaccagaacagcgagggcagaggccaggccgccgaccugaagagcacccaggccgccaucgaccagaucaacggcaagcugaacagacugaucggcaagaccaacgagaaguuccaccagaucgagaaggaguucagcgagguggagggcagaauccaggaccuggagaaguacguggaggacaccaagaucgaccuguggagcuacaacgccgagcugcugguggcccuggagaaccagcacaccaucgaccugaccgacagcgagaugaacaagcuguucgagaagaccaagaagcagcugagagagaacgccgaggacaugggcaacggcugcuucaagaucuaccacaagugcgacaacgccugcaucgugagcaucagaaacggcaccuacgaccacgacguguacagagacgaggcccugaacaacagauuccagaucaagggcguggagcugaagagcggcuacaaggacuggauccuguggaucagcuucgccaucagcugcuuccugcugugcguggcccugcugggcuucaucaugugggccugccagaagggcaacaucagaugcaacaucugcaucuga

SEQ ID NO: 172927 - RNA, 1701 nt, Artificial Sequence
  derived and/or modified CDS sequence (opt4) from hemagglutinin__InfluenzaA__AJJ99149
augaagaccaucaucgcccugagcuacauccugugccugguguucgcccagaaguuccccggcaacgacaacagcaccgccacccugugccugggccaccacgccgugcccaacggcaccaucgugaagaccaucaccaacgaccagaucgaggugaccaacgccaccgagcuggugcagagcagcagcaccggcgagaucugcgacagcccccaccagauccuggacggcaagaacugcacccugaucgacgcccugcugggcgacccccagugcgacggcuuccagaacaagaagugggaccuguucguggagagaagcaaggccuacagcaacugcuaccccuacgacaugcccgacuacgccagccugagaagccugguggccagcagcggcacccuggaguucaacaacgagagcuucaacuggaccggcgugacccagaacggcaccagcagcgccugcaucagaagaagcaacagcagcuucuucagcagacugaacuggcugacccaccugaacuucaaguaccaggcccugaacgugaccaugcccaacaacgagcaguucgacaagcuguacaucuggggcgugcaccaccccggcaccgacaaggaccagaucuuccuguacgcccaggccagcggcagaaucaccgugagcaccaagagaagccagcagaccgugauccccaacaucggcagcagacccagagugagaaacauccccagcagaaucagcaucuacuggaccaucgugaagcccggcgacauccugcugaucaacagcaccggcaaccugaucgcccccagaggcuacuucaagauccagagcggcaagagcagcaucaugagaagcgacgcccccaucggcaagugcaacagcgagugcaucacccccaacggcagcauccccaacgacaagcccuuccagaacgugaacagaaucaccuacggcgccugccccagauacgugaagcagaacacccugaagcuggccaccggcaugagaaacgugcccgagaagcagaccagaggcaucuucggcgccaucgccggcuucaucgagaacggcugggagggcaugguggacggcugguacggcuucagacaccagaacagcgagggcagaggccaggccgccgaccugaagagcacccaggccgccaucgaccagaucaacggcaagcugaacagacugaucggcaagaccaacgagaaguuccaccagaucgagaaggaguucagcgagguggagggcagaauccaggaccuggagaaguacguggaggacaccaagaucgaccuguggagcuacaacgccgagcugcugguggcccuggagaaccagcacaccaucgaccugaccgacagcgagaugaacaagcuguucgagaagaccaagaagcagcugagagagaacgccgaggacaugggcaacggcugcuucaagaucuaccacaagugcgacaacgccugcaucggcagcaucagaaacggcaccuacgaccacgacguguacagagacgaggcccugaacaacagauuccagaucaagggcguggagcugaagagcggcuacaaggacuggauccuguggaucagcuucgccaucagcugcuuccugcugugcguggcccugcugggcuucaucaugugggccugccagaagggcaacaucagaugcaacaucugcaucuga

SEQ ID NO: 172928 - RNA, 1701 nt, Artificial Sequence
  derived and/or modified CDS sequence (opt4) from hemagglutinin__InfluenzaA__AJJ99161
augaagaccaucaucgcccugagcuacauccugugccugguguucgcccagaagcugcccggcaacgacaacagcaccgccacccugugccugggccaccacgccgugcccaacggcaccaucgugaagaccaucaccaacgaccagaucgaggugaccaacgccaccgagcuggugcagagcagcagcaccggcgagaucugcgacagcccccaccagauccuggacggcgagaacugcacccugaucgacgcccugcugggcgacccccagugcgacggcuuccagaacaagaagugggaccuguucguggagagaagcaaggccuacagcaacugcuaccccuacgacgugcccgacuacgccagccugagaagccugguggccagcagcggcacccuggaguucaacaacgagagcuucaacuggaccggcgugacccagaacggcaccagcagcgccugcaucagaagaagcaacaacagcuucuucagcagacugaacuggcugacccaccugaaguucaaguaccccgcccugaacgugaccaugcccaacaacgagcaguucgacaagcuguacaucuggggcgugcaccaccccggcaccgacaacgaccagaucuuccuguacgcccaggccagcggcagaaucaccgugagcaccaagagaagccagcagaccgugauccccaacaucggcagcagacccagagugagagacauccccagcagaaucagcaucuacuggaccaucgugaagcccggcgacauccugcugaucaacagcaccggcaaccugaucgcccccagaggcuacuucaagaucagaagcggcaagagcagcaucaugagaagcgacgcccccaucggcaagugcaacagcgagugcaucacccccaacggcagcauccccaacgacaagcccuuccagaacgugaacagaaucaccuacggcgccugccccagauacgugaagcagaacacccugaagcuggccaccggcaugagaaacgugcccgagaagcagaccagaggcaucuucggcgccaucgccggcuucaucgagaacggcugggagggcaugguggacggcugguacggcuucagacaccagaacagcgagggcagaggccaggccgccgaccugaagagcacccaggccgccaucgaccagaucaacggcaagcugaacagacugaucggcaagaccaacgagaaguuccaccagaucgagaaggaguucagcgagguggagggcagaauccaggaccuggagaaguacguggaggacaccaagaucgaccuguggagcuacaacgccgagcugcugguggcccuggagaaccagcacaccaucgaccugaccgacagcgagaugaacaagcuguucgagaagaccaagaagcagcugagagagaacgccgaggacaugggcaacggcugcuucaagaucuaccacaagugcgacaacgccugcaucggcagcaucagaaacggcaccuacgaccacgacguguacagagacgaggcccugaacaacagauuccagaucaagggcguggagcugaagagcggcuacaaggacuggauccuguggaucagcuucgccaucagcugcuuccugcugugcguggcccugcugggcuucaucaugugggccugccagaagggcaacaucagaugcaacaucugcaucuga

SEQ ID NO: 172929 - RNA, 1701 nt, Artificial Sequence
  derived and/or modified CDS sequence (opt4) from hemagglutinin__InfluenzaA__AJJ99173
augaagaccaucaucgcccugagcuacauccugugccugguguucgcccagaagcugcccggcaacgacaacagcaccgccacccugugccugggccaccacgccgugcccaacggcaccaucgugaagaccaucaccaacgaccagaucgaggugaccaacgccaccgagcuggugcagagcagcagcaccggcgagaucugcaacagcccccaccagauccuggacggcgagaacugcacccugaucgacgcccugcugggcgacccccagugcgacggcuuccagaacaagaagugggaccuguucguggagagaagcaaggccuacagcaacugcuaccccuacgacgugcccgacuacgccagccugagaagccugguggccagcagcggcacccuggaguucaacaacgagagcuucaacuggaccggcgugacccagaacggcaccagcagcgccugcaucagaagaagcaacagcagcuucuucagcagacugaacuggcugacccaccugaaguucaaguaccccgcccugaacgugaccaugcccaacaacgagcaguucgacaagcuguacaucuggggcgugcaccaccccggcaccgacaacgaccagaucuuccuguacgcccaggccagcggcagaaucaccgugagcaccaagagaagccagcagaccgugauccccaacaucggcagcagacccagagugagaaacauccccagcagaaucagcaucuacuggaccaucgugaagcccggcgacauccugcugaucaacagcaccggcaaccugaucgcccccagaggcuacuucaagaucagaagcggcaagagcagcaucaugagaagcgacgcccccaucggcaagugcaacagcgagugcaucacccccaacggcagcauccccaacgacaagcccuuccagaacgugaacagaaucaccuacggcgccugccccagauacgugaagcagaacacccugaagcuggccaccggcaugagaaacgugcccgagaagcagaccagaggcaucuucggcgccaucgccggcuucaucgagaacggcugggagggcaugguggacggcugguacggcuucagacaccagaacagcgagggcagaggccaggccgccgaccugaagagcacccaggccgccaucgaccagaucaacggcaagcugaacagacugaucggcaagaccaacgagaaguuccaccagaucgagaaggaguucagcgagguggagggcagaauccaggaccuggagaaguacguggaggacaccaagaucgaccuguggagcuacaacgccgagcugcugguggcccuggagaaccagcacaccaucgaccugaccgacagcgagaugaacaagcuguucgagaagaccaagaagcagcugagagagaacgccgaggacaugggcaacggcugcuucagaaucuaccacaagugcgacaacgccugcaucggcagcaucagaaacggcaccuacgaccacgacguguacagagacgaggcccugaacaacagauuccagaucaagggcguggagcugaagagcggcuacaaggacuggauccuguggaucagcuucgccaucagcugcuuccugcugugcguggcccugcugggcuucaucaugugggccugccagaagggcaacaucagaugcaacaucugcaucuga

SEQ ID NO: 172930 - RNA, 1701 nt, Artificial Sequence
  derived and/or modified CDS sequence (opt4) from hemagglutinin__InfluenzaA__AJJ99185
augaagaccaucaucgcccugagcuacauccugugccugguguucgcccagaagcugcccggcaacgacaacagcaccgccacccugugccugggccaccacgccgugcccaacggcaccaucgugaagaccaucaccaacgaccagaucgaggugaccaacgccaccgagcuggugcagagcagcagcaccggcgagaucugcgacagcccccaccagauccuggacggcgagaacugcacccugaucgacgcccugcugggcgacccccagugcgacggcuuccagaacaagaagugggaccuguucguggagagaagcaaggccuacagcaacugcuaccccuacgacgugcccgacuacgccagccugagaagccugguggccagcagcggcacccuggaguucaacaacgagagcuucaacuggaccggcgugacccagaacggcaccagcagcgccugcaucagaaagagcaacaacagcuucuucagcagacugaacuggcugacccaccugaaguucaaguaccccgcccugaacgugaccaugcccaacaacgagcaguucgacaagcuguacaucuggggcgugcaccaccccggcaccgacaacgaccagaucuuccuguacgcccaggccagcggcagaaucaccgugagcaccaagagaagccagcagaccgugauccccaacaucggcagcagacccagagugagaaacauccccagcagaaucagcaucuacuggaccaucgugaagcccggcgacauccugcugaucaacagcaccggcaaccugaucgcccccagaggcuacuucaagaucagaagcggcaagagcagcaucaugagagccgacgcccccaucggcaagugcaacagcgagugcaucacccccaacggcagcauccccaacgacaagcccuuccagaacgugaacagaaucaccuacggcgccugccccagauacgugaagcagaacacccugaagcuggccaccggcaugagaaacgugcccgagaagcagaccagaggcaucuucggcgccaucgccggcuucaucgagaacggcugggagggcaugguggacggcugguacggcuucagacaccagaacagcgagggcagaggccaggccgccgaccugaagagcacccaggccgccaucgaccagaucaacggcaagcugaacagacugaucggcaagaccaacgagaaguuccaccagaucgagaaggaguucagcgagguggagggcagaauccaggaccuggagaaguacguggaggacaccaagaucgaccuguggagcuacaacgccgagcugcugguggcccuggagaaccagcacaccaucgaccugaccgacagcgagaugaacaagcuguucgagaagaccaagaagcagcugagagagaacgccgaggacaugggcaacggcugcuucaagaucuaccacaagugcgacaacgccugcaucggcagcaucagaaacggcaccuacgaccacgacguguacagagacgaggcccugaacaacagauuccagaucaagggcguggagcugaagagcggcuacaaggacuggauccuguggaucagcuucgccaucagcugcuuccugcugugcguggcccugcugggcuucaucaugugggccugccagaagggcaacaucagaugcaacaucugcaucuga

SEQ ID NO: 172931 - RNA, 1701 nt, Artificial Sequence; identical to SEQ ID NO: 168868
  derived and/or modified CDS sequence (opt4) from hemagglutinin__InfluenzaA__AJJ99197

SEQ ID NO: 172932 - RNA, 1701 nt, Artificial Sequence
  derived and/or modified CDS sequence (opt4) from hemagglutinin__InfluenzaA__AJJ99209
augaagaccaucaucgcccugagcuacauccugugccugguguucgcccagaagcugcccggcaacgacaacagcaccgccacccugugccugggccaccacgccgugcccaacggcaccaucgugaagaccaucaccaacgaccagaucgaggugaccaacgccaccgagcuggugcagagcagcagcaccggcggcaucugcgacagcccccaccagauccuggacggcgagaacugcacccugaucgacgcccugcugggcgacccccagugcgacggcuuccagaacaagaagugggaccuguucguggagagaagcaaggccuacagcaacugcuaccccuacgacgugcccgacuacgccagccugagaagccugguggccagcagcggcacccuggaguucaacaacgagagcuucaacuggaccggcgugacccagaacggcaccagcagcgccugcaagagaaagagcgacaacagcuucuucagcagacugaacuggcugacccaccugaaguucaaguaccccgcccugaacgugaccaugcccaacaacgaggaguucgacaagcuguacaucuggggcgugcaccaccccggcaccgacaacgaccagaucuuccuguacgcccaggccagcggcagaaucaccgugagcaccaagagaagccagcagaccgugauccccaacaucggcagcagacccagagugagaaacauccccagcagaaucagcaucuacuggaccaucgugaagcccggcgacauccugcugaucaacagcaccggcaaccugaucgcccccagaggcuacuucaagaucagaagcggcaagagcagcaucaugagaagcgacgcccccaucggcaagugcaacagcgagugcaucacccccaacggcagcauccccaacgacaagcccuuccagaacgugaacagaaucaccuacggcgccugccccagauacgugaagcagagcacccugaagcuggccaccggcaugagaaacgugcccgagaagcagaccagaggcaucuucggcgccaucgccggcuucaucgagaacggcugggagggcaugguggacggcugguacggcuucagacaccagaacagcgagggcaucggccaggccgccgaccugaagagcacccaggccgccaucaaccagaucaacggcaagcugaacagacugaucggcaagaccaacgagaaguuccaccagaucgagaaggaguucagcgagguggagggcagaauccaggaccuggagaaguacguggaggacaccaagaucgaccuguggagcuacaacgccgagcugcugguggcccuggagaaccagcacaccaucgaccugaccgacagcgagaugaacaagcuguucgagagaaccaagaagcagcugagagagaacgccgaggacaugggcaacggcugcuucaagaucuaccacaagugcgacaacgccugcaucggcagcaucagaaacggcaccuacgaccacgacguguacagagacgaggcccugaacaacagauuccagaucaagggcguggagcugaagagcggcuacaaggacuggauccuguggaucagcuucgccaugagcugcuuccugcugugcguggcccugcugggcuucaucaugugggccugccagaagggcaacaucagaugcaacaucugcaucuga

SEQ ID NO: 172933 - RNA, 1701 nt, Artificial Sequence
  derived and/or modified CDS sequence (opt4) from hemagglutinin__InfluenzaA__AJJ99221
augaagaccaucaucgcccugagcuacauccugugccugguguucgcccagaagcugcccggcaacgacaacagcaccgccacccugugccugggccaccacgccgugcccaacggcaccaucgugaagaccaucaccaacgaccagaucgaggugaccaacgccaccgagcuggugcagagcagcagcaccggcgagaucugcgacagcccccaccagauccuggacggcgagaacugcacccugaucgacgcccugcugggcgacccccagugcgacggcuuccagaacaagaagugggaccuguucguggagagaagcaaggccuacagcaacugcuaccccuacgacgugcccgacuacgccagccugagaagccugguggccagcagcggcacccuggaguucaacaacgagagcuucaacuggaccggcgugacccagaacggcaccagcagcgccugcaucagaagaagcaacagcagcuucuucagcagacugaacuggcugacccaccugaaguucaaguaccccgcccugaacgugaccaugcccaacaacgagaaguucgacaagcuguacaucuggggcgugcaccaccccggcaccgacaacgaccagaucuuccuguacgcccaggccagcggcagaaucaccgugagcaccaagagaagccagcagaccgugauccccaacaucggcagcagacccagagugagaaacauccccagcagaaucagcaucuacuggaccaucgugaagcccggcgacauccugcugaucaacagcaccggcaaccugaucgcccccagaggcuacuucaagauccagagcggcaagagcagcaucaugagaagcgacgcccccaucggcaagugcaacagcgagugcaucacccccaacggcagcauccccaacgacaagcccuuccagaacgugaacagaaucaccuacggcgccugccccagauacgugaagcagaacacccugaagcuggccaccggcaugagaaacgugcccgagaagcagaccagaggcaucuucggcgccaucgccggcuucaucgagaacggcugggagggcaugguggacggcugguacggcuucagacaccagaacagcgagggcaucggccaggccgccgaccugaagagcacccaggccgccaucgaccagaucaacggcaagcugaacagacugaucggcaagaccaacgagaaguuccaccagaucgagaaggaguucagcgagguggagggcagaauccaggaccuggagaaguacguggaggacaccaagaucgaccuguggagcuacaacgccgagcugcugguggcccuggagaaccagcacaccaucgaccugaccgacagcgagaugaacaagcuguucgagaagaccaagaagcagcugagagagaacgccgaggacaugggcaacggcugcuucaagaucuaccacaagugcgacaacgccugcaucggcagcaucagaaacggcaccuacgaccacgacguguacagagacgaggcccugaacaacagauuccagaucaagggcguggagcugaagagcggcuacaaggacuggauccuguggaucagcuucgccaucagcugcuuccugcugugcguggcccugcugggcuucaucaugugggccugccagaagggcaacaucagaugcaacaucugcaucuga

SEQ ID NO: 172934 - RNA, 1701 nt, Artificial Sequence; identical to SEQ ID NO: 161975
  derived and/or modified CDS sequence (opt4) from hemagglutinin__InfluenzaA__AJJ99233

SEQ ID NO: 172935 - RNA, 1701 nt, Artificial Sequence
  derived and/or modified CDS sequence (opt4) from hemagglutinin__InfluenzaA__AJJ99244
augaaggccauccugguggugaugcuguacaccuucgccaccgccaacgccgacacccugugcaucggcuaccacgccaacaacagcaccgacaccguggacaccgugcuggagaagaacgugaccgugacccacagcgugaaccugcuggaggacaagcacaacggcaagcugugcaagcugagaggcguggccccccugcaccugggcaagugcaacaucgccggcuggauccugggcaaccccgagugcgagagccugagcaccgccagcagcuggagcuacaucguggagaccagcggcagcgacaacggcaccugcuaccccggcgacuucaucgacuacgaggagcugagagagcagcugagcagcgugagcagcuucgagagauucgagaucuuccccaagaccagcagcuggcccaaccacgacagcaacaagggcgugaccgccgccugcccccacgccggcgccaagggcuucuacaagaaccugaucuggcuggugaagaagggcaacagcuaccccaagcugagcaagagcuacaucaacgacaagggcaaggaggugcuggugcuguggggcauccaccaccccagcaccaccgccgaccagcagagccuguaccagaacgccgacaccuacguguucgugggcaccagcagauacagcaagaaguucaagcccgagaucgccaucagacccaaggugagagaccaggagggcagaaugaacuacuacuggacccugguggagcccggcgacaagaucaccuucgaggccaccggcaaccugguggugcccagauacgccuucgccauggagagaaacgccggcagcggcaucaucaucagcgacacccccgugcacgacugcaacaccaccugccagacccccaagggcgccaucaacaccagccugcccuuccagaacauccaccccaucaccaucggcaagugccccaaguacgugaagagcaccaagcugagacuggccaccggccugagaaacgugcccagcauccagagcagaggccuguucggcgccaucgccggcuucaucgagggcggcuggaccggcaugguggacggcugguacggcuaccaccaccagaacgagcagggcagcggcuacgccgccgaccugaagagcacccagaacgccaucgacaagaucaccaacaaggugaacagcgugaucgagaagaugaacacccaguucaccgccgugggcaaggaguucaaccaccuggagaagagaaucgagaaccugaacaagaagguggacgacggcuuccuggacaucuggaccuacaacgccgagcugcuggugcugcuggagaacgagagaacccuggacuaccacgacagcaacgugaagaaccuguacgagaaggugagaaaccagcugaagaacaacgccaaggagaucggcaacggcugcuucgaguucuaccacaagugcgacaacaccugcauggagagcgugaagaacggcaccuacgacuaccccaaguacagcgaggaggccaagcugaacagagaggagaucgacggcgugaagcuggagagcaccagaaucuaccagauccuggccaucuacagcaccguggccagcagccuggugcugguggugagccugggcgccaucagcuucuggaugugcagcaacggcagccugcagugcagaaucugcaucuga

SEQ ID NO: 172936 - RNA, 1701 nt, Artificial Sequence
  derived and/or modified CDS sequence (opt4) from hemagglutinin__InfluenzaA__AJJ99255
augaaggccauccugguggugcugcuguacaccuucgccaccgccaacgccgacacccugugcaucggcuaccacgccaacaacagcaccgacaccguggacaccgugcuggagaagaacgugaccgugacccacagcgugaaccugcuggaggacaaccacaacggcaagcugugcaagcugagaggcguggccccccugcaccugggcaagugcaacaucgccggcuggauccugggcaaccccgagugcgagagccugagcaccgccagcagcuggagcuacaucguggagaccagcagcagcgacaacggcaccugcuaccccggcgacuucaucaacuacgaggagcugagagagcagcugagcagcgugagcagcuucgagagauucgagaucuuccccaagaccagcagcuggcccaaccacgacagcaacaagggcgugaccgccgccugccccagagccggcgccaagagcuucuacaagaaccugaucuggcuggugaagaagggcaacagcuaccccaagcugagcaagagcuacaucaacgacaagggcaaggaggugcuggugauguggggcauccaccaccccagcaccaccgccgaccagcagagccuguaccagaacgccgacgccuacguguucgugggcaccagcagauacagcaaggaguucaagcccgagaucgccaucagacccaaggugagagaccaggagggcagaaugaacuacuacuggacccugguggagcccggcgacaagaucaccuucgaggccaccggcaaccugcuggugcccagauacgccuucgccauggagagaaacgccggcagcggcaucaucaucagcgacacccccgugcacgacugcaacaccaccugccagacccccaagggcgccaucaacaccagccugcccuuccagaacauccaccccaucaccaucggcaagugccccaaguacgugaagagcaccaagcugagacuggccaccggccugagaaacgugcccagcauccagagcagaggccuguucggcgccaucgccggcuucaucgagggcggcuggaccggcaugguggacggcugguacggcuaccaccaccagaacgagcagggcagcggcuacgccgccgaccugaagagcacccagaacgccaucgacaagaucaccaacaaggugaacagcgugaucgagaagaugaacacccaguucaccgccgugggcaaggaguucaaccaccuggagaagagaaucgagaaccugaacaagaagguggacgacggcuuccuggacaucuggaccuacaacgccgagcugcuggugcugcuggagaacgagagaacccuggacuaccacgacagcaacgugaagaaccuguacgagaaggugagaaaccagcugaagaacaacgccaaggagaucggcaacggcugcuucgaguucuaccacaagugcgacaacaccugcauggagagcgugaagaacggcaccuacgacuaccccaaguacagcgaggaggccaagcugaacagagaggagaucgacggcgugaagcuggagagcaccagaaucuaccagauccuggccaucuacagcaccguggccagcagccuggugcugguggugagccugggcgccaucagcuucuggaugugcagcaacggcagccugcagugcagaaucugcaucuga

SEQ ID NO: 172937 - RNA, 1698 nt, Artificial Sequence
  derived and/or modified CDS sequence (opt4) from hemagglutinin__InfluenzaA__AJJ99267
augaaggugaagcugcuggugcugcugugcaccuucaccgccaccuacgccgacaccaucugcaucggcuaccacgccaacaacagcaccgacaccguggacaccgugcuggagaagaacgugaccgugacccacagcgugaaccugcuggagaacagccacaacggcaagcugugccugcugaagggcaucgccccccugcagcugggcaacugcagcguggccggcuggauccugggcaaccccgagugcgagcugcugaucagcaaggagagcuggagcuacaucguggagaagcccaaccccgagaacggcaccugcuaccccggccacuucgccgacuacgaggagcugagagagcagcugagcagcgugagcagcuucgagagauucgagaucuuccccaaggagagcagcuggcccaaccacaccaucaccggcgugagcgccagcugcagccacaacggcgagagcagcuucuacagaaaccugcuguggcugaccggcaagaacggccuguaccccaaccugagcaagagcuacgccaacaacaaggagaaggaggugcuggugcuguggggcgugcaccacccccccaacaucggcgaccagaaggcccuguaccacaccgagaacgccuacgugagcguggugagcagccacuacagcagaaaguucacccccgagaucgccaagagacccaaggugagagaccaggagggcagaaucaacuacuacuggacccugcuggagcccggcgacaccaucaucuucgaggccaacggcaaccugaucgcccccagauacgccuucgcccugagcagaggcuucggcagcggcaucaucaacagcaacgcccccauggacaagugcgacgccaagugccagaccccccagggcgccaucaacagcagccugcccuuccagaacgugcaccccgugaccaucggcgagugccccaaguacgugagaagcgccaagcugagaauggugaccggccugagaaacauccccagcauccagagcagaggccuguucggcgccaucgccggcuucaucgagggcggcuggaccggcaugguggacggcugguacggcuaccaccaccagaacgagcagggcagcggcuacgccgccgaccagaagagcacccagaacgccaucaacggcaucaccaacaaggugaacagcgugaucgagaagaugaacacccaguucaccgccgugggcaaggaguucaacaagcuggagagaagaauggagaaccugaacaagaagguggacgacggcuucaucgacaucuggaccuacaacgccgagcugcuggugcugcuggagaacgagagaacccuggacuuccacgacagcaacgugaagaaccuguacgagaaggugaagagccagcugaagaacaacgccaaggagaucggcaacggcugcuucgaguucuaccacaagugcaacgacgagugcauggagagcgugaagaacggcaccuacgacuaccccaaguacagcgaggagagcaagcugaacagagagaagaucgacggcgugaagcuggagagcaugggcguguaccagauccuggccaucuacagcaccguggccagcagccuggugcugcuggugagccugggcgccgugagcuucuggaugugcagcaacggcagccugcagugcagagugugcaucuga

SEQ ID NO: 172938 - RNA, 1701 nt, Artificial Sequence; identical to SEQ ID NO: 167110
  derived and/or modified CDS sequence (opt4) from hemagglutinin__InfluenzaA__AJJ99278

SEQ ID NO: 172939 - RNA, 1701 nt, Artificial Sequence; identical to SEQ ID NO: 167113
  derived and/or modified CDS sequence (opt4) from hemagglutinin__InfluenzaA__AJJ99289

SEQ ID NO: 172940 - RNA, 1698 nt, Artificial Sequence
  derived and/or modified CDS sequence (opt4) from hemagglutinin__InfluenzaA__AJJ99301
augaaggugaagcugcuggugcugcugugcaccuucaccgccaccuacgccgacaccaucugcaucggcuaccacgccaacaacagcaccgacaccguggacaccgugcuggagaagaacgugaccgugacccacagcgugaaccugcuggagaacagccacaacggcaagcugugccugcugaagggcaucgccccccugcagcugggcaacugcagcguggccggcuggauccugggcaaccccgagugcgagagccugaucagcaaggagagcuggagcuacaucguggagaagcccaaccccgagaacggcaccugcuaccccggccacuucgccgacuacgaggagcugagagagcagcugagcagcgugagcagcuucgagagauucgagaucuuccccaaggagagcagcuggcccaaccacaccgugaccggcgugagcgccagcugcagccacaacggcgagagcagcuucuacagaaaccugcuguggcugaccggcaagaacggccuguaccccaaccugagcaagagcuacgccaacaacaaggagaaggaggugcuggugcuguggggcgugcaccacccccccaacaucggcgaccagaaggcccuguaccacaccgagaacgccuacgugagcguggugagcagccacuacagcagaaaguucacccccgagaucgccaagagacccaaggugagagaccaggagggcagaaucaacuacuacuggacccugcuggagcccggcgacaccaucaucuucgaggccaacggcaaccugaucgcccccagauacgccuucgcccugagcagaggcuucggcagcggcaucaucaacagcaacgcccccauggacaagugcgacgccaagugccagaccccccagggcgccaucaacagcagccugcccuuccagaacgugcaccccgugaccaucggcgagugccccaaguacgugagaagcgccaagcugagaauggugaccggccugagaaacauccccagcauccagagcagaggccuguucggcgccaucgccggcuucaucgagggcggcuggaccggcaugguggacggcugguacggcuaccaccaccagaacgagcagggcagcggcuacgccgccgaccagaagagcacccagaacgccaucaacggcaucaccaacaaggugaacagcgugaucgagaagaugaacacccaguucaccgccgugggcaaggaguucaacaagcuggagagaagaauggagaaccugaacaagaagguggacgacggcuucaucgacaucuggaccuacaacgccgagcugcuggugcugcuggagaacgagagaacccuggacuuccacgacagcaacgugaagaaccuguacgagaaggugaagagccagcugaagaacaacgccaaggagaucggcaacggcugcuucgaguucuaccacaagugcaacgacgagugcauggagagcgugaagaacggcaccuacgacuaccccaaguacagcgaggagagcaagcugaacagagagaagaucgacggcgugaagcuggagagcaugggcguguaccagauccuggccaucuacagcaccguggccagcagccuggugcugcuggugagccugggcgccaucagcuucuggaugugcagcaacggcagccugcagugcagaaucugcaucuga

SEQ ID NO: 172941 - RNA, 1698 nt, Artificial Sequence
  derived and/or modified CDS sequence (opt4) from hemagglutinin__InfluenzaA__AJJ99324
augaaggugaagcugcuggugcugcugugcaccuucaccgccaccuacgccgacaccaucugcaucggcuaccacgccaacaacagcaccgacaccguggacaccgugcuggagaagaacgugaccgugacccacagcgugaaccugcuggagaacagccacaacggcaagcugugccugcugaagggcaucgccccccugcagcugggcaacugcagcguggccggcuggauccugggcaaccccgagugcgagcugcugaucagcaaggagagcuggagcuacaucguggagaagcccaaccccgagaacggcaccugcuaccccggccacuucgccgacuacgaggagcugagagagcagcugagcagcgugagcagcuucgagagauucgagaucuuccccaaggagagcagcuggcccaaccacaccgugaccggcgugagcgccagcugcagccacaacggcgagaacagcuucuacagaaaccugcuguggcugaccggcaagagcggccuguaccccaaccugagcaagagcuacgccaacaacaaggagaaggaggugcuggugcuguggggcgugcaccacccccccaacaucgccgaccagaagacccuguaccacaccgagaacgccuacgugagcguggugagcagccacuacagcagaaaguucacccccgagaucgccaagagacccaaggugagagaccaggagggcagaaucaacuacuacuggacccugcuggagcccggcgacaccaucaucuucgaggccaacggcaaccugaucgcccccagauacgccuucgcccugagcagaggcuucggcagcggcaucaucaacagcaacgcccccauggacaagugcgacgccaagugccagaccccccagggcgccaucaacagcagccugcccuuccagaacgugcaccccgugaccaucggcgagugccccaaguacgugagaagcgccaagcugagaauggugaccggccugagaaacauccccagcauccagagcagaggccuguucggcgccaucgccggcuucaucgagggcggcuggaccggcaugguggacggcugguacggcuaccaccaccagaacgagcagggcagcggcuacgccgccgaccagaagagcacccagaacgccaucaacggcaucaccaacaaggugaacagcgugaucgagaagaugaacacccaguucaccgccgugggcaaggaguucaacaagcuggagagaagaauggagaaccugaacaagaagguggacgacggcuucaucgacaucuggaccuacaacgccgagcugcuggugcugcuggagaacgagagaacccuggacuuccacgacagcaacgugaagaaccuguacgagaaggugaagagccagcugaagaacaacgccaaggagaucggcaacggcugcuucgaguucuaccacaagugcaacgacgagugcauggagagcgugaagaacggcaccuacgacuaccccaaguacagcgaggagagcaagcugaacagagagaagaucgacggcgugaagcuggagagcaugggcguguaccagauccuggccaucuacagcaccguggccagcagccuggugcugcuggugagccugggcgccaucagcuucuggaugugcagcaacggcagccugcagugcagaaucugcaucuga

SEQ ID NO: 172942 - RNA, 1701 nt, Artificial Sequence
  derived and/or modified CDS sequence (opt4) from hemagglutinin__InfluenzaA__AJJ99335
auggaggccauccugguggugcugcuguacaccuucgccaccgccaacgccgacacccugugcaucggcuaccacgccaacaacagcaccgacaccguggacaccgugcuggagaagaacgugaccgugacccacagcgugaaccugcuggaggacaagcacaacggcaagcugugcaagcugagaggcguggccccccugcaccugggcaagugcaacaucgccggcuggauccugggcaaccccgagugcgagagccugagcaccgccagcagcuggagcuacaucguggagaccagcagcagcaacaacggcaccugcuaccccggcgacuucaucgacuacgaggagcugagagagcagcugagcagcgugagcagcuucgagagauucgagaucuuccccaagaccagcagcuggcccaaccacgacagcaacaagggcgugaccgccgccugcccccacgccggcgccaagagcuucuacaagaaccugaucuggcuggugaagaagggcaacagcuaccccaagcugagcaagagcuacaucaacgacaagggcaaggaggugcuggugcuguggggcauccaccaccccagcaccagcgccgaccagcagagccuguaccagaacgccgacgccuacguguucgugggcagcagcagauacagcaagaaguucaagcccgagaucgccaucagacccaaggugagagaccaggagggcagaaugaacuacuacuggacccugguggagcccggcgacaagaucaccuucgaggccaccggcaaccugguggugcccagauacgccuucgccauggagagaaacgccggcagcggcaucaucaucagcgacacccccgugcacgacugcaacaccaccugccagacccccaacggcgccaucaacaccagccugcccuuccacaacauccaccccaucaccaucggcaagugccccaaguacgugaagagcaccaagcugagacuggccaccggccugagaaacgugcccagcauccagagcagaggccuguucggcgccaucgccggcuucaucgagggcggcuggaccggcaugguggacggcugguacggcuaccaccaccagaacgagcagggcagcggcuacgccgccgaccugaagagcacccagaacgccaucgacgagaucaccaacaaggugaacagcgugaucgagaagaugaacacccaguucaccgccgugggcaaggaguucaaccaccuggagaagagaaucgagaaccugaacaagaagguggacgacggcuuccuggacaucuggaccuacaacgccgagcugcuggugcugcuggagaacgagagaacccuggacuaccacgacagcaacgugaagaaccuguacgagaaggugagaagccagcugaagaacaacgccaaggagaucggcaacggcugcuucgaguucuaccacaagugcgacaacaccugcauggagagcgugaagaacggcaccuacgacuaccccaaguacagcgaggaggccaagcugaacagagaggagaucgacggcgugaagcuggagagcaccagaaucuaccagauccuggccaucuacagcaccguggccagcagccuggugcugguggugagccugggcgccaucagcuucuggaugugcagcaacggcagccugcagugcagaaucugcaucuga

SEQ ID NO: 172943 - RNA, 1701 nt, Artificial Sequence; identical to SEQ ID NO: 164845
  derived and/or modified CDS sequence (opt4) from hemagglutinin__InfluenzaA__AJJ99357

SEQ ID NO: 172944 - RNA, 1701 nt, Artificial Sequence; identical to SEQ ID NO: 166884
  derived and/or modified CDS sequence (opt4) from hemagglutinin__InfluenzaA__AJJ99368

SEQ ID NO: 172945 - RNA, 1701 nt, Artificial Sequence; identical to SEQ ID NO: 166495
  derived and/or modified CDS sequence (opt4) from hemagglutinin__InfluenzaA__AJJ99379

SEQ ID NO: 172946 - RNA, 1701 nt, Artificial Sequence
  derived and/or modified CDS sequence (opt4) from hemagglutinin__InfluenzaA__AJJ99390
auggaggccauccugguggugcugcuguacaccuucgccaccgccaacgccgacacccugugcaucggcuaccacgccaacaacagcaccgacaccguggacaccgugcuggagaagaacgugaccgugacccacagcgugaaccugcuggaggacaagcacaacggcaagcugugcaagcugagaggcguggccccccugcaccugggcaagugcaacaucgccggcuggauccugggcaaccccgagugcgagagccugagcaccgccagcagcuggagcuacaucguggagaccagcagcagcgacaacggcaccugcuaccccggcgacuucaucgacuacgaggagcugagagagcagcugagcagcgugagcagcuucgagagauucgagaucuuccccaagaccagcagcuggcccaaccacgacagcaacaagggcgugaccgccgccugcccccacgccggcgccaagagcuucuacaagaaccugaucuggcuggugaagaagggcaacagcuaccccaagcugagcaagagcuacaucaacgacaagggcaaggaggugcuggugcuguggggcauccaccaccccagcaccagcgccgaccagcagagccuguaccagaacgccgacgccuacguguucgugggcagcagcagauacagcaagaaguucaagcccgagaucgccaucagacccaaggugagagaccaggagggcagaaugaacuacuacuggacccugguggagcccggcgacaagaucaccuucgaggccaccggcaaccugguggugcccagauacgccuucgccauggagagaaacgccggcagcggcaucaucaucagcgacacccccgugcacgacugcaacaccaccugccagacccccaagggcgccaucaacaccagccugcccuuccacaacauccaccccaucaccaucggcaagugccccaaguacgugaagagcaccaagcugagacuggccaccggccugagaaacgugcccagcauccagagcagaggccuguucggcgccaucgccggcuucaucgagggcggcuggaccggcaugguggacggcugguacggcuaccaccaccagaacgagcagggcagcggcuacgccgccgaccugaagagcacccagaacgccaucgacaagaucaccaacaaggugaacagcgugaucgagaagaugaacacccaguucaccgccgugggcaaggaguucaaccaccuggagaagagaaucgagaaccugaacaagaagguggacgacggcuuccuggacaucuggaccuacaacgccgagcugcuggugcugcuggagaacgagagaacccuggacuaccacgacagcaacgugaagaaccuguacgagaaggugagaagccagcugaagaacaacgccaaggagaucggcaacggcugcuucgaguucuaccacaagugcgacaacaccugcauggagagcgugaagaacggcaccuacgacuaccccaaguacagcgaggaggccaagcugaacagagaggagaucgacggcgugaagcuggagagcaccagaaucuaccagauccuggccaucuacagcaccguggccagcagccuggugcugguggugagccugggcgccaucagcuucuggaugugcagcaacggcagccugcagugcagaaucugcaucuga

SEQ ID NO: 172947 - RNA, 1701 nt, Artificial Sequence; identical to SEQ ID NO: 164845
  derived and/or modified CDS sequence (opt4) from hemagglutinin__InfluenzaA__AJJ99401

SEQ ID NO: 172948 - RNA, 1698 nt, Artificial Sequence
  derived and/or modified CDS sequence (opt4) from hemagglutinin__InfluenzaA__AJJ99413
augaaggugaagcugcuggugcugcugugcaccuucaccgccaccuacgccgacaccaucugcaucggcuaccacgccaacaacagcaccgacaccguggacaccgugcuggagaagaacgugaccgugacccacagcgugaaccugcuggagaacagccacaacggcaagcugugccugcugaagggcaucgccccccugcagcugggcaacugcagcguggccggcuggauccugggcaaccccgagugcgagcugcugaucagcaaggagagcuggagcuacaucguggagaagcccaaccccgagaacggcaccugcuaccccggccacuucgccgacuacgaggagcugagagagcagcugagcagcgugagcagcuucgagagauucgagaucuuccccaaggagagcagcuggcccaaccacaccgugaccggcgugagcgccagcugcagccacaacggcgagaacagcuucuacagaaaccugcuguggcugaccggcaagaacggccuguaccccaaccugagcaagagcuacgccaacaacaaggagaaggaggugcuggugcuguggggcgugcaccacccccccaacaucgccgaccagaagacccuguaccacaccgagaacgccuacgugagcguggugagcagccacuacagcagaaaguucacccccgagaucgccaagagacccaaggugagagaccaggagggcagaaucaacuacuacuggacccugcuggagcccggcgacaccaucaucuucgaggccaacggcaaccugaucgcccccagauacgccuucgcccugagcagaggcuucggcagcggcaucaucaacagcaacgccagcauggacaagugcgacgccaagugccagaccccccagggcgccaucaacagcagccugcccuuccagaacgugcaccccgugaccaucggcgagugccccaaguacgugagaagcgccaagcugagaauggugaccggccugagaaacauccccagcauccagagcagaggccuguucggcgccaucgccggcuucaucgagggcggcuggaccggcaugguggacggcugguacggcuaccaccaccagaacgagcagggcagcggcuacgccgccgaccagaagagcacccagaacgccaucaacggcaucaccaacaaggugaacagcgugaucgagaagaugaacacccaguucaccgccgugggcaaggaguucaacaagcuggagagaagaauggagaaccugaacaagaagguggacgacggcuucaucgacaucuggaccuacaacgccgagcugcuggugcugcuggagaacgagagaacccuggacuuccacgacagcaacgugaagaaccuguacgagaaggugaagagccagcugaagaacaacgccaaggagaucggcaacggcugcuucgaguucuaccacaagugcaacgacgagugcauggagagcgugaagaacggcaccuacgacuaccccaaguacagcgaggagagcaagcugaacagagagaagaucgacggcgugaagcuggagagcaugggcguguaccagauccuggccaucuacagcaccguggccagcagccuggugcugcuggugagccugggcgccaucagcuucuggaugugcagcaacggcagccugcagugcagaaucugcaucuga

SEQ ID NO: 172949 - RNA, 1698 nt, Artificial Sequence; identical to SEQ ID NO: 163686
  derived and/or modified CDS sequence (opt4) from hemagglutinin__InfluenzaA__AJJ99425

SEQ ID NO: 172950 - RNA, 1698 nt, Artificial Sequence
  derived and/or modified CDS sequence (opt4) from hemagglutinin__InfluenzaA__AJJ99437
augaaggugaagcugcuggugcugcugugcaccuucaccgccaccuacgccgacaccaucugcaucggcuaccacgccaacaacagcaccgacaccguggacaccgugcuggagaagaacgugaccgugacccacagcgugaaccugcuggagaacagccacaacggcaagcugugccugcugaagggcaucgccccccugcagcugggcaacugcagcguggccggcuggauccugggcaaccccgagugcgagcugcugaucagcaaggagagcuggagcuacaucguggagaagcccaaccccgagaacggcaccugcuaccccggccacuucgccgacuacgaggagcugagagagcagcugagcagcgugagcagcuucgagagauucgagaucuuccccaaggagagcagcuggcccaaccacaccgugaccggcgugagcgccagcugcagccacaacggcgagaacagcuucuacagaaaccugcuguggcugaccggcaagaacggccuguaccccagccugagcaagagcuacgccaacaacaaggagaaggaggugcuggugcuguggggcgugcaccacccccccaacaucgccgaccagaagacccuguaccacaccgagaacgccuacgugagcguggugagcagccacuacagcagaaaguucacccccgagaucgccaagagacccaaggugagagaccaggagggcagaaucaacuacuacuggacccugcuggagcccggcgacaccaucaucuucgaggccaacggcaaccugaucgcccccagauacgccuucgcccugagcagaggcuucggcagcggcaucaucaacagcaacgcccccauggacaagugcgacgccaagugccagaccccccagggcgccaucaacagcagccugcccuuccagaacgugcaccccgugaccaucggcgagugccccaaguacgugagaagcgccaagcugagaauggugaccggccugagaaacauccccagcauccagagcagaggccuguucggcgccaucgccggcuucaucgagggcggcuggaccggcaugguggacggcugguacggcuaccaccaccagaacgagcagggcagcggcuacgccgccgaccagaagagcacccagaacgccaucaacggcaucaccaacaaggugaacagcgugaucgagaagaugaacacccaguucaccgccgugggcaaggaguucaacaagcuggagagaagaauggagaaccugaacaagaagguggacgacggcuucaucgacaucuggaccuacaacgccgagcugcuggugcugcuggagaacgagagaacccuggacuuccacgacagcaacgugaagaaccuguacgagaaggugaagagccagcugaagaacaacgccaaggagaucggcaacggcugcuucgaguucuaccacaagugcaacgacgagugcauggagagcgugaagaacggcaccuacgacuaccccaaguacagcgaggagagcaagcugaacagagagaagaucgacggcgugaagcuggagagcaugggcguguaccagauccuggccaucuacagcaccguggccagcagccuggugcugcuggugagccugggcgccaucagcuucuggaugugcagcaacggcagccugcagugcagaaucugcaucuga

SEQ ID NO: 172951 - RNA, 1698 nt, Artificial Sequence
  derived and/or modified CDS sequence (opt4) from hemagglutinin__InfluenzaA__AJJ99449
augaaggugaagcugcuggugcugcugugcaccuucaccgccaccuacgccgacaccaucugcaucggcuaccacgccaacaacagcaccgacaccguggacaccgugcuggagaagaacgugaccgugacccacagcgugaaccugcuggagaacagccacaacggcaagcugugccugcugaagggcaucgccccccugcagcugggcaacugcagcguggccggcuggauccugggcaaccccgagugcgagcugcugaucagcaaggagagcuggagcuacaucguggagaagcccaaccccgagaacggcaccugcuaccccggccacuucgccgacuacgaggagcugagagagcagcugagcagcgugagcagcuucgagagauucgagaucuuccccaaggagagcagcuggcccaaccacaccgugaccggcgugagcgccagcugcagccacaacggcgagagcagcuucuacagaaaccugcuguggcugaccggcaagaacggccuguaccccaaccugagcaagagcuacgccaacaacaaggagaaggaggugcuggugcuguggggcgugcaccacccccccaacaucggcgaccagaaggcccuguaccacaccgagaacgccuacgugagcguggugagcagccacuacagcagaaaguucacccccgagaucgccaagagacccaaggugagagaccaggagggcagaaucaacuacuacuggacccugcuggagcccggcgacaccaucaucuucgaggccaacggcaaccugaucgcccccagauacgccuucgcccugagcagaggcuucggcagcggcaucaucaacagcaacgcccccaugggcaagugcgacgccaagugccagaccccccagggcgccaucaacagcagccugcccuuccagaacgugcaccccgugaccaucggcgagugccccaaguacgugagaagcgccaagcugagaauggugaccggccugagaaacauccccagcauccagagcagaggccuguucggcgccaucgccggcuucaucgagggcggcuggaccggcaugguggacggcugguacggcuaccaccaccagaacgagcagggcagcggcuacgccgccgaccagaagagcacccagaacgccaucaacggcaucaccaacaaggugaacagcgugaucgagaagaugaacacccaguucaccgccgugggcaaggaguucaacaagcuggagagaagaauggagaaccugaacaagaagguggacgacggcuucaucgacaucuggaccuacaacgccgagcugcuggugcugcuggagaacgagagaacccuggacuuccacgacagcaacgugaagaaccuguacgagaaggugaagagccagcugaagaacaacgccaaggagaucggcaacggcugcuucgaguucuaccacaagugcaacgacgagugcauggagagcgugaagaacggcaccuacgacuaccccaaguacagcaaggagagcaagcugaacagagagaagaucgacggcgugaagcuggagagcaugggcguguaccagauccuggccaucuacagcaccguggccagcagccuggugcugcuggugagccugggcgccaucagcuucuggaugugcagcaacggcagccugcagugcagaaucugcaucuga

SEQ ID NO: 172952 - RNA, 1698 nt, Artificial Sequence; identical to SEQ ID NO: 162548
  derived and/or modified CDS sequence (opt4) from hemagglutinin__InfluenzaA__AJJ99461

SEQ ID NO: 172953 - RNA, 1701 nt, Artificial Sequence
  derived and/or modified CDS sequence (opt4) from hemagglutinin__InfluenzaA__AJJ99483
augaaggccauccugcuggugcugcuguacaccuucgccaccgccaacgccgacacccugugcaucggcuaccacgccaacaacagcaccgacaccguggacaccgugcuggagaagaacgugaccgugacccacagcgugaaccugcuggaggacaagcacaacggcaagcugugcaagcugagaggcguggccccccugcaccugggcaagugcaacaucgccggcuggauccugggcaaccccgagugcgagagccugagcaccgccagcagcuggagcuacaucguggagaccagcagcagcgacaacggcaccugcuaccccggcgacuucaucaacuacgaggagcugagagagcagcugagcagcgugagcagcuucgagagauucgagaucuuccccaagaccagcagcuggcccaaccacgacagcaacaagggcgugaccgccgccugccccagagccggcgccaagagcuucuacaagaaccugaucuggcuggugaagaagggcaacagcuaccccaagcugagcaagagcuacaucaacgacaagggcaaggaggugcuggugcuguggggcauccaccaccccagcaccaccgccgaccagcagagccuguaccagaacgccgacgccuacguguucgugggcaccagcagauacagcaagaaguucaagcccgagaucgccaucagacccaaggugagagaccaggagggcagaaugaacuacuacuggacccugguggagcccggcgacaagaucaccuucgaggccaccggcaaccugcuggugcccagauacgccuucgccauggagagaaacgccggcagcggcaucaucaucagcgacacccccgugcacgacugcaacaccaccugccagacccccaagggcgccaucaacaccagccugcccuuccagaacauccaccccaucaccaucggcaagugccccaaguacgugaagagcaccaagcugagacuggccaccggccugagaaacgugcccagcauccagagcagaggccuguucggcgccaucgccggcuucaucgagggcggcuggaccggcaugguggacggcugguacggcuaccaccaccagaacgagcagggcagcggcuacgccgccgaccugaagagcacccagaacgccaucgacaagaucaccaacaaggugaacagcgugaucgagaagaugaacacccaguucaccgccgugggcaaggaguucaaccaccuggagaagagaaucgagaaccugaacaagaagguggacgacggcuuccuggacaucuggaccuacaacgccgagcugcuggugcugcuggagaacgagagaacccuggacuaccacgacagcaacgugaagaaccuguacgagaaggugagaaaccagcugaagaacaacgccaaggagaucggcaacggcugcuucgaguucuaccacaagugcgacaacaccugcauggagagcgugaagaacggcaccuacgacuaccccaaguacagcgaggaggccaagcugaacagagaggagaucgacggcgugaagcuggagagcaccagaaucuaccagauccuggccaucuacagcaccguggccagcagccuggugcugguggugagccugggcgccaucagcuucuggaugugcagcaacggcagccugcagugcagaaucugcaucuga

SEQ ID NO: 172954 - RNA, 1701 nt, Artificial Sequence; identical to SEQ ID NO: 167113
  derived and/or modified CDS sequence (opt4) from hemagglutinin__InfluenzaA__AJJ99494

SEQ ID NO: 172955 - RNA, 1701 nt, Artificial Sequence
  derived and/or modified CDS sequence (opt4) from hemagglutinin__InfluenzaA__AJJ99505
augaaggccauccugguggugcugcuguacaccuucgccaccgccaacgccgacacccugugcaucggcuaccacgccaacaacagcaccgacaccguggacaccgugcuggagaagaacgugaccgugacccacagcgugaaccugcuggaggacaagcacaacggcaagcugugcaagcugagaggcguggccccccugcaccugggcaagugcaacaucgccggcuggauccugggcaaccccgagugcgagagccugagcaccgccagcagcuggagcuacaucguggagaccagcagcagcgacaacggcaccugcuaccccggcgacuucaucaacuacgaggagcugagagagcagcugagcagcgugagcagcuucgagagauucgagaucuuccccaagaccagcagcuggcccaaccacgacagcaacaagggcgugaccgccgccugcccccacgccggcgccaagagcuucuacaagaaccugaucuggcuggugaagaagggcaacagcuaccccaagcugagcaagagcuacaucaacgacaagggcaaggaggugcuggugcuguggggcauccaccaccccagcaccagcgccgaccagcagagccuguaccagaacgccgacgccuacguguucgugggcaccagcaaguacagcaagaaguucaagcccgagaucgccgugagacccaaggugagagaccaggagggcagaaugaacuacuacuggacccugguggagcccggcgacaagaucaccuucgaggccaccggcaaccugcuggugcccagauacgccuucgccauggagagaaacgccggcagcggcaucaucaucagcgacacccccgugcacgacugcaacaccaccugccagacccccaagggcgccaucaacaccagccugcccuuccagaacauccaccccaucaccaucggcaagugccccaaguacgugaagagcaccaagcugagacuggccaccggccugagaaacgugcccagcauccagagcagaggccuguucggcgccaucgccggcuucaucgagggcggcuggaccggcaugguggacggcugguacggcuaccaccaccagaacgagcagggcagcggcuacgccgccgaccugaagagcacccagaacgccaucgacaagaucaccaacaaggugaacagcgugaucgagaagaugaacacccaguucaccgccgugggcaagggcuucaaccaccuggagaagagaaucgagaaccugaacaagaagguggacgacggcuuccuggacaucuggaccuacaacgccgagcugcuggugcugcuggagaacgagagaacccuggacuaccacgacagcaacgugaagaaccuguacgagaaggugagaagccagcugaagaacaacgccaaggagaucggcaacggcugcuucgaguucuaccacaagugcgacaacaccugcauggagagcgugaagaacggcaccuacgacuaccccaaguacagcgaggaggccaagcugaacagagaggagaucgacggcgugaagcuggagagcaccagaaucuaccagauccuggccaucuacagcaccguggccagcagccuggugcugguggugagccugggcgccaucagcuucuggaugugcagcaacggcagccugcagugcagaaucugcaucuga

SEQ ID NO: 172956 - RNA, 1701 nt, Artificial Sequence; identical to SEQ ID NO: 162971
  derived and/or modified CDS sequence (opt4) from hemagglutinin__InfluenzaA__AJJ99516

SEQ ID NO: 172957 - RNA, 1701 nt, Artificial Sequence
  derived and/or modified CDS sequence (opt4) from hemagglutinin__InfluenzaA__AJJ99527
augaaggccauccugcuggugcugcuguacaccuucgccaccgccaacgccgacacccugugcaucggcuaccacgccaacaacagcaccgacaccguggacaccgugcuggagaagaacgugaccgugacccacagcgugaaccugcuggaggacaagcacaacggcaagcugugcaagcugagaggcguggccccccugcaccugggcaagugcaacaucgccggcuggauccugggcaaccccgagugcgagagccugagcaccgccagcagcuggagcuacaucguggagaccagcagcagcgacaacggcaccugcuaccccggcgacuucaucaacuacgaggagcugagagagcagcugagcagcgugagcagcuucgagagauucgagaucuuccccaagaccagcagcuggcccaaccacgacagcaacaagggcgugaccgccgccugccccagagccggcgccaagagcuucuacaagaaccugaucuggcuggugaagaagggcaacagcuaccccaagcugagcaagagcuacaucaacgacaagggcaaggaggugcuggugcuguggggcauccaccaccccagcaccaccgccgaccagcagagccuguaccagaacgccgacgccuacguguucgugggcaccagcagauacagcaagaaguucaagcccgagaucgccaucagacccaaggugagagaccaggagggcagaaugaacuacuacuggacccugguggagcccggcgacaagaucaccuucgaggccaccggcaaccugcuggugcccagauacgccuucgccauggagagaaacgccggcagcggcaucaucaucagcgacacccccgugcacgacugcaacaccaccugccagacccccaagggcgccaucaacaccagccugcccuuccagaacauccaccccaucaccaucggcaagugccccaaguacgugaagagcaccaagcugagacuggccaccggccugagaaacgugcccagcauccagagcagaggccuguucggcgccaucgccggcuucaucgagggcggcuggaccggcaugguggacggcugguacggcuaccaccaccagaacgagcagggcagcggcuacgccgccgaccugaagagcacccagaacgugaucgacaagaucaccaacaaggugaacagcgugaucgagaagaugaacacccaguucaccgccgugggcaaggaguucaaccaccuggagaagagaaucgagaaccugaacaagaagguggacgacggcuuccuggacaucuggaccuacaacgccgagcugcuggugcugcuggagaacgagagaacccuggacuaccacgacagcaacgugaagaaccuguacgagaaggugagaaaccagcugaagaacaacgccaaggagaucggcaacggcugcuucgaguucuaccacaagugcgacaacaccugcauggagagcgugaagaacggcaccuacgacuaccccaaguacagcgaggaggccaagcugaacagagaggagaucgacggcgugaagcuggagagcaccagaaucuaccagauccuggccaucuacagcaccguggccagcagccuggugcugguggugagccugggcgccaucagcuucuggaugugcagcaacggcagccugcagugcagaaucugcaucuga

SEQ ID NO: 172958 - RNA, 1701 nt, Artificial Sequence
  derived and/or modified CDS sequence (opt4) from hemagglutinin__InfluenzaA__AJJ99538
augaaggccauccugguggugcugcuguacaccuucgccaccgccaacgccgacacccugugcaucggcuaccacgccaacaacagcaccgacaccguggacaccgugcuggagaagaacgugaccgugacccacagcgugaaccugcuggaggacaagcacaacggcaagcugugcaagcugagaggcguggccccccugcaccugggcaagugcaacaucgccggcuggauccugggcaaccccgagugcgagagccugagcaccgccagcagcuggagcuacaucguggagaccagcagcagcgacaacggcaccugcuaccccggcgacuucaucgacuacgaggagcugagagagcagcugagcagcgugagcagcuucgagagauucgagaucuuccccaagaccagcagcuggcccaaccacgacagcaacaagggcgugaccgccgccugcccccacgccggcgccaagagcuucuacaagaaccugaucuggcuggugaagaagggcaacagcuaccccaagcugagcaagagcuacaucaacgacaagggcaaggaggugcuggugcuguggggcauccaccaccccagcaccaccgccgaccagcagagccuguaccagaacgccgacaccuacguguucgugggcaccagcagauacagcaagaaguucaagcccgagaucgccaucagacccaaggugagagaccaggagggcagaaugaacuacuacuggacccugguggagcccggcgacaagaucaccuucgaggccaccggcaaccugguggugcccagauacgccuucgccauggagagaaacgccggcagcggcaucaucaucagcgacacccccgugcacgacugcaacaccaccugccagacccccaagggcgccaucaacaccagccugcccuuccagaacauccaccccaucaccaucggcaagugccccaaguacgugaagagcaccaagcugagacuggccaccggccugagaaacgugcccagcauccagagcagaggccuguucggcgccaucgccggcuucaucgagggcggcuggaccggcaugguggacggcugguacggcuaccaccaccagaacgagcagggcagcggcuacgccgccgaccugaagagcacccagaacgccaucgacaagaucaccaacaaggugaacagcgugaucgagaagaugaacacccaguucaccgccgugggcaaggaguucaaccaccuggagaagagaaucgagaaccugaacaagaagguggacgacggcuuccuggacaucuggaccuacaacgccgagcugcuggugcugcuggagaacgagagaacccuggacuaccacgacagcaacgugaagaaccuguacgagaaggugagaaaccagcugaagaacaacgccaaggagaccggcaacggcugcuucgaguucuaccacaagugcgacaacaccugcauggagagcgugaagaacggcaccuacgacuaccccaaguacagcgaggaggccaagcugaacagagagaagaucgacggcgugaagcuggagagcaccagaaucuaccagauccuggccaucuacagcaccguggccagcagccuggugcugguggugagccugggcgccaucagcuucuggaugugcagcaacggcagccugcagugcagaaucugcaucuga

SEQ ID NO: 172959 - RNA, 1701 nt, Artificial Sequence
  derived and/or modified CDS sequence (opt4) from hemagglutinin__InfluenzaA__AJJ99549
augaaggccauccugguggugcugcuguacaccuucgccaccgccaacgccgacacccugugcaucggcuaccacgccaacaacagcaccgacaccguggacaccgugcuggagaagaacgugaccgugacccacagcgugaaccugcuggaggacaagcacaacggcaagcugugcaagcugagaggcguggccccccugcaccugggcaagugcaacaucgccggcuggauccugggcaaccccgagugcgagagccugagcaccgccagcagcuggagcuacaucguggagaccagcagcagcgacaacggcaccugcuaccccggcgacuucaucgacuacgaggagcugagagagcagcugagcagcgugagcagcuucgagagauucgagaucuuccccaagaccagcagcuggcccaaccacgacagcaacaagggcgugaccgccgccugcccccacgccggcgccaagggcuucuacaagaaccugaucuggcuggugaagaagggcaacagcuaccccaagcugagcaagagcuacaucaacgacaagggcaaggaggugcuggugcuguggggcauccaccaccccagcaccaccgccgaccagcagagccuguaccagaacgccgacaccuacguguucgugggcaccagcagauacagcaagaaguucaagcccgagaucgccaucagacccaaggugagagaccaggagggcagaaugaacuacuacuggacccugguggagcccggcgacaagaucaccuucgaggccaccggcaaccugguggugcccagauacgccuucgccauggagagaaacgccggcagcggcaucaucaucagcgacacccccgugcacgacugcaacaccaccugccagacccccaagggcgccaucaacaccagccugcccuuccagaacauccaccccaucaccaucggcaagugccccaaguacgugaagagcaccaagcugagacuggccaccggccugagaaacgugcccagcauccagagcagaggccuguucggcgccaucgccggcuucaucgagggcggcuggaccggcaugguggacggcugguacggcuaccaccaccagaacgagcagggcagcggcuacgccgccgaccugaagagcacccagaacgccaucgacaagaucaccaacaaggugaacagcgugaucgagaagaugaacacccaguucaccgccgugggcaaggaguucaaccaccuggagaagagaaucgagaaccugaacaagaagguggacgacggcuuccuggacaucuggaccuacaacgccgagcugcuggugcugcuggagaacgagagaacccuggacuaccacgacagcaacgugaagaaccuguacgagaaggugagaaaccagcugaagaacaacgccaaggagaucggcaacggcugcuucgaguucuaccacaagugcgacaacaugugcauggagagcgugaagaacggcaccuacgacuaccccaaguacagcgaggaggccaagcugaacagagaggagaucgacggcgugaagcuggagagcaccagaaucuaccagauccuggccaucuacagcaccgccgccagcagccuggugcugguggugagccugggcgccaucagcuucuggaugugcagcaacggcagccugcagugcagaaucugcaucuga

SEQ ID NO: 172960 - RNA, 1701 nt, Artificial Sequence; identical to SEQ ID NO: 167149
  derived and/or modified CDS sequence (opt4) from hemagglutinin__InfluenzaA__AJJ99560

SEQ ID NO: 172961 - RNA, 1701 nt, Artificial Sequence
  derived and/or modified CDS sequence (opt4) from hemagglutinin__InfluenzaA__AJJ99571
augaaggccauccugguggugcugcuguacaccuucgccaccgccaacgccgacacccugugcaucggcuaccacgccaacaacagcaccgacaccguggacaccgugcuggagaagaacgugaccgugacccacagcgugaaccugcuggaggacaagcacaacggcaagcugugcaagcugagaggcguggccccccugcaccugggcaagugcaacaucgccggcuggauccugggcaaccccgagugcgagagccugagcaccgccagcagcuggagcuacaucguggagaccagcagcagcgacaacggcaccugcuaccccggcgacuucaucgacuacgaggagcugagagagcagcugagcagcgugagcagcuucgagagauucgagaucuuccccaagaccagcagcuggcccaaccacgacagcaacaagggcgugaccgccgccugcccccacgccggcgccaagagcuucuacaagaaccugaucuggcuggugaagaagggcaacagcuaccccaagcugagcaagagcuacaucaacgacaagggcaaggaggugcuggugcuguggggcauccaccaccccagcaccaccgccgaccagcagagccuguaccagaacgccgacaccuacguguucgugggcaccagcagauacagcaagaaguucaagcccgagaucgccaucagacccaaggugagagaccaggagggcagaaugaacuacuacuggacccugguggagcccggcgacaagaucaccuucgaggccaccggcaaccugguggugcccagauacgccuucgccauggagagaaacgccggcagcggcaucaucaucagcgacacccccgugcacgacugcaacaccaccugccagacccccaagggcgccaucaacaccagccugcccuuccagaacauccaccccaucaccaucggcaagugccccaaguacgugaagagcaccaagcugagacuggccaccggccugagaaacgugcccagcauccagagcagaggccuguucggcgccaucgccggcuucaucgagggcggcuggaccggcaugguggacggcugguacggcuaccaccaccagaacgagcagggcagcggcuacgccgccgaccugaagagcacccagaacgccaucgacaagaucaccaacaaggugaacagcgugaucgagaagaugaacauccaguucaccgccgugggcaaggaguucaaccaccuggagaagagaaucgagaaccugaacaagaagguggacgacggcuuccuggacaucuggaccuacaacgccgagcugcuggugcugcuggagaacgagagaacccuggacuaccacgacagcaacgugaagaaccuguacgagaaggugagaaaccagcugaagaacaacgccaaggagaucggcaacggcugcuucgaguucuaccacaagugcgacaacaccugcauggagagcgugaagaacggcaccuacgacuaccccaaguacagcgaggaggccaagcugaacagagaggagaucgacggcgugaagcuggagagcaccagaaucuaccagauccuggccaucuacagcaccguggccagcagccuggugcugguggugagccugggcgccaucagcuucuggaugugcagcaacggcagccugcagugcagaaucugcaucuga

SEQ ID NO: 172962 - RNA, 1701 nt, Artificial Sequence
  derived and/or modified CDS sequence (opt4) from hemagglutinin__InfluenzaA__AJJ99582
augaaggccauccugguggugcugcuguacaccuucgccaccgccaacgccgacacccugugcaucggcuaccacgccaacaacagcaccgacaccguggacaccgugcuggagaagaacgugaccgugacccacagcgugaaccugcuggaggacaagcacaacggcaagcugugcaagcugagaggcguggccccccugcaccugggcaagugcaacaucgccggcuggauccugggcaaccccgagugcgagagccugagcaccgccagcagcuggagcuacaucguggagaccagcagcagcgacaacggcaccugcuaccccggcgacuucaucgacuacgaggagcugagagagcagcugagcagcgugagcagcuucgagagauucgagaucuuccccaagaccagcagcuggcccaaccacgacagcaacaagggcgugaccgccgccugcccccacgccggcgccaagagcuucuacaagaaccugaucuggcuggugaagaagggcaacagcuaccccaagcugagcaagagcuacaucaacgacaagggcaaggaggugcuggugcuguggggcauccaccaccccagcaccagcgccgaccagcagagccuguaccagaacgccgacgccuacguguucgugggcaccagcagauacagcaagaaguucaagcccgagaucgccaucagacccaaggugagagaccaggagggcagaaugaacuacuacuggacccugguggagcccggcgacaagaucaccuucgaggccaccggcaaccugguggugcccagauacgccuucgccauggagagaaacgccggcagcggcaucaucaucagcgacacccccgugcacgacugcaacaccaccugccagacccccaacggcgccaucaacaccagccugcccuuccagaacauccaccccaucaccaucggcaagugccccaaguacgugaagagcaccaagcugagacuggccaccggccugagaaacgugcccagcauccagagcagaggccuguucggcgccaucgccggcuucaucgagggcggcuggaccggcaugguggacggcugguacggcuaccaccaccagaacgagcagggcagcggcuacgccgccgaccugaagagcacccagaacgccaucgacaagaucaccaacaaggugaacagcgugaucgagaagaugaacacccaguucaccgccgugggcaaggaguucaaccaccuggagaagagaaucgagaaccugaacaagaagguggacgacggcuuccuggacaucuggaccuacaacgccgagcugcuggugcugcuggagaacgagagaacccuggacuaccacgacagcaacgugaagaaccuguacgagaaggugagaagccagcugaagaacaacgccaaggagaucggcaacggcugcuucgaguucuaccacaagugcgacaacaccugcauggagagcgugaagaacggcaccuacgacuaccccaaguacagcgaggaggccaagcugaacagagaggagaucgacggcgugaagcuggagagcaccagaaucuaccagauccuggccaucuacagcaccguggccagcagccuggugcugguggugagccugggcgccaucagcuucuggaugugcagcaacggcagccugcagugcagaaucugcaucuga

SEQ ID NO: 172963 - RNA, 1701 nt, Artificial Sequence; identical to SEQ ID NO: 162971
  derived and/or modified CDS sequence (opt4) from hemagglutinin__InfluenzaA__AJJ99593

SEQ ID NO: 172964 - RNA, 1701 nt, Artificial Sequence
  derived and/or modified CDS sequence (opt4) from hemagglutinin__InfluenzaA__AJJ99604
augaaggccauccugguggugcugcuguacaccuucgccaccgccaacgccgacacccugugcaucggcuaccacgccaacaacagcaccgacaccguggacaccgugcuggagaagaacgugaccgugacccacagcgugaaccugcuggaggacaagcacaacggcaagcugugcaagcugagaggcguggccccccugcaccugggcaagugcaacaucgccggcuggauccugggcaaccccgagugcgagagccugagcaccgccagcagcuggagcuacaucguggagaccagcagcagcgacaacggcaccugcuaccccggcgacuucaucgacuacgaggagcugagagagcagcugagcagcgugagcagcuucgagagauucgagaucuuccccaagaccagcagcuggcccaaccacgacagcaacaagggcgugaccgccgccugcccccacgccggcgccaagagcuucuacaagaaccugaucuggcuggugaagaagggcaacagcuaccccaagcugagcaagagcuacaucaacgacaagggcaaggaggugcuggugcuguggggcauccaccaccccagcaccagcgccgaccagcagagccuguaccagaacgccgacgccuacguguucgugggcaccagcagauacagcaagaaguucaagcccgagaucgccaucagacccagagugagagaccaggagggcagaaugaacuacuacuggacccugguggagcccggcgacaagaucaccuucgaggccaccggcaaccugguggugcccagauacgccuucgccauggagagagacgccggcagcggcaucaucaucagcgacacccccgugcacgacugcaacaccaccugccagacccccaagggcgccaucaacaccagccugcccuuccagaacauccaccccaucaccaucggcaagugccccaaguacgugaagagcaccaagcugagacuggccaccggccugagaaacgugcccagcauccagagcagaggccuguucggcgccaucgccggcuucaucgagggcggcuggaccggcaugguggacggcugguacggcuaccaccaccagaacgagcagggcagcggcuacgccgccgaccugaagagcacccagaacgccaucgacgagaucaccaacaaggugaacagcgugaucgagaagaugaacacccaguucaccgccgugggcaaggaguucaaccaccuggagaagagaaucgagaaccugaacaagaagaucgacgacggcuuccuggacaucuggaccuacaacgccgagcugcuggugcugcuggagaacgagagaacccuggacuaccacgacagcaacgugaagaaccuguacgagaaggugagaagccagcugaagaacaacgccaaggagaucggcaacggcugcuucgaguucuaccacaagugcgacaacaccugcauggagagcgugaagaacggcaccuacgacuaccccaaguacagcgaggaggccaagcugaacagagaggagaucgacggcgugaagcuggagagcaccagaaucuaccagauccuggccaucuacagcaccguggccagcagccuggugcugguggugagccugggcgccaucagcuucuggaugugcagcaacggcagccugcagugcagaaucugcaucuga

SEQ ID NO: 172965 - RNA, 1698 nt, Artificial Sequence
  derived and/or modified CDS sequence (opt4) from hemagglutinin__InfluenzaA__AJJ99616
augaaggugaagcugcuggugcugcugugcaccuucaccgccaccuacgccgacaccaucugcaucggcuaccacgccaacaacagcaccgacaccguggacaccgugcuggagaagaacgugaccgugacccacagcgugaaccugcuggagaacagccacaacggcaagcugugccugcugaagggcaucgccccccugcagcugggcaacugcagcguggccggcuggauccugggcaaccccgagugcgagcugcugaucagcaaggagagcuggagcuacaucguggagaagcccaaccccgagaacggcaccugcuaccccggccacuucgccgacuacgaggagcugagagagcagcugagcagcgugagcagcuucgagagauucgagaucuuccccaaggagagcagcuggcccaaccacaccgugaccggcgugagcgccagcugcagccacaacggcgagaacagcuucuacagaaaccugcuguggcugaccggcaagaacggccuguaccccaaccugagcaagagcuacgccaacaacaaggagaaggaggugcuggugcuguggggcgugcaccacccccccaacaucgccaaccagaagacccuguaccacaccgagaacgccuacgugagcguggugagcagccacuacagcagaaagcugacccccgagaucgccaagagacccaaggugagagaccaggagggcagaaucaacuacuacuggacccugcuggagcccggcgacaccaucaucuucgaggccaacggcaaccugaucgcccccagauacgccuucgcccugagcagaggcuucggcagcggcaucaucaacagcaacgcccccauggacaagugcgacgccaagugccagaccccccagggcgccaucaacagcagccugcccuuccagaacgugcaccccgugaccaucggcgagugccccaaguacgugagaagcgccaagcugagaauggugaccggccugagaaacauccccagcauccagagcagaggccuguucggcgccaucgccggcuucaucgagggcggcuggaccggcaugguggacggcugguacggcuaccaccaccagaacgagcagggcagcggcuacgccgccgaccagaagagcacccagaacgccaucaacggcaucaccaacaaggugaacagcgugaucgagaagaugaacacccaguucaccgccgugggcaaggaguucaacaagcuggagagaagaauggagaaccugaacaagaagguggacgacggcuucaucgacaucuggaccuacaacgccgagcugcuggugcugcuggagaacgagagaacccuggacuuccacgacagcaacgugaagaaccuguacgagaaggugaagagccagcugaagaacaacgccaaggagaucggcaacggcugcuucgaguucuaccacaagugcaacgacgagugcauggagagcgugaagaacggcaccuacgacuaccccaaguacagcgaggagagcaagcugaacagagagaagaucgacggcgugaagcuggagagcaugggcguguaccagauccuggccaucuacagcaccguggccagcagccuggugcugcuggugagccugggcgccaucagcuucuggaugugcagcaacggcagccugcagugcagaaucugcaucuga

SEQ ID NO: 172966 - RNA, 1698 nt, Artificial Sequence; identical to SEQ ID NO: 163686
  derived and/or modified CDS sequence (opt4) from hemagglutinin__InfluenzaA__AJJ99628

SEQ ID NO: 172967 - RNA, 1698 nt, Artificial Sequence
  derived and/or modified CDS sequence (opt4) from hemagglutinin__InfluenzaA__AJJ99640
augaaggugaagcugcuggugcugcugugcaccuucaccgccaccuacgccgacaccaucugcaucggcuaccacgccaacaacagcaccgacaccguggacaccgugcuggagaagaacgugaccgugacccacagcgugaaccugcuggagaacagccacaacggcaagcugugccugcugaagggcaucgccccccugcagcugggcaacugcagcguggccggcuggauccugggcaaccccgagugcgagcugcugaucagcaaggagagcuggagcuacaucguggagaagcccaaccccgagaacggcaccugcuaccccggccacuucgccgacuacgaggagcugagagagcagcugagcagcgugagcagcuucgagagauucgagaucuuccccaaggagagcagcuggcccaaccacaccgugaccggcgugagcgccagcugcagccacaacggcgagaacagcuucuacagaaaccugcuguggcugaccggcaagaacggccuguaccccaaccugagcaagagcuacgccaacaacaaggagaaggaggugcuggugcuguggggcgugcaccacccccccaacaucgccaaccagaagacccuguaccacaccgagaacgccuacgugagcguggugagcagccacuacagcagaaaguucacccccgagaucgccaagagacccaaggugagagaccaggagggcagaaucaacuacuacuggacccugcuggagcccggcgacaccaucaucuucgaggccaacggcaaccugaucgcccccagauacgccuucgcccugagcagaggcuucggcagcggcaucaucaacagcaacgcccccauggacaagugcgacgccaagugccagaccccccagggcgccaucaacagcagccugcccuuccagaacgugcaccccgugaccaucggcgagugccccaaguacgugagaagcgccaagcugagaauggugaccggccugagaaacauccccagcauccagagcagaggccuguucggcgccguggccggcuucaucgagggcggcuggaccggcaugguggacggcugguacggcuaccaccaccagaacgagcagggcagcggcuacgccgccgaccagaagagcacccagaacgccaucaacggcaucaccaacaaggugaacagcgugaucgagaagaugaacacccaguucaccgccgugggcaaggaguucaacaagcuggagagaagaauggagaaccugaacaagaagguggacgacggcuucaucgacaucuggaccuacaacgccgagcugcuggugcugcuggagaacgagagaacccuggacuuccacgacagcaacgugaagaaccuguacgagaaggugaagagccagcugaagaacaacgccaaggagaucggcaacggcugcuucgaguucuaccacaagugcaacgacgagugcauggagagcgugaagaacggcaccuacgacuaccccaaguacagcgaggagagcaagcugaacagagagaagaucgacggcgugaagcuggagagcaugggcguguaccagauccuggccaucuacagcaccguggccagcagccuggugcugcuggugagccugggcgccaucagcuucuggaugugcagcaacggcagccugcagugcagaaucugcaucuga

SEQ ID NO: 172968 - RNA, 1698 nt, Artificial Sequence; identical to SEQ ID NO: 163686
  derived and/or modified CDS sequence (opt4) from hemagglutinin__InfluenzaA__AJJ99652

SEQ ID NO: 172969 - RNA, 1698 nt, Artificial Sequence
  derived and/or modified CDS sequence (opt4) from hemagglutinin__InfluenzaA__AJJ99664
augaaggccaagcugcuggugcugcugugcaccuucaccgccaccuacgccgacaccaucugcaucggcuaccacgccaacaacagcaccgacaccguggacaccgugcuggagaagaacgugaccgugacccacagcgugaaccugcuggagaacagccacaacggcaagcugugccugcugaagggcaucgccccccugcagcugggcaacugcagcaucgccggcuggauccugggcaaccccgagugcgagcugcugaucagcaaggagagcuggagcuacaucguggagaagcccaaccccgagaacggcaccugcuaccccggccacuucgccgacuacgaggagcugagagagcagcugagcagcgugagcagcuucgagagauucgagaucuuccccaaggagagcagcuggcccaaccacaccgugaccggcgugagcgccagcugcagccacaacggcgagagcagcuucuacagaaaccugcuguggcugaccggcaagaacggccuguaccccaaccugagcaagagcuacgccaacaacaaggagaaggaggugcuggugcuguggggcgugcaccacccccccaacaucggcgaccagaaggcccuguaccacaccgagaacgccuacgugagcguggugagcagccacuacagcagaaaguucacccccgagaucgccaagagacccaaggugagagaccaggagggcagaaucaacuacuacuggacccugcuggagcccggcgacaccaucaucuucgaggccaacggcaaccugaucgcccccagauacgccuucgcccugagcagaggcuucggcagcggcaucaucaacagcaacgcccccauggacaagugcgacgccaagugccagaccccccagggcgccaucaacagcagccugcccuuccagaacgugcaccccgugaccaucggcgagugccccaaguacgugagaagcgccaagcugagaauggugaccggccugagaaacauccccagcauccagagcagaggccuguucggcgccaucgccggcuucaucgagggcggcuggaccggcaugguggacggcugguacggcuaccaccaccagaacgagcagggcagcggcuacgccgccgaccagaagagcacccagaacgccaucaacggcaucaccaacaaggugaacagcgugaucgagaagaugaacacccaguucaccgccgugggcaaggaguucaacaagcuggagagaagaauggagaaccugaacaagaagguggacgacggcuucaucgacaucuggaccuacaacgccgagcugcuggugcugcuggagaacgagagaacccuggacuuccacgacagcaacgugaagaaccuguacgagaaggugaagagccagcugaagaacaacgccaaggagaucggcaacggcugcuucgaguucuaccacaagugcaacgacgagugcauggagagcgugaagaacggcaccuacgacuaccccaaguacagcgaggagagcaagcugaacagagagaagaucgacggcgugaagcuggagagcaugggcguguaccagauccuggccaucuacagcaccguggccagcagccuggugcugcuggugagccugggcgccaucagcuucuggaugugcagcaacggcagccugcagugcagaaucugcaucuga

SEQ ID NO: 172970 - RNA, 1701 nt, Artificial Sequence
  derived and/or modified CDS sequence (opt4) from hemagglutinin__InfluenzaA__AJJ99675
augaaggccauccugcuggugcugcuguacaccuucgccaccgccaaggccgacacccugugcaucggcuaccacgccaacaacagcaccgacaccguggacaccgugcuggagaagaacgugaccgugacccacagcgugaaccugcuggaggacaagcacaacggcaagcugugcaagcugagaggcguggccccccugcaccugggcaagugcaacaucgccggcuggauccugggcaaccccgagugcgagagccugagcaccgccagcagcuggagcuacaucguggagaccagcagcagcgacaacggcaccugcuaccccggcgacuucaucaacuacgaggagcugagagagcagcugagcagcgugagcagcuucgagagauucgagaucuuccccaagaccagcagcuggcccaaccacgacagcaacaagggcgugaccgccgccugccccagagccggcgccaagagcuucuacaagaaccugaucuggcuggugaagaagggcaacagcuaccccaagcugagcaagagcuacaucaacgacaagggcaaggaggugcuggugcuguggggcauccaccaccccagcaccaccgccgaccagcagagccuguaccagaacgccgacgccuacguguucgugggcaccagcagauacagcaagaaguucaagcccgagaucgccaucagacccaaggugagagaccaggagggcagaaugaacuacuacuggacccugguggagcccggcgacaagaucaccuucgaggccaccggcaaccugcuggugcccagauacgccuucgccauggagagaaacgccggcagcggcaucaucaucagcgacacccccgugcacgacugcaacaccaccugccagacccccaagggcgccaucaacaccagccugcccuuccagaacauccaccccaucaccaucggcaagugccccaaguacgugaagagcaccaagcugagacuggccaccggccugagaaacgugcccagcauccagagcagaggccuguucggcgccaucgccggcuucaucgagggcggcuggaccggcaugguggacggcugguacggcuaccaccaccagaacgagcagggcagcggcuacgccgccgaccugaagagcacccagaacgccaucgacaagaucaccgacaaggugaacagcgugaucgagaagaugaacacccaguucaccgccgugggcaaggaguucaaccaccuggagaagagaaucgagaaccugaacaagaagguggacgacggcuuccuggacaucuggaccuacaacgccgagcugcuggugcugcuggagaacgagagaacccuggacuaccacgacagcaacgugaagaaccuguacgagaaggugagaaaccagcugaagaacaacgccaaggagaucggcaacggcugcuucgaguucuaccacaagugcgacaacaccugcauggagagcgugaagaacggcaccuacgacuaccccaaguacagcgaggaggccaagcugaacagagaggagaucgacggcgugaagcuggagagcaccagaaucuaccagauccuggccaucuacagcaccguggccagcagccuggugcugguggugagccugggcgccaucagcuucuggaugugcagcaacggcagccugcagugcagaaucugcaucuga

SEQ ID NO: 172971 - RNA, 1701 nt, Artificial Sequence
  derived and/or modified CDS sequence (opt4) from hemagglutinin__InfluenzaA__AJJ99686
augaccgccauccugcuggugcugcuguacaccuucgccaccgccaacgccgacacccugugcaucggcuaccacgccaacaacagcaccgacaccguggacaccgugcuggagaagaacgugaccgugacccacagcgugaaccugcuggaggacaagcacaacggcaagcugugcaagcugagaggcguggccccccugcaccugggcaagugcaacaucgccggcuggauccugggcaaccccgagugcgagagccugagcaccgccagcagcuggagcuacaucguggagaccagcagcagcgacaacggcaccugcuaccccggcgacuucaucaacuacgaggagcugagagagcagcugagcagcgugagcagcuucgagagauucgagaucuuccccaagaccagcagcuggcccaaccacgacagcaacaagggcgugaccgccgccugccccagagccggcgccaagagcuucuacaagaaccugaucuggcuggugaagaagggcaacagcuaccccaagcugagcaagagcuacaucaacgacaagggcaaggaggugcuggugcuguggggcauccaccaccccagcaccaccgccgaccagcagagccuguaccagaacgccgacgccuacguguucgugggcaccagcagauacagcaagaaguucaagcccgagaucgccaucagacccaaggugagagaccaggagggcagaaugaacuacuacuggacccugguggagcccggcgacaagaucaccuucgaggccaccggcaaccugcuggugcccagauacgccuucgccauggagagaaacgccggcagcggcaucaucaucagcgacacccccgugcacgacugcaacaccaccugccagacccccaagggcgccaucaacaccagccugcccuuccagaacauccaccccaucaccaucggcaagugccccaaguacgugaagagcaccaagcugagacuggccaccggccugagaaacgugcccagcauccagagcagaggccuguucggcgccaucgccggcuucaucgagggcggcuggaccggcaugguggacggcugguacggcuaccaccaccagaacgagcagggcagcggcuacgccgccgaccugaagagcacccagaacgccaucgacaagaucaccaacaaggugaacagcgugaucgagaagaugaacacccaguucaccgccgugggcaaggaguucaaccaccuggagaagagaaucgagaaccugaacaagaagguggacgacggcuuccuggacaucuggaccuacaacgccgagcugcuggugcugcuggagaacgagagaacccuggacuaccacgacagcaacgugaagaaccuguacgagaaggugagaaaccagcugaagaacaacgccaaggagaucggcaacggcugcuucgaguucuaccacaagugcgacaacaccugcauggagagcgugaagaacggcaccuacgacuaccccaaguacagcgaggaggccaagcugaacagagaggagaucgacggcgugaagcuggagagcaccagaaucuaccagauccuggccaucuacagcaccguggccagcagccuggugcugguggugagccugggcgccaucagcuucuggaugugcagcaacggcagccugcagugcagaaucugcaucuga

SEQ ID NO: 172972 - RNA, 1701 nt, Artificial Sequence
  derived and/or modified CDS sequence (opt4) from hemagglutinin__InfluenzaA__AJJ99697
augaaggccauccugguggugcugcuguacaccuucgccaccgccaacgccgacacccugugcaucggcuaccacgccaacaacagcaccgacaccguggacaccgugcuggagaagaacgugaccgugacccacagcgugaaccugcuggaggacaagcacaacggcaagcugugcaagcugagaggcguggccccccugcaccugggcaagugcaacaucgccggcuggauccugggcaaccccgagugcgagagccugagcaccgccagcagcuggagcuacaucguggagaccagcagcagcgacaacggcaccugcuaccccggcgacuucaucgacuacgaggagcugagagagcagcugagcagcgugagcagcuucgagagauucgagaucuuccccaagaccagcagcuggcccaaccacgacagcaacaagggcgugaccgccgccugcccccacgccggcgccaagagcuucuacaagaaccugaucuggcuggugaagaagggcaacagcuaccccaagcugagcaagagcuacaucaacgacaagggcaaggaggugcuggugcuguggggcauccaccaccccagcaccaccgccgaccagcagagccuguaccagaacgccgacaccuacguguucgugggcaccagcagauacagcaagaaguucaagcccgagaucgccaucagacccaaggugagagaccaggagggcagaaugaacuacuacuggacccugguggagcccggcgacaagaucaccuucgaggccaccggcaaccugguggugcccagauacgccuucgugauggagagaaacgccggcagcggcaucaucaucagcgacacccccgugcacgacugcaacaccaccugccagacccccaagggcgccaucaacaccagccugcccuuccagaacauccaccccaucaccaucggcaagugccccaaguacgugaagagcaccaagcugagacuggccaccggccugagaaacgugcccagcauccagagcagaggccuguucggcgccaucgccggcuucaucgagggcggcuggaccggcaugguggacggcugguacggcuaccaccaccagaacgagcagggcagcggcuacgccgccgaccugaagagcacccagaacgccaucgacaagaucaccaacaaggugaacagcgugaucgagaagaugaacacccaguucaccgccgugggcaaggaguucaaccaccuggagaagagaaucgagaaccugaacaagaagguggacgacggcuuccuggacaucuggaccuacaacgccgagcugcuggugcugcuggagaacgagagaacccuggacuaccacgacagcaacgugaagaaccuguacgagaaggugagaaaccagcugaagaacaacgccaaggagaccggcaacggcugcuucgaguucuaccacaagugcgacaacaccugcauggagagcgugaagaacggcaccuacgacuaccccaaguacagcgaggaggccaagcugaacagagagaagaucgacggcgugaagcuggagagcaccagaaucuaccagauccuggccaucuacagcaccguggccagcagccuggugcugguggugagccugggcgccaucagcuucuggaugugcagcaacggcagccugcagugcagaaucugcaucuga

SEQ ID NO: 172973 - RNA, 1701 nt, Artificial Sequence
  derived and/or modified CDS sequence (opt4) from hemagglutinin__InfluenzaA__AJJ99708
augaaggccauccugguggugcugcuguacaccuucgccaccgccaacgccgacacccugugcaucggcuaccacgccaacaacagcaccgacaccguggacaccgugcuggagaagaacgugaccgugacccacagcgugaaccugcuggaggacaagcacaacggcaagcugugcaagcugagaggcguggccccccugcaccugggcaagugcaacaucgccggcuggauccugggcaaccccgagugcgagagccugagcaccgccagcagcuggagcuacaucguggagaccagcagcagcgacaacggcaccugcuaccccggcgacuucaucgacuacgaggagcugagagagcagcugagcagcgugagcagcuucgagagauucgagaucuuccccaagaccagcagcuggcccgaccacgacagcaacaagggcgugaccgccgccugcccccacgccggcgccaagagcuucuacaagaaccugaucuggcuggugaagaagggcaacagcuaccccaagcugagcaagagcuacaucaacgacaagggcaaggaggugcuggugcuguggggcauccaccaccccagcaccaccgccgaccagcagagccuguaccagaacgccgacaccuacguguucgugggcaccagcagauacagcaagaaguucaagcccgagaucgccaucagacccaaggugagagaccaggagggcagaaugaacuacuacuggacccugguggagcccggcgacaagaucaccuucgaggccaccggcaaccugguggugcccagauacgccuucgugauggagagaaacgccggcagcggcaucaucaucagcgacacccccgugcacgacugcaacaccaccugccagacccccaagggcgccaucaacaccagccugcccuuccagaacauccaccccaucaccaucggcaagugccccaaguacgugaagagcaccaagcugagacuggccaccggccugagaaacgugcccagcauccagagcagaggccuguucggcgccaucgccggcuucaucgagggcggcuggaccggcaugguggacggcugguacggcuaccaccaccagaacgagcagggcagcggcuacgccgccgaccugaagagcacccagaacgccaucgacaagaucaccaacaaggugaacagcgugaucgagaagaugaacacccaguucaccgccgugggcaaggaguucaaccaccuggagaagagaaucgagaaccugaacaagaagguggacgacggcuuccuggacaucuggaccuacaacgccgagcugcuggugcugcuggagaacgagagaacccuggacuaccacgacagcaacgugaagaaccuguacgagaaggugagaaaccagcugaagaacaacgccaaggagaccggcaacggcugcuucgaguucuaccacaagugcgacaacaccugcauggagagcgugaagaacggcaccuacgacuaccccaaguacagcgaggaggccaagcugaacagagagaagaucgacggcgugaagcuggagagcaccagaaucuaccagauccuggccaucuacagcaccguggccagcagccuggugcugguggugagccugggcgccaucagcuucuggaugugcagcaacggcagccugcagugcagaaucugcaucuga

SEQ ID NO: 172974 - RNA, 1701 nt, Artificial Sequence
  derived and/or modified CDS sequence (opt4) from hemagglutinin__InfluenzaA__AJJ99719
augaaggccauccugguggugaugcuguacaccuucgccaccgccaacgccgacacccugugcaucggcuaccacgccaacaacagcaccgacaccguggacaccgugcuggagaagaacgugaccgugacccacagcgugaaccugcuggaggacaagcacaacggcaagcugugcaagcugagaggcguggccccccugcaccugggcaagugcaacaucgccggcuggauccugggcaaccccgagugcgagagccugagcaccgccagcagcuggagcuacaucguggagaccagcagcagcgacaacggcaccugcuaccccggcgacuucaucgacuacgaggagcugagagagcagcugagcagcgugagcagcuucgagagauucgagaucuuccccaagaccagcagcuggcccaaccacgacagcaacaagggcgugaccgccgccugcccccacgccggcgccaagggcuucuacaagaaccugaucuggcuggugaagaagggcaacagcuaccccaagcugagcaagagcuacaucaacgacaagggcaaggaggugcuggugcuguggggcauccaccaccccagcaccaccgccgaccagcagagccuguaccagaacgccgacaccuacguguucgugggcaccagcagauacagcaagaaguucaagcccgagaucgccaucagacccaaggugagagaccaggagggcagaaugaacuacuacuggacccugguggagcccggcgacaagaucaccuucgaggccaccggcaaccugguggugcccagauacgccuucgccauggagagaaacgccggcagcggcaucaucaucagcgacacccccgugcacgacugcaacaccaccugccagacccccaagggcgccaucaacaccagccugcccuuccagaacauccaccccaucaccaucggcaagugccccaaguacgugaagagcaccaagcugagacuggccaccggccugagaaacgugcccagcauccagagcagaggccuguucggcgccaucgccggcuucaucgagggcggcuggaccggcaugguggacggcugguacggcuaccaccaccagaacgagcagggcagcggcuacgccgccgaccugaagagcacccagaacgccaucgacaagaucaccaacaaggugaacagcgugaucgagaagaugaacacccaguucaccgccgugggcaaggaguucaaccaccuggagaagagaaucgagaaccugaacaagaagguggacgacggcuuccuggacaucuggaccuacaacgccgagcugcuggugcugcuggagaacgagagaacccuggacuaccacgacagcaacgugaagaaccuguacgagaaggugagaaaccagcugaagaacaacgccaaggagaucggcaacggcugcuucgaguucuaccacaagugcgacaacaccugcauggagagcgugaagaacggcaccuacgacuaccccaaguacagcgaggaggccaagcugaacagagaggagaucgagggcgugaagcuggagagcaccagaaucuaccagauccuggccaucuacagcaccguggccagcagccuggugcugguggugagccugggcgccaucagcuucuggaugugcagcaacggcagccugcagugcagaaucugcaucuga

SEQ ID NO: 172975 - RNA, 1701 nt, Artificial Sequence
  derived and/or modified CDS sequence (opt4) from hemagglutinin__InfluenzaA__AJJ99730
augaaggccauccugguggugaugcuguacaccuucgccaccgccaacgccgacacccugugcaucggcuaccacgccaacaacagcaccgacaccguggacaccgugcuggagaagaacgugaccgugacccacagcgugaaccugcuggaggacaagcacaacggcaagcugugcaagcugagaggcguggccccccugcaccugggcaagugcaacaucgccggcuggauccugggcaaccccgagugcgagagccugagcaccgccagcagcuggagcuacaucguggagaccagcagcagcgacaacggcaccugcuaccccggcgacuucaucgacuacgaggagcugagagagcagcugagcagcgugagcagcuucgagagauucgagaucuuccccaagaccagcagcuggcccaaccacgacagcaacaagggcgugaccgccgccugcccccacgccggcgccaagggcuucuacaagaaccugaucuggcuggugaagaagggcaacagcuaccccaagcugagcaagagcuacaucaacgacaagggcaaggaggugcuggugcuguggggcauccaccaccccagcaccaccgccgaccagcagagccuguaccagaacgccgacaccuacguguucgugggcaccagcagauacagcaagaaguucaagcccgagaucgccaucagacccaaggugagagaccaggagggcagaaugaacuacuacuggacccugaucgagcccggcgacaagaucaccuucgaggccaccggcaaccugguggugcccagauacgccuucgccauggagagaaacgccggcagcggcaucaucaucagcgacacccccgugcacgacugcaacaccaccugccagacccccaagggcgccaucaacaccagccugcccuuccagaacauccaccccaucaccaucggcaagugccccaaguacgugaagagcaccaagcugagacuggccaccggccugagaaacgugcccagcauccagagcagaggccuguucggcgccaucgccggcuucaucgagggcggcuggaccggcaugguggacggcugguacggcuaccaccaccagaacgagcagggcagcggcuacgccgccgaccugaagagcacccagaacgccaucgacaagaucaccaacaaggugaacagcgugaucgagaagaugaacacccaguucaccgccgugggcaaggaguucaaccaccuggagaagagaaucgagaaccugaacaagaagguggacgacggcuuccuggacaucuggaccuacaacgccgagcugcuggugcugcuggagaacgagagaacccuggacuaccacgacagcaacgugaagaaccuguacgagaaggugagaaaccagcugaagaacaacgccaaggagaucggcaacggcugcuucgaguuccaccacaagugcgacaacaccugcauggagagcgugaagaacggcaccuacgacuaccccaaguacagcgaggaggccaagcugaacagagaggagaucgacggcgugaagcuggagagcaccagaaucuaccagauccuggccaucuacagcaccguggccagcagccuggugcugguggugagccugggcgccaucagcuucuggaugugcagcaacggcagccugcagugcagaaucugcaucuga

SEQ ID NO: 172976 - RNA, 1701 nt, Artificial Sequence; identical to SEQ ID NO: 167102
  derived and/or modified CDS sequence (opt4) from hemagglutinin__InfluenzaA__AJJ99741

SEQ ID NO: 172977 - RNA, 1701 nt, Artificial Sequence; identical to SEQ ID NO: 163893
  derived and/or modified CDS sequence (opt4) from hemagglutinin__InfluenzaA__AJJ99752

SEQ ID NO: 172978 - RNA, 1701 nt, Artificial Sequence; identical to SEQ ID NO: 162729
  derived and/or modified CDS sequence (opt4) from hemagglutinin__InfluenzaA__AJJ99763

SEQ ID NO: 172979 - RNA, 1698 nt, Artificial Sequence
  derived and/or modified CDS sequence (opt4) from hemagglutinin__InfluenzaA__AJJ99775
augaaggugaagcugcuggugcugcugugcaccuucaccgccaccuacgccgacaccaucugcaucggcuaccacgccaacaacagcaccgacaccguggacaccgugcuggagaagaacgugaccgugacccacagcgugaaccugcuggagaacagccacaacggcaagcugugccugcugaagggcaucgccccccugcagcugggcaacugcagcguggccggcuggauccugggcaaccccgagugcgagcugcugaucagcaaggagagcuggagcuacaucguggagaagcccaaccccgagaacggcaccugcuaccccggccacuucgccgacuacgaggagcugagagagcagcugagcagcgugagcagcuucgagagauucgagaucuuccccaaggagagcagcuggcccaaccacaccgugaccggcgugagcgccagcugcagccacaacggcgagaacagcuucuacagaaaccugcuguggcugaccggcaagaacggccuguaccccaaccugagcaagagcuacgccaacaacaaggagaaggaggugcuggugcuguggggcgugcaccacccccccaacaucgccgaccagaagacccuguaccacaccgagaacgccuacgugagcguggugagcagccacuacagcagaaaguucacccccgagaucgccaagagacccaaggugagagaccaggagggcagaaucaacuacuacuggacccugcuggagcccggcgacaccaucaucuucgaggccaacggcaaccugaucgcccccagauacgccuucgcccugagcagaggcuucggcagcggcaucaucaacagcaacgcccccaccgacaagugcgacgccaagugccagaccccccagggcgccaucaacagcagccugcccuuccagaacgugcaccccgugaccaucggcgagugccccaaguacgugagaagcgccaagcugagaauggugaccggccugagaaacauccccagcauccagagcagaggccuguucggcgccaucgccggcuucaucgagggcggcuggaccggcaugguggacggcugguacggcuaccaccaccagaacgagcagggcagcggcuacgccgccgaccagaagagcacccagaacgccaucaacggcaucaccaacaaggugaacagcgugaucgagaagaugaacacccaguucaccgccgugggcaaggaguucaacaagcuggagagaagaauggagaaccugaacaagaagguggacgacggcuucaucgacaucuggaccuacaacgccgagcugcuggugcugcuggagaacgagagaacccuggacuuccacgacagcaacgugaagaaccuguacgagaaggugaagagccagcugaagaacaacgccaaggagaucggcaacggcugcuucgaguucuaccacaagugcaacgacgagugcauggagagcgugaagaacggcaccuacgacuaccccaaguacagcgaggagagcaagcugaacagagagaagaucgacggcgugaagcuggagagcaugggcguguaccagauccuggccaucuacagcaccguggccagcagccuggugcugcuggugagccugggcgccaucagcuucuggaugugcagcaacggcagccugcagugcagaaucugcaucuga

SEQ ID NO: 172980 - RNA, 1701 nt, Artificial Sequence
  derived and/or modified CDS sequence (opt4) from hemagglutinin__InfluenzaA__AJJ99786
augaaggccauccugguggugcugcuguacaccuucgccaccgccaacgccgacacccugugcaucggcuaccacgccaacaacagcaccgacaccguggacaccgugcuggagaagaacgugaccgugacccacagcgugaaccugcuggaggacaagcacaacggcaagcugugcaagcugagaggcguggccccccugcaccugggcaagugcaacaucgccggcuggauccugggcaaccccgagugcgagagccugagcaccgccagcagcuggagcuacaucguggagaccagcagcagcgacaacggcaccugcuaccccggcgacuucaucgacuacgaggagcugagagagcagcugagcagcgugagcagcuucgagagauucgagaucuuccccaagaccagcagcuggcccaaccacgacagcaacaagggcgugaccgccgccugcccccacgccggcgccaagagcuucuacaagaaccugaucuggcuggugaagaagggcaacagcuaccccaagcugagcaagagcuacaucaacgacaagggcaaggaggugcuggugcuguggggcauccaccaccccagcaccagcgccgaccagcagagccuguaccagaacgccgacgccuacguguucgugggcaccagcagauacagcaagaaguucaagcccgagaucgccaucagacccaaggugagagaccaggagggcagaaugaacuacuacuggacccugguggagcccggcgacaagaucaccuucgaggccaccggcaaccugguggugcccagauacgccuucgccauggagagagacgccggcagcggcaucaucaucagcgacacccccgugcacgacugcaacaccaccugccagacccccaagggcgccaucaacaccagccugcccuuccagaacauccaccccaucaccaucggcaagugccccaaguacgugaagagcaccaagcugagacuggccaccggccugagaaacauccccagcauccagagcagaggccuguucggcgccaucgccggcuucaucgagggcggcuggaccggcaugguggacggcugguacggcuaccaccaccagaacgagcagggcagcggcuacgccgccgaccugaagagcacccagaacgccaucgacgagaucaccaacaaggugaacagcgugaucgagaagaugaacacccaguucaccgccgugggcaaggaguucaaccaccuggagaagagaaucgagaaccugaacaagaagaucgacgacggcuuccuggacaucuggaccuacaacgccgagcugcuggugcugcuggagaacgagagaacccuggacuaccacgacagcaacgugaagaaccuguacgagaaggugagaagccagcugaagaacaacgccaaggagaucggcaacggcugcuucgaguucuaccacaagugcgacaacaccugcauggagagcgugaagaacggcaccuacgacuaccccaaguacagcgaggaggccaagcugaacagagaggagaucgacggcgugaagcuggagagcaccagaaucuaccagauccuggccaucuacagcgccguggccagcagccuggugcugguggugagccugggcgccaucagcuucuggaugugcagcaacggcagccugcagugcagaaucugcaucuga

SEQ ID NO: 172981 - RNA, 1698 nt, Artificial Sequence
  derived and/or modified CDS sequence (opt4) from hemagglutinin__InfluenzaA__AJJ99798
augaaggugaagcugcuggugcugcugugcaccuucaccgccaccuacgccgacaccaucugcaucggcuaccacgccaacaacagcaccgacaccguggacaccgugcuggagaagaacgugaccgugacccacagcgugaaccugcuggagaacagccacaacggcaagcugugccugcugaagggcaucgccccccugcagcugggcaacugcagcguggccggcuggauccugggcaaccccgagugcgagcugcugaucagcaaggagagcuggagcuacaucguggagagacccaaccccgagaacggcaccugcuaccccggccacuucgccgacuacgaggagcugagagagcagcugagcagcgugagcagcuucgagagauucgagaucuuccccaaggagagcagcuggcccaaccacaccgugaccggcgugagcgccagcugcagccacaacggcgagaacagcuucuacagaaaccugcuguggcugaccggcaagaacggccuguaccccaaccugagcaagagcuacgccaacaacaaggagaaggaggugcuggugcuguggggcgugcaccacccccccaacaucgccaaccagaagacccuguaccacaccgagaacgccuacgugagcguggugagcagccacuacagcagaaaguucacccccgagaucgccaagagacccaaggugagagaccaggagggcagaaucaacuacuacuggacccugcuggagcccggcgacaccaucauguucgaggccaacggcaaccugaucgcccccagauacgccuucgcccugagcagaggcuucggcagcggcaucaucaacagcaacgcccccauggacaagugcgacgccaagugccagaccccccagggcgccaucaacagcagccugcccuuccagaacgugcaccccgugaccaucggcgagugccccaaguacgugagaagcgccaagcugagaauggugaccggccugagaaacauccccagcauccagagcagaggccuguucggcgccaucgccggcuucaucgagggcggcuggaccggcaugguggacggcugguacggcuaccaccaccagaacgagcagggcagcggcuacgccgccgaccagaagagcacccagaacgccaucaacggcaucaccaacaaggugaacagcgugaucgagaagaugaacacccaguucaccgccgugggcaaggaguucaacaagcuggagagaagaauggagaaccugaacaagaagguggacgacggcuucaucgacaucuggaccuacaacgccgagcugcuggugcugcuggagaacgagagaacccuggacuuccacgacagcaacgugaagaaccuguacgagaaggugaagagccagcugaagaacaacgccaaggagaucggcaacggcugcuucgaguucuaccacaagugcaacgacgagugcauggagagcgugaagaacggcaccuacgacuaccccaaguacagcgaggagagcaagcugaacagagagaagaucgacggcgugaagcuggagagcaugggcguguaccagauccuggccaucuacagcaccguggccagcagccuggugcugcuggugagccugggcgccaucagcuucuggaugugcagcaacggcagccugcagugcagaaucugcaucuga

SEQ ID NO: 172982 - RNA, 1698 nt, Artificial Sequence; identical to SEQ ID NO: 162548
  derived and/or modified CDS sequence (opt4) from hemagglutinin__InfluenzaA__AJJ99810

SEQ ID NO: 172983 - RNA, 1698 nt, Artificial Sequence
  derived and/or modified CDS sequence (opt4) from hemagglutinin__InfluenzaA__AJJ99822
augaaggugaagcugcuggugcugcugugcaccuucaccgccaccuacgccgacaccaucugcaucggcuaccacgccaacaacagcaccgacaccguggacaccgugcuggagaagaacgugaccgugacccacagcgugaaccugcuggagaacagccacaacggcaagcugugccugcugaagggcaucgccccccugcagcugggcaacugcagcguggccggcuggauccugggcaaccccgagugcgagcugcugaucagcaaggagagcuggagcuacaucguggagaagcccaaccccgagaacggcaccugcuaccccggccacuucgccgacuacgaggagcugagagagcagcugagcagcgugagcagcuucgagagauucgagaucuuccccaaggagagcagcuggcccaaccacaccgugaccggcgugagcgccagcugcagccacaacggcgagagcagcuucuacagaaaccugcuguggcugaccggcaagaacggccuguaccccaaccugagcaagagcuacgccaacaacaaggagaaggaggugcuggugcuguggggcgugcaccacccccccaacaucggcgaccagaaggcccuguaccacaccgagaacgccuacgugagcguggugagcagccacuacagcagaaaguucacccccgagaucgccaagagacccaaggugagagaccaggagggcagaaucaacuacuacuggacccugcuggagcccggcgacaccaucaucuucgaggccaacggcaaccugaucgcccccagauacgccuucgcccugagcagaggcuucggcagcggcaucaucaacagcaacgcccccauggacaagugcgacgccaagugccagaccccccagggcgccaucaacagcagccugcccuuccagaacgugcaccccgugaccaucggcgagugccccaaguacgugagaagcgccaagcugagaauggugaccggccugagaaacauccccuucauccagagcagaggccuguucggcgccaucgccggcuucaucgagggcggcuggaccggcaugguggacggcugguacggcuaccaccaccagaacgagcagggcagcggcuacgccgccgaccagaagagcacccagaacgccaucaacggcaucaccaacaaggugaacagcgugaucgagaagaugaacacccaguucaccgccgugggcaaggaguucaacaagcuggagagaagaauggagaaccugaacaagaagguggacgacggcuucaucgacaucuggaccuacaacgccgagcugcuggugcugcuggagaacgagagaacccuggacuuccacgacagcaacgugaagaaccuguacgagaaggugaagagccagcugaagaacaacgccaaggagaucggcaacggcugcuucgaguucuaccacaagugcaacgacgagugcauggagagcgugaagaacggcaccuacgacuaccccaaguacagcgaggagagcaagcugaacagagagaagaucgacggcgugaagcuggagagcaugggcguguaccagauccuggccaucuacagcaccguggccagcagccuggugcugcuggugagccugggcgccaucagcuucuggaugugcagcaacggcagccugcagugcagaaucugcaucuga

SEQ ID NO: 172984 - RNA, 1701 nt, Artificial Sequence
  derived and/or modified CDS sequence (opt4) from hemagglutinin__InfluenzaA__AJJ99833
augaaggccauccugcuggugcugcuguacaccuucgccaccgccaacgccgacacccugugcaucggcuaccacgccaacaacagcaccgacaccguggacaccgugcuggagaagaacgugaccgugacccacagcgugaaccugcuggaggacaagcacaacggcaagcugugcaagcugagaggcguggccccccugcaccugggcaagugcaacaucgccggcuggauccugggcaaccccgagugcgagagccugagcaccgccagcagcuggagcuacaucguggagaccagcagcagcgacaacggcaccugcuaccccggcgacuucaucaacuacgaggagcugagagagcagcugagcagcgugagcagcuucgagagauucgagaucuuccccaagaccagcagcuggcccaaccacgacagcaacaagggcgugaccgccgccugccccagagccggcgccaagagcuucuacaagaaccugaucuggcuggugaagaagggcaacagcuaccugaagcugagcaagagcuacaucaacgacaagggcaaggaggugcuggugcuguggggcauccaccaccccagcaccaccgccgaccagcagagccuguaccagaacgccgacgccuacguguucgugggcaccagcagauacagcaagaaguucaagcccgagaucgccaucagacccaaggugagagaccaggagggcagaaugaacuacuacuggacccugguggagcccggcgacaagaucaccuucgaggccaccggcaaccugcuggugcccagauacgccuucgccauggagagaaacgccggcagcggcaucaucaucagcgacacccccgugcacgacugcaacaccaccugccagacccccaagggcgccaucaacaccagccugcccuuccagaacauccaccccaucaccaucggcaagugccccaaguacgugaagagcaccaagcugagacuggccaccggccugagaaacgugcccagcauccagagcagaggccuguucggcgccaucgccggcuucaucgagggcggcuggaccggcaugguggacggcugguacggcuaccaccaccagaacgagcagggcagcggcuacgccgccgaccugaagagcacccagaacgccaucgacaagaucaccaacaaggugaacagcgugaucgagaagaugaacacccaguucaccgccgugggcaaggaguucaaccaccuggagaagagaaucgagaaccugaacaagaagguggacgacggcuuccuggacaucuggaccuacaacgccgagcugcuggugcugcuggagaacgagagaacccuggacuaccacgacagcaacgugaagaaccuguacgagaaggugagaaaccagcugaagaacaacgccaaggagaucggcaacggcugcuucgaguucuaccacaagugcgacaacaccugcauggagagcgugaagaacggcaccuacgacuaccccaaguacagcgaggaggccaagcugaacagagaggagaucgacggcgugaagcuggagagcaccagaaucuaccagauccuggccaucuacagcaccguggccagcagccuggugcugguggugagccugggcgccaucagcuucuggaugugcagcaacggcagccugcagugcagaaucugcaucuga

SEQ ID NO: 172985 - RNA, 1701 nt, Artificial Sequence; identical to SEQ ID NO: 166884
  derived and/or modified CDS sequence (opt4) from hemagglutinin__InfluenzaA__AJJ99844

SEQ ID NO: 172986 - RNA, 1701 nt, Artificial Sequence
  derived and/or modified CDS sequence (opt4) from hemagglutinin__InfluenzaA__AJJ99855
augaaggccauccugguggugcugcuguacaccuucgccaccgccaacgccgacacccugugcaucggcuaccacgccaacaacagcaccgacaccguggacaccgugcuggagaagaacgugaccgugacccacagcgugaaccugcuggaggacaagcacaacggcaagcugugcaagcugagaggcguggccccccugcaccugggcaagugcaacaucgccggcuggauccugggcaaccccgagugcgagagccugagcaccgccagcagcuggagcuacaucguggagaccagcagcagcgacaacggcaccugcuaccccggcgacuucaucgacuacgaggagcugagagagcagcugagcagcgugagcagcuucgagagauucgagaucuuccccaagaccagcagcuggcccaaccacgacagcaacaagggcgugaccgccgccugcccccacgccggcgccaagagcuucuacaagaaccugaucuggcuggugaagaagggcaacagcuaccccaagcugagcaagagcuacaucaacgacaagggcaaggaggugcuggugcuguggggcauccaccaccccagcaccaccgccgaccagcagagccuguaccagaacgccgacaccuacguguucgugggcaccagcagauacagcaagaaguucaagcccgagaucgccaucagacccaaggugagagaccaggagggcagaaugaacuacuacuggacccugguggagcccggcgacaagaucaccuucgaggccaccggcaaccugguggugcccagauacgccuucgccauggagagaaacgccggcagcggcaucaucaucagcgacacccccgugcacgacugcaacaccaccugccagacccccaagggcgccaucaacaccagccugcccuuccagaacauccaccccaucaccaucggcaagugccccaaguacgugaagagcaccaagcugagacuggccaccggccugagaaacgugcccagcauccagagcagaggccuguucggcgccaucgccggcuucaucgagggcggcuggaccggcaugguggacggcugguacggcuaccaccaccagaacgagcagggcagcggcuacgccgccgaccugaagagcacccagaacgccaucgacaagaucaccaacaaggugaacagcgugaucgagaagaugaacacccaguucaccgccgugggcaaggaguucaaccaccuggagaagagaaucgagaaccugaacaagaagguggacgacggcuuccuggacaucuggaccuacaacgccgagcugcuggugcugcuggagaacgagagaacccuggacuaccacgacagcaacgugaagaaccuguacgagaaggugagaaaccagcugaagaacaacgccaaggagaucggcaacggcugcuucgaguucuaccacaagugcgacagcaccugcauggagagcgugaagaacggcaccuacgacuaccccaaguacagcgaggaggccaagcugaacagagaggagaucgacggcgugaagcuggagagcaccagaaucuaccagauccuggccaucuacagcaccguggccagcagccuggugcugguggugagccugggcgccaucagcuucuggaugugcagcaacggcagccugcagugcagaaucugcaucuga

SEQ ID NO: 172987 - RNA, 1701 nt, Artificial Sequence
  derived and/or modified CDS sequence (opt4) from hemagglutinin__InfluenzaA__AJJ99866
augaaggccauccugguggugcugcuguacaccuucgccaccgccaacgccgacacccugugcaucggcuaccacgccaacaacagcaccgacaccguggacaccgugcuggagaagaacgugaccgugacccacagcgugaaccugcuggaggacaagcacaacggcaagcugugcaagcugaagggcguggccccccugcaccugggcaagugcaacaucgccggcuggauccugggcaaccccgagugcgagagccugagcaccgccagcagcuggagcuacaucguggagaccagcagcagcgacaacggcaccugcuaccccggcgacuucaucgacuacgaggagcugagagagcagcugagcagcgugagcagcuucgagagauucgagaucuuccccaagaccagcagcuggcccaaccacgacagcaacaagggcgugaccgccgccugcccccacgccggcgccaagagcuucuacaagaaccugaucuggcuggugaagaagggcaacagcuaccccaagcugagcaagagcuacaucaacgacaagggcaaggaggugcuggugcuguggggcauccaccaccccagcaccagcgccgaccagcagagccuguaccagaacgccgacgccuacguguucgugggcaccagcagauacagcaagaaguucaagcccgagaucgccaucagacccaaggugagagaccaggagggcagaaugaacuacuacuggacccugguggagcccggcgacaagaucaccuucgaggccaccggcaaccugguggugcccagauacgccuucgccauggagagaaacgccggcagcggcaucaucaucagcgacacccccgugcacgacugcaacaccaccugccagacccccaagggcgccaucaacaccagccugcccuuccagaacauccaccccaucaccaucggcaagugccccaaguacgugaagagcaccaagcugagacuggccaccggccugagaaacgugcccagcauccagagcagaggccuguucggcgccaucgccggcuucaucgagggcggcuggaccggcaugguggacggcugguacggcuaccaccaccagaacgagcagggcagcggcuacgccgccgaccugaagagcacccagaacgccaucgacgagaucaccaacaaggugaacagcgugaucgagaagaugaacacccaguucaccgccgugggcaaggaguucaaccaccuggagaagagaaucgagaaccugaacaagaagguggacgacggcuuccuggacaucuggaccuacaacgccgagcugcuggugcugcuggagaacgagagaacccuggacuaccacgacagcaacgugaagaaccuguacgagaaggugagaagccagcugaagaacaacgccaaggagaucggcaacggcugcuucgaguucuaccacaagugcgacaacaccugcauggagagcgugaagaacggcaccuacgacuaccccaaguacagcgaggaggccaagcugaacagagaggagaucgacggcgugaagcuggagagcaccagaaucuaccagauccuggccaucuacagcaccguggccagcagccuggugcugguggugagccugggcgccaucagcuucuggaugugcagcaacggcagccugcagugcagaaucugcaucuga

SEQ ID NO: 172988 - RNA, 1701 nt, Artificial Sequence
  derived and/or modified CDS sequence (opt4) from hemagglutinin__InfluenzaA__AJJ99877
auggaggccauccugguggugcugcuguacaccuucgccaccgccaacgccgacacccugugcaucggcuaccacgccaacaacagcaccgacaccguggacaccgugcuggagaagaacgugaccgugacccacagcgugaaccugcuggaggacaagcacaacggcaagcugugcaagcugagaggcguggccccccugcaccugggcaagugcaacaucgccggcuggauccugggcaaccccgagugcgagagccugagcaccgccagcagcuggagcuacaucguggagaccagcagcagcgacaacggcaccugcuaccccggcgacuucaucgacuacgaggagcugagagagcagcugagcagcgugagcagcuucgagagauucgagaucuuccccaagaccagcagcuggcccaaccacgacagcaacaagggcgugaccgccgccugcccccacgccggcgccaagagcuucuacaagaaccugaucuggcuggugaagaagggcaacagcuaccccaagcugagcaagagcuacaucaacgacaagggcaaggaggugcuggugcuguggggcauccaccaccccagcaccagcgccgaccagcagagccuguaccagaacgccgacgccuacguguucgugggcagcagcagauacagcaagaaguucaagcccgagaucgccaucagacccaaggugagagaccaggagggcagaaugaacuacuacuggacccugguggagcccggcgacaagaucaccuucgaggccaccggcaaccugguggugcccagauacgccuucgccauggagagaaacgccggcagcggcaucaucaucagcgacacccccgugcacgacugcaacaccaccugccagacccccaagggcgccaucaacaccagccugcccuuccacaacauccaccccaucaccaucggcaagugccccaaguacgugaagagcaccaagcugagacuggccaccggccugagaaacgugcccagcauccagagcagaggccuguucggcgccaucgccggcuucaucgagggcggcuggaccggcaugguggacggcugguacggcuaccaccaccagaacgagcagggcagcggcuacgccgccgaccugaagagcacccagaacgccaucgacgagaucaccaacaaggugaacagcgugaucgagaagaugaacacccaguucaccgccgugggcaaggaguucaaccaccuggagaagagaaucgagaaccugaacaagaagguggacgacggcuuccuggacaucuggaccuacaacgccgagcugcuggugcugcuggagaacgagagaacccuggacuaccacgacagcaacgugagaaaccuguacgagaaggugagaagccagcugaagaacaacgccaaggagaucggcaacggcugcuucgaguucuaccacaagugcgacaacaccugcauggagagcgugaagaacggcaccuacgacuaccccaaguacagcgaggaggccaagcugaacagagaggagaucgacggcgugaagcuggagagcaccagaaucuaccagauccuggccaucuacagcaccguggccagcagccuggugcugguggugagccugggcgccaucagcuucuggaugugcagcaacggcagccugcagugcagaaucugcaucuga

SEQ ID NO: 172989 - RNA, 1701 nt, Artificial Sequence
  derived and/or modified CDS sequence (opt4) from hemagglutinin__InfluenzaA__AJJ99888
augaaggccauccugguggugcugcuguacaccuucgccaccgccaacgccgacacccugugcaucggcuaccacgccaacaacagcaccgacaccguggacaccgugcuggagaagaacgugaccgugacccacagcgugaaccugcuggaggacaagcacaacggcaagcugugcaagcugagaggcguggccccccugcaccugggcaagugcaacaucgccggcuggauccugggcaaccccgagugcgagagccugagcaccgccagcagcuggagcuacaucguggagaccagcagcagcgacaacggcaccugcuaccccggcgacuucaucgacuacgaggagcugagagagcagcugagcagcgugagcagcuucgagagauucgagaucuuccccaagaccagcagcuggcccaaccacgacagcaacaagggcgugaccgccgccugcccccacgccggcgccaagggcuucuacaagaaccugaucuggcuggugaagaagggcaacagcuaccccaagcugagcaagagcuacaucaacgacaagggcaaggaggugcuggugcuguggggcauccaccaccccagcaccagcgccgaccagcagagccuguaccagaacgccgacgccuacguguucgugggcaccagcagauacagcaagaaguucaagcccgagaucgccaucagacccaaggugagagaccaggagggcagaaugaacuacuacuggacccugguggagcccggcgacaagaucaccuucgaggccaccggcaaccugguggugcccagauacgccuucgccauggagagagacgccggcagcggcaucaucaucagcgacacccccgugcacgacugcaacaccaccugccagacccccaagggcgccaucaacaccagccugcccuuccagaacauccaccccaucaccaucggcaagugccccaaguacgugaagagcaccaagcugagacuggccaccggccugagaaacgugcccagcauccagagcagaggccuguucggcgccaucgccggcuucaucgagggcggcuggaccggcaugguggacggcugguacggcuaccaccaccagaacgagcagggcagcggcuacgccgccgaccugaagagcacccagaacgccaucgacgagaucaccaacaaggugaacagcgugaucgagaagaugaacacccaguucaccgccgugggcaaggaguucaaccaccuggagaagagaaucgagaaccugaacaagaagaucgacgacggcuuccuggacaucuggaccuacaacgccgagcugcuggugcugcuggagaacgagagaacccuggacuaccacgacagcaacgugaagaaccuguacgagaaggugagaagccagcugaagaacaacgccaaggagaucggcaacggcugcuucgaguucuaccacaagugcgacaacaccugcauggagagcgugaagaacggcaccuacgacuaccccaaguacagcgaggaggccaagcugaacagagaggagaucgacggcgugaagcuggagagcaccagaaucuaccagauccuggccaucuacagcaccguggccagcagccuggugcugguggugagccugggcgccaucagcuucuggaugugcagcaacggcagccugcagugcagaaucugcaucuga

SEQ ID NO: 172990 - RNA, 1701 nt, Artificial Sequence
  derived and/or modified CDS sequence (opt4) from hemagglutinin__InfluenzaA__AJJ99899
augaaggccauccugguggugcugcuguacaccuucgccaccgccaacgccgacacccugugcaucggcuaccacgccaacaacagcaccgacaccguggacaccgugcuggagaagaacgugaccgugacccacagcgugaaccugcuggaggacaagcacaacggcaagcugugcaagcugagaggcguggccccccugcaccugggcaagugcaacaucgccggcuggauccugggcaaccccgagugcgagagccugagcaccgccagcagcuggagcuacaucguggagaccagcagcagcgacaacggcaccugcuaccccggcgacuucaucaacuacgaggagcugagagagcagcugagcagcgugagcagcuucgagagauucgagaucuuccccaagaccagcagcuggcccaaccacgacagcaacaagggcgugaccgccgccugccccagagccggcgccaagagcuucuacaagaaccugaucuggcuggugaagaagggcaacagcuaccccaaccugagcaagagcuacaucaacgacaagggcaaggaggugcuggugcuguggggcauccaccaccccagcaccaccgccgaccagcagagccuguaccagaacgccgacgccuacguguucgugggcaccagcagauacagcaagaaguucaagcccgagaucgccaucagacccaaggugagagaccaggagggcagaaugaacuacuacuggacccugcuggagcccggcgacaagaucaccuucgaggccaccggcaaccugcuggugcccagauacgccuucgccauggagagaaacgccggcagcggcaucaucaucagcgacacccccgugcacgacugcaacaccaccugccagacccccaagggcgccaucaacaccagccugcccuuccagaacauccaccccaucaccaucggcaagugccccaaguacgugaagagcaccaagcugagacuggccaccggccugagaaacgugcccagcauccagagcagaggccuguucggcgccaucgccggcuucaucgagggcggcuggaccggcaugguggacggcugguacggcuaccaccaccagaacggccagggcagcggcuacgccgccgaccugaagagcacccagaacgccguggacaagaucaccaacaaggugaacagcgugaucgagaagaugaacacccaguucaccgccgugggcaaggaguucaaccaccuggagaagagaaucgagaaccugaacaagaagguggacgacggcuuccuggacaucuggaccuacaacgccgagcugcuggugcugcuggagaacgagagaacccuggacuaccacgacagcaacgugaagaaccuguacgagaaggugagaaaccagcugaagaacaacgccaaggagaucggcaacggcugcuucgaguucuaccacaagugcgacaacaccugcauggagagcgugaagaacggcaccuacgacuaccccaaguacagcgaggaggccaagcugaacagagaggagaucgacggcgugaagcuggagagcaccagaaucuaccagauccuggccaucuacagcaccguggccagcagccuggugcugguggugagccugggcgccaucagcuucuggaugugcagcaacggcagccugcagugcagaaucugcaucuga

SEQ ID NO: 172991 - RNA, 1701 nt, Artificial Sequence
  derived and/or modified CDS sequence (opt4) from hemagglutinin__InfluenzaA__AJJ99910
augaaggccauccugguggugcugcuguacaccuucgccaccgccaacgccgacacccugugcaucggcuaccacgccaacaacagcaccgacaccguggacaccgugcuggagaagaacgugaccgugacccacagcgugaaccugcuggaggacaagcacaacggcaagcugugcaagcugagaggcguggccccccugcaccugggcaagugcaacaucgccggcuggauccugggcaaccccgagugcgagagccugagcaccgccagcagcuggagcuacaucguggagaccagcagcagcgacaacggcaccugcuaccccggcgacuucaucgacuacgaggagcugagagagcagcugagcagcgugagcagcuucgagagauucgagaucuuccccaagaccagcagcuggcccaaccacgacagcgacaagggcgugaccgccgccugcccccacgccggcgccaagagcuucuacaagaaccugaucuggcuggugaagaagggcaacagcuaccccaagcugagcaagagcuacaucaacgacaagggcaaggaggugcuggugcuguggggcauccaccaccccagcaccaccgccgaccagcagagccuguaccagaacgccgacaccuacguguucgugggcaccagcagauacagcaagaaguucaagcccgagaucgccaucagacccaaggugagagaccaggagggcagaaugaacuacuacuggacccugguggagcccggcgacaagaucaccuucgaggccaccggcaaccugguggugcccagauacgccuucgccauggagagaaacgccggcagcggcaucaucaucagcgacacccccgugcacgacugcaacaccaccugccagacccccaagggcgccaucaacaccagccugcccuuccagaacauccaccccaucaccaucggcaagugccccaaguacgugaagagcaccaagcugagacuggccaccggccugagaaacgugcccagcauccagagcagaggccuguucggcgccaucgccggcuucaucgagggcggcuggaccggcaugguggacggcugguacggcuaccaccaccagaacgagcagggcagcggcuacgccgccgaccugaagagcacccagaacgccaucgacaagaucaccaacaaggugaacagcgugaucgagaagaugaacacccaguucaccgccgugggcaaggaguucaaccaccuggagaagagaaucgagaaccugaacaagaagguggacgacggcuuccuggacaucuggaccuacaacgccgagcugcuggugcugcuggagaacgagagaacccuggacuaccacgacagcaacgugaagaaccuguacgagaaggugagaaaccagcugaagaacaacgccaaggagaccggcaacggcugcuucgaguucuaccacaagugcgacaacaccugcauggagagcgugaagaacggcaccuacgacuaccccaaguacagcgaggaggccaagcugaacagagagaagaucgacggcgugaagcuggagagcaccagaaucuaccagauccuggccaucuacagcaccguggccagcagccuggugcugguggugagccugggcgccaucagcuucuggaugugcagcaacggcagccugcagugcagaaucugcaucuga

SEQ ID NO: 172992 - RNA, 1701 nt, Artificial Sequence; identical to SEQ ID NO: 166884
  derived and/or modified CDS sequence (opt4) from hemagglutinin__InfluenzaA__AJJ99921

SEQ ID NO: 172993 - RNA, 1701 nt, Artificial Sequence
  derived and/or modified CDS sequence (opt4) from hemagglutinin__InfluenzaA__AJJ99932
augaaggccauccugguggugcugcuguacaccuucgccaccgccaacgccgacacccugugcaucggcuaccacgccaacaacagcaccgacaccguggacaccgugcuggagaagaacgugaccgugacccacagcgugaaccugcuggaggacaagcacaacggcaagcugugcaagcugagaggcguggccccccugcaccugggcaagugcgacaucgccggcuggauccugggcaaccccgagugcgagagccugagcaccgccagcagcuggagcuacaucguggagaccagcagcagcgacaacggcaccugcuaccccggcgacuucaucgacuacgaggagcugagagagcagcugagcagcgugagcagcuucgagagauucgagaucuuccccaagaccagcagcuggcccaaccacgacagcaacaagggcgugaccgccgccugcccccacgccggcgccaagagcuucuacaagaaccugaucuggcuggugaagaagggcaacagcuaccccaagcugagcaagagcuacaucaacgacaagggcaaggaggugcuggugcuguggggcauccaccaccccagcaccaccgccgaccagcagagccuguaccagaacgccgacgccuacguguucgugggcaccagcagauacagcaagaaguucaagcccgagaucgccaucagacccaaggugagagaccaggagggcagaaugaacuacuacuggacccugguggagcccggcgacaagaucaccuucgaggccaccggcaaccugguggugcccagauacgccuucgccauggagagaaacgccggcagcggcaucaucaucagcgacacccccgugcacgacugcaacaccaccugccagacccccaagggcgccaucaacaccagccugcccuuccagaacauccaccccaucaccaucggcaagugccccaaguacgugaagagcaccaagcugagacuggccaccggccugagaaacgugcccagcauccagagcagaggccuguucggcgccaucgccggcuucaucgagggcggcuggaccggcaugguggacggcugguacggcuaccaccaccagaacgagcagggcagcggcuacgccgccgaccugaagagcacccagaacgccaucgacaagaucaccaacaaggugaacagcgugaucgagaagaugaacacccaguucaccgccgugggcaaggaguucaaccaccuggagaagagaaucgagaaccugaacaagaagguggacgacggcuuccuggacaucuggaccuacaacgccgagcugcuggugcugcuggagaacgagagaacccuggacuaccacgacagcaacgugaagaaccuguacgagaaggugagaaaccagcugaagaacaacgccaaggagaucggcaacggcugcuucgaguucuaccacaagugcgacaacaccugcauggagagcgugaagaacggcaccuacgacuaccccaaguacagcgaggaggccaagcugaacagagaggagaucgacggcgugaagcuggagagcaccagaaucuaccagauccuggccaucuacagcaccguggccagcagccuggugcugguggugagccugggcgccaucagcuucuggaugugcagcaacggcagccugcagugcagaaucugcaucuga

SEQ ID NO: 172994 - RNA, 1701 nt, Artificial Sequence; identical to SEQ ID NO: 166514
  derived and/or modified CDS sequence (opt4) from hemagglutinin__InfluenzaA__AJJ99943

SEQ ID NO: 172995 - RNA, 1701 nt, Artificial Sequence
  derived and/or modified CDS sequence (opt4) from hemagglutinin__InfluenzaA__AJJ99954
augaaggccauccugguggugcugcuguacaccuucgccaccgccaacgccgacacccugugcaucggcuaccacgccaacaacagcaccgacaccguggacaccgugcuggagaagaacgugaccgugacccacagcgugaaccugcuggaggacaagcacaacggcaagcugugcaagcugagaggcguggccccccugcaccugggcaagugcaacaucgccggcuggauccugggcaaccccgagugcgagagccugagcaccgccagcagcuggagcuacaucguggagaccagcagcagcgacaacggcaccugcuaccccggcgacuucaucgacuacgaggagcugagagagcagcugagcagcgugagcagcuucgagaaguucgagaucuuccccaagaccagcagcuggcccaaccacgacagcaacaagggcgugaccgccgccugcccccacgccggcgccaagagcuucuacaagaaccugaucuggcuggugaagaagggcaacagcuaccccaagcugagcaagagcuacaucaacgacaagggcaaggaggugcuggugcuguggggcauccaccaccccagcaccagcgccgaccagcagagccuguaccagaacgccgacgccuacguguucgugggcaccagcagauacagcaagaaguucaagcccgagaucgccaucagacccaaggugagagaccaggagggcagaaugaacuacuacuggacccugguggagcccggcgacaagaucaccuucgaggccaccggcaaccugguggugcccagauacgccuucgccauggagagaaacgccggcagcggcaucaucaccagcgacacccccgugcacgacugcaacaccaccugccagacccccaagggcgccaucaacaccagccugcccuuccagaacauccaccccaucaccaucggcaacugccccaaguacgugaagagcaccaagcugagacuggccaccggccugagaaacgugcccagcauccagagcagaggccuguucggcgccaucgccggcuucaucgagggcggcuggaccggcaugguggacggcugguacggcuaccaccaccagaacgagcagggcagcggcuacgccgccgaccugaagagcacccagaacgccaucgacaagaucaccaacaaggugaacagcgugaucgagaagaugaacacccaguucaccgccgugggcaaggaguucaaccaccuggagaagagaaucgagaaccugaacaagaagguggacgacggcuuccuggacaucuggaccuacaacgccgagcugcuggugcugcuggagaacgagagaacccuggacuaccacgacagcaacgugaagaaccuguacgagaaggugagaagccagcugaagaacaacgccaaggagaucggcaacggcugcuucgaguucuaccacaagugcgacaacaccugcauggagagcgugaagaacggcaccuacgacuaccccaaguacagcgaggaggccaagcugaacagagaggagaucgacggcgugaagcuggagagcaccagaaucuaccagauccuggccaucuacagcaccguggccagcagccuggugcugguggugagccugggcgccaucagcuucuggaugugcagcaacggcagccugcagugcagaaucugcaucuga

SEQ ID NO: 172996 - RNA, 1701 nt, Artificial Sequence; identical to SEQ ID NO: 162971
  derived and/or modified CDS sequence (opt4) from hemagglutinin__InfluenzaA__AJJ99965

SEQ ID NO: 172997 - RNA, 1698 nt, Artificial Sequence
  derived and/or modified CDS sequence (opt4) from hemagglutinin__InfluenzaA__AJJ99989
augaaggugaagcugcuggugcugcugugcaccuucaccgccaccuacgccgacaccaucugcaucggcuaccacgccaacaacagcaccgacaccguggacaccgugcuggagagaaacgugaccgugacccacagcgugaaccugcuggagaacagccacaacggcaagcugugccugcugaagggcaucgccccccugcagcugggcaacugcagcguggccggcuggauccugggcaaccccgagugcgagcugcugaucagcaaggagagcuggagcuacaucguggagaagcccaaccccgagaacggcaccugcuaccccggccacuucgccgacuacgaggagcugagagagcagcugagcagcgugagcagcuucgagagauucgagaucuuccccaaggagagcagcuggcccaaccacaccgugaccggcgugagcgccagcugcagccacaacggcgagagcagcuucuacagaaaccugcuguggcugaccggcaagaacggccuguaccccaaccugagcaagagcuacgccaacaacaaggagaaggaggugcuggugcuguggggcgugcaccacccccccaacaucggcgaccagaaggcccuguaccacaccgagaacgccuacgugagcguggugagcagccacuacagcaagaaguucacccccgagaucgccaagagacccaaggugagagaccaggagggcagaaucaacuacuacuggacccugcuggagcccggcgacaccaucaucuucgaggccaacggcaaccugaucgcccccagauacgccuucgcccugagcagaggcuucggcagcggcaucaucaacagcaacgcccccauggacaagugcgacgccaagugccagaccccccagggcgccaucaacagcagccugcccuuccagaacgugcaccccgugaccaucggcgagugccccaaguacgugagaagcgccaagcugagaauggugaccggccugagaaacauccccagcauccagagcagaggccuguucggcgccaucgccggcuucaucgagggcggcuggaccggcaugguggacggcugguacggcuaccaccaccagaacgagcagggcagcggcuacgccgccgaccagagaagcacccagaacgccaucaacggcaucaccaacaaggugaacagcgugaucgagaagaugaacacccaguucaccgccgugggcaaggaguucaacaagcuggagagaagaauggagaaccugaacaagaagguggacgacggcuucaucgacaucuggaccuacaacgccgagcugcuggugcugcuggagaacgagagaacccuggacuuccacgacagcaacgugaagaaccuguacgagaaggugaagagccagcugaagaacaacgccaaggagaucggcaacggcugcuucgaguucuaccacaagugcaacgacgagugcauggagagcgugaagaacggcaccuacgacuaccccaaguacagcgaggagagcaagcugaacagagagaagaucgacggcgugaagcuggagagcaugggcguguaccagauccuggccaucuacagcaccguggccagcagccuggugcugcuggugagccugggcgccaucagcuucuggaugugcagcaacggcagccugcagugcagaaucugcaucuga

SEQ ID NO: 172998 - RNA, 1701 nt, Artificial Sequence
  derived and/or modified CDS sequence (opt4) from hemagglutinin__InfluenzaA__AJK00001
augaaggccauccugguggugcugcuguacaccuucgccaccgccaacgccgacacccugugcaucggcuaccacgccaacaacagcaccgacaccguggacaccgugcuggagaagaacgugaccgugacccacagcgugaaccugcuggaggacaagcacaacggcaagcugugcaagcugagaggcguggccccccugcaccugggcaagugcaacaucgccggcuggauccugggcaaccccgagugcgagagccugagcaccgccagcagcuggagcuacaucguggagaccagcagcagcgacaacggcaccugcuaccccggcgacuucaucaacuacgaggagcugagagagcagcugagcagcgugagcagcuucgagagauucgagaucuuccccaagaccagcagcuggcccaaccacgacagcaacaagggcgugaccgccgccugccccagagccggcgagaagagcuucuacaagaaccugaucuggcuggugaagaagggcaacagcuaccccaagcugagcaagagcuacaucaacgacaagggcaaggaggugcuggugcuguggggcauccaccaccccagcaccaccgccgaccagcagagccuguaccagaacgccgacgccuacguguucgugggcaccagcagauacagcaagaaguucaagcccgagaucgccaucagacccaaggugagagaccaggagggcagaaugaacuacuacuggacccugguggagcccggcgacaagaucaccuucgaggccaccggcaaccugcuggugcccagauacgccuucgccauggagagaaacgccggcagcggcaucaucaucagcgacacccccgugcacgacugcaacaccaccugccagacccccaagggcgccaucaacaccagccugcccuuccagaacauccaccccaucaccaucggcaagugccccaaguacgugaagagcaccaagcugagacuggccaccggccugagaaacgugcccagcauccagagcagaggccuguucggcgccaucgccggcuucaucgagggcggcuggaccggcaugguggacggcugguacggcuaccaccaccagaacgagcagggcagcggcuacgccgccgaccugaagagcacccagaacgccaucgacaagaucaccaacaaggugaacagcgugaucgagaagaugaacacccaguucaccgccgugggcaaggaguucaaccaccuggagaagagaaucgagaaccugaacaagaagguggacgacggcuuccuggacaucuggaccuacaacgccgagcugcuggugcugcuggagaacgagagaacccuggacuaccacgacagcaacgugaagaaccuguacgagaaggugagaaaccagcugaagaacaacgccaaggagaucggcaacggcugcuucgaguucuaccacaagugcgacaacaccugcauggagagcgugaagaacggcaccuacgacuaccccaaguacagcgaggaggccaagcugaacagagagaagaucgacggcgugaagcuggagagcaccagaaucuaccagauccuggccaucuacagcaccguggccagcagccuggugcugguggugagccugggcgccaucagcuucuggaugugcagcaacggcagccugcagugcagaaucugcaucuga

SEQ ID NO: 172999 - RNA, 1701 nt, Artificial Sequence
  derived and/or modified CDS sequence (opt4) from hemagglutinin__InfluenzaA__AJK00012
augaaggccauccugguggugcugcugugcaccuucgccaccgccaacgccgacacccugugcaucggcuaccacgccaacaacagcaccgacaccguggacaccgugcuggagaagaacgugaccgugacccacagcgugaaccugcuggaggacaagcacaacggcaagcugugcaagcugagaggcguggccccccugcaccugggcaagugcaacaucgccggcuggauccugggcaaccccgagugcgagagccugagcaccgccagcagcuggagcuacaucguggagaccagcagcagcgacaacggcaccugcuaccccggcgacuucaucgacuacgaggagcugagagagcagcugagcagcgugagcagcuucgagagauucgagaucuuccccaagaccagcagcuggcccaaccacgacagcaacaagggcgugaccgccgccugcccccacgccggcgccaagggcuucuacaagaaccugaucuggcuggugaagaagggcaacagcuaccccaagcugagcaagagcuacaucaacgacaagggcaaggaggugcuggugcuguggggcauccaccaccccagcaccaccgccgaccagcagagccuguaccagaacgccgacaccuacguguucgugggcaccagcagauacagcaagaaguucaagcccgagaucgccaucagacccaaggugagagaccaggagggcagaaugaacuacuacuggacccugguggagcccggcgacaagaucaccuucgaggccaccggcaaccugguggugcccagauacgccuucgccauggagagaaacgccggcagcggcaucaucaucagcgacaccaccgugcacgacugcaacaccaccugccagacccccaagggcgccaucaacaccagccugcccuuccagaacauccaccccaucaccaucggcaagugccccaaguacgugaagagcaccaagcugagacuggccaccggccugagaaacgugcccagcauccagagcagaggccuguucggcgccaucgccggcuucaucgagggcggcuggaccggcaugguggacggcugguacggcuaccaccaccagaacgagcagggcagcggcuacgccgccgaccugaagagcacccagaacgccaucgacaagaucaccaacaaggugaacagcgugaucgagaagaugaacacccaguucaccgccgugggcaaggaguucaaccaccuggagaagagaaucgagaaccugaacaagaagguggacgacggcuuccuggacaucuggaccuacaacgccgagcugcuggugcugcuggagaacgagagaacccuggacuaccacgacagcaacgugaagaaccuguacgagaaggugagaaaccagcugaagaacaacgccaaggagaucggcgacggcugcuucgaguucuaccacaagugcgacaacaccugcauggagagcgugaagaacggcaccuacgacuaccccaaguacagcgaggaggccaagcugaacagagagaagaucgacggcgugaagcuggagagcaccagaaucuaccagauccuggccaucuacagcaccguggccagcagccuggugcugguggugagccugggcgccaucagcuucuggaugugcagcaacggcagccugcagugcagaaucugcaucuga

SEQ ID NO: 173000 - RNA, 1701 nt, Artificial Sequence
  derived and/or modified CDS sequence (opt4) from hemagglutinin__InfluenzaA__AJK00023
augaaggccauccugguggugcugcuguacaccuucgccaccgccaacgccgacacccugugcaucggcuaccacgccaacaacagcaccgacaccguggacaccgugcuggagaagaacgugaccgugacccacagcgugaaccugcuggaggacaagcacaacggcaagcugugcaagcugagaggcguggccccccugcaccugggcaagugcaacaucgccggcuggauccugggcaaccccgagugcgagagccugagcaccgccagcagcuggagcuacaucguggagaccagcagcagcgacaacggcaccugcuaccccggcgacuucaucaacuacgaggagcugagagagcagcugagcagcgugagcagcuucgagagauucgagaucuuccccaagaccagcagcuggcccaaccacgacagcaacaagggcgugaccgccgccugccccagagccggcgccaagagcuucuacaagaaccugaucuggcuggugaagaagggcaacagcuaccccaagcugagcaagagcuacaucaacgacaagggcaaggaggugcuggugcuguggggcauccaccaccccagcaccaccgccgaccagcagagccuguaccagaacgccgacgccuacguguucgugggcaccagcagauacagcaagaaguucaagcccgagaucgccaucagacccaaggugagagaccaggagggcagaaugaacuacuacuggacccugguggagcccggcgacaagaucaccuucgaggccaccggcaaccugcuggugcccagauacgccuucgccauggagagaaacgccggcagcggcaucaucaucagcgacacccccgugcacgacugcaacaccaccugccagacccccaagggcgccaucaacaccagccugcccuuccagaacauccaccccaucaccaucggcaagugccccaaguacgugaagagcaccaagcugagacuggccaccggccugagaaacgugcccagcauccagagcagaggccuguucggcgccaucgccggcuucaucgagggcggcuggaccggcaugguggacggcugguacggcuaccaccaccagaacgagcagggcagcggcuacgccgccgaccugaagagcacccagaacgccaucgacaagaucaccaacaaggugaacagcgugaucgagaagaugaacacccaguucaccgccgugggcaaggaguucaaccaccuggagaagagaaucgagaaccugaacaagaagguggacgacggcuuccuggacaucuggaccuacaacgccgagcugcuggugcugcuggagaacgagagaacccuggacuaccacgacagcaacgugaagaaccuguacgagaaggugagaaaccagcugaagaacaacgccaaggagaucggcaacggcugcuucgaguucuaccacaagugcgacaacaccugcauggagagcgugaagaacggcaccuacgacuaccccaaguacagcgaggaggccaagcugaacagagaggagaucgacggcgugaagcuggagagcaccagaaucuaccagauccuggccaucuacagcaccguggccagcagccuggugcugguggugagccugggcgccaucagcuucuggaugugcagcaacggcagccugcagugcagaaucugcaucuga

SEQ ID NO: 173001 - RNA, 1701 nt, Artificial Sequence; identical to SEQ ID NO: 166884
  derived and/or modified CDS sequence (opt4) from hemagglutinin__InfluenzaA__AJK00034

SEQ ID NO: 173002 - RNA, 1701 nt, Artificial Sequence; identical to SEQ ID NO: 167102
  derived and/or modified CDS sequence (opt4) from hemagglutinin__InfluenzaA__AJK00045

SEQ ID NO: 173003 - RNA, 1701 nt, Artificial Sequence; identical to SEQ ID NO: 167102
  derived and/or modified CDS sequence (opt4) from hemagglutinin__InfluenzaA__AJK00056

SEQ ID NO: 173004 - RNA, 1701 nt, Artificial Sequence; identical to SEQ ID NO: 162971
  derived and/or modified CDS sequence (opt4) from hemagglutinin__InfluenzaA__AJK00067

SEQ ID NO: 173005 - RNA, 1698 nt, Artificial Sequence
  derived and/or modified CDS sequence (opt4) from hemagglutinin__InfluenzaA__AJK00079
augaaggugaagcugcuggugcugcugugcaccuucaccgccaccuacgccgacaccaucugcaucggcuaccacgccaacaacagcaccgacaccguggacaccgugcuggagaagaacgugaccgugacccacagcgugaaccugcuggagaacagccacaacggcaagcugugccugcugaagggcaucgccccccugcagcugggcaacugcagcguggccggcuggauccugggcaaccccgagugcgagcugcugaucagcaaggagagcuggagcuacaucguggagaagcccaaccccgagaacggcaccugcuaccccggccacuucgccgacuacgaggagcugagagagcagcugagcagcgugagcagcuucgagagauucgagaucuuccccaaggagagcagcuggcccaaccacaccgugaccggcgugagcgccagcugcagccacaacggcgagaacagcuucuacagaaaccugcuguggcugaccagaaagaacggccuguaccccaaccugagcaagagcuacgccaacaacaaggagaaggaggugcuggugcuguggggcgugcaccacccccccaacaucgccgaccagaagacccuguaccacaccgagaacgccuacgugagcguggugagcagccacuacagcagaaaguucacccccgagaucgccaagagacccaaggugagagaccaggagggcagaaucaacuacuacuggacccugcuggagcccggcgacaccaucaucuucgaggccaacggcaaccugaucgcccccagauacgccuucgcccugagcagaggcuucggcagcggcaucaucaacagcaacgcccccauggacaagugcgacgccaagugccagaccccccagggcgccaucaacagcagccugcccuuccagaacgugcaccccgugaccaucggcgagugccccaaguacgugagaagcgccaagcugagaauggugaccggccugagaaacauccccagcauccagagcagaggccuguucggcgccaucgccggcuucaucgagggcggcuggaccggcaugguggacggcugguacggcuaccaccaccagaacgagcagggcagcggcuacgccgccgaccagaagagcacccagaacgccaucaacggcaucaccaacaaggugaacagcgugaucgagaagaugaacacccaguucaccgccgugggcaaggaguucaacaagcuggagagaagaauggagaaccugaacaagaagguggacgacggcuucaucgacaucuggaccuacaacgccgagcugcuggugcugcuggagaacgagagaacccuggacuuccacgacagcaacgugaagaaccuguacgagaaggugaagagccagcugaagaacaacgccaaggagaucggcaacggcugcuucgaguucuaccacaagugcaacgacgagugcauggagagcgugaagaacggcaccuacgacuaccccaaguacagcgaggagagcaagcugaacagagagaagaucgacggcgugaagcuggagagcaugggcguguaccagauccuggccaucuacagcaccguggccagcagccuggugcugcuggugagccugggcgccaucagcuucuggaugugcagcaacggcagccugcagugcagaaucugcaucuga

SEQ ID NO: 173006 - RNA, 1698 nt, Artificial Sequence
  derived and/or modified CDS sequence (opt4) from hemagglutinin__InfluenzaA__AJK00091
augaaggugaagcugcuggugcugcugugcaccuucaccgccaccuacgccgacaccaucugcaucggcuaccacgccaacaacagcaccgacaccguggacaccgugcuggagaagaacgugaccgugacccacagcgugaaccugcuggagaacagccacaacggcaagcugugccugcugaagggcaucgccccccugcagcugggcaacugcagcguggccggcuggauccugggcaaccccgagugcgagcugcugaucagcaaggagagcuggagcuacaucguggagaagcccaaccccgagaacggcaccugcuaccccggccacuucgccgacuacgaggagcugagagagcagcugagcagcgugagcagcuucgagagauucgagaucuuccccaaggagagcagcuggcccaaccacaccaucaccggcgugagcgccagcugcagccacaacggcgagagcagcuucuacagaaaccugcuguggcugaccggcaagaacggccuguaccccaaccugagcaagagcuacgccaacaacaaggagaaggaggugcuggugcuguggggcgugcaccacccccccaacaucggcgugcagaaggcccuguaccacaccgagaacgccuacgugagcguggugagcagccacuacagcagaaaguucacccccgagaucgccaagagacccaaggugagagaccaggagggcagaaucaacuacuacuggacccugcuggagcccggcgacaccaucaucuucgaggccaacggcaaccugaucgcccccagauacgccuucgcccugagcagaggcuucggcagcggcaucaucaacagcaacgcccccauggacaagugcgacgccaagugccagaccccccagggcgccaucaacagcagccugcccuuccagaacgugcaccccgugaccaucggcgagugccccaaguacgugagaagcgccaagcugagaauggugaccggccugagaaacauccccagcauccagagcagaggccuguucggcgccaucgccggcuucaucgagggcggcuggaccggcaugguggacggcugguacggcuaccaccaccagaacgagcagggcagcggcuacgccgccgaccagaagagcacccagaacgccaucaacggcaucaccaacaaggugaacagcgugaucgagaagaugaacacccaguucaccgccgugggcaaggaguucaacaagcuggagagaagaauggagaaccugaacaagaagguggacgacggcuucaucgacaucuggaccuacaacgccgagcugcuggugcugcuggagaacgagagaacccuggacuuccacgacagcaacgugaagaaccuguacgagaaggugaagagccagcugaagaacaacgccaaggagaucggcaacggcugcuucgaguucuaccacaagugcaacgacgagugcauggagagcgugaagaacggcaccuacgacuaccccaaguacagcgaggagagcaagcugaacagagagaagaucgacggcgugaagcuggagagcaugggcguguaccagauccuggccaucuacagcaccguggccagcagccuggugcugcuggugagccugggcgccgugagcuucuggaugugcagcaacggcagccugcagugcagagugugcaucuga

SEQ ID NO: 173007 - RNA, 1698 nt, Artificial Sequence; identical to SEQ ID NO: 162548
  derived and/or modified CDS sequence (opt4) from hemagglutinin__InfluenzaA__AJK00103

SEQ ID NO: 173008 - RNA, 1701 nt, Artificial Sequence; identical to SEQ ID NO: 166980
  derived and/or modified CDS sequence (opt4) from hemagglutinin__InfluenzaA__AJK00114

SEQ ID NO: 173009 - RNA, 1701 nt, Artificial Sequence
  derived and/or modified CDS sequence (opt4) from hemagglutinin__InfluenzaA__AJK00125
augaaggccauccugguggugcugcuguacaccuucgccaccgccaacgccgacacccugugcaucggcuaccacgccaacaacagcaccgacaccguggacaccgugcuggagaagaacgugaccgugacccacagcgugaaccugcuggaggacaagcacaacggcaagcugugcaagcugagagagguggccccccugcaccugggcaagugcaacaucgccggcuggauccugggcaaccccgagugcgagagccugagcaccgccagcagcuggagcuacaucguggagaccagcagcagcgacaacggcaccugcuaccccggcgacuucaucgacuacgaggagcugagagagcagcugagcagcgugagcagcuucgagagauucgagaucuuccccaagaccaacagcuggcccaaccacgacagcaacaagggcgugaccgccgccugcccccacgccggcgccaagagcuucuacaagaaccugaucuggcuggugaagaagggcaacagcuaccccaagcugagcaagagcuacaucaacgacaagggcaaggaggugcuggugcuguggggcauccaccaccccagcaccagcgccgaccagcagagccuguaccagaacgccgacgccuacguguucgugggcaccagcagauacagcaagaaguucaagcccgagaucgccaucagacccaaggugagagaccaggagggcagaaugaacuacuacuggacccugguggagcccggcgacaagaucaccuucgaggccaccggcaaccugguggugcccagauacgccuucgccauggagagaaacgccggcagcggcaucaucaucagcgacacccccguguacgacugcaacaccaccugccagacccccaagggcgccaucaacaccagccugcccuuccagaacauccaccccaucaccaucggcaagugccccaaguacgugaagagcaccaagcugagacuggccaccggccugagaaacgugcccagcauccagagcagaggccuguucggcgccaucgccggcuucaucgagggcggcuggaccggcaugguggacggcugguacggcuaccaccaccagaacgagcagggcagcggcuacgccgccgaccugaagagcacccagaacgccaucgacgagaucaccaacaaggugaacagcgugaucgagaagaugaacacccaguucaccgccgugggcaaggaguucaaccaccuggagaagagaaucgagaaccugaacaagaagguggacgacggcuuccuggacaucuggaccuacaacgccgagcugcuggugcugcuggagaacgagagaacccuggacuaccacgacagcaacgugaagaaccuguacgagaaggugagaagccagcugaagaacaacgccaaggagaucggcaacggcugcuucgaguucuaccacaagugcgacaacaccugcauggagagcgugaagaacggcaccuacgacuaccccaaguacagcgaggaggccaagcugaacagagagaagaucgacggcgugaagcuggagagcaccagaaucuaccagauccuggccaucuacagcaccguggccagcagccuggugcugguggugagccugggcgccaucagcuucuggaugugcagcaacggcagccugcagugcagaaucugcaucuga

SEQ ID NO: 173010 - RNA, 1701 nt, Artificial Sequence; identical to SEQ ID NO: 162729
  derived and/or modified CDS sequence (opt4) from hemagglutinin__InfluenzaA__AJK00136

SEQ ID NO: 173011 - RNA, 1704 nt, Artificial Sequence
  derived and/or modified CDS sequence (opt4) from hemagglutinin__InfluenzaA__AJK00166
auggagaagaucgugcugcugcuggccaucgugagccuggugaagagcgaccagaucugcaucggcuaccacgccaacaacagcaccgagcagguggacaccaucauggagaagaacgugaccgugacccacgcccaggacauccuggagaagacccacaacggcaagcugugcgaccuggacggcgugaagccccugauccugagagacugcagcguggccggcuggcugcugggcaaccccaugugcgacgaguucaucaacgugcccgaguggagcuacaucguggagaaggccaaccccgccaacgaccugugcuaccccggcaacuucaacgacuacgaggagcugaagcaccugcugagcagaaucaaccacuucgagaagauccagaucauccccaagagcagcuggagcgaccacgaggccagcagcggcgugagcagcgccugccccuaccagggcaagcccagcuucuucagaaacgugguguggcugaucaagaagaacaacaccuaccccaccaucaagagaagcuacaacaacaccaaccaggaggaccugcugauccuguggggcauccaccacagcaacgacgccgccgagcagaccaagcuguaccagaaccccaccaccuacaucagcgugggcaccagcacccugaaccagagacuggugcccaagaucgccaccagaagcaaggugaacggccagagcggcagaauggacuucuucuggaccauccugaagcccaacgacgccaucaacuucgagagcaacggcaacuucaucgcccccgaguacgccuacaagaucgugaagaagggcgacagcgccaucaugaagagcgagguggaguacggcaacugcaacaccaagugccagacccccaucggcgccaucaacagcagcaugcccuuccacaacauccacccccugaccaucggcgagugccccaaguacgugaagagcaacaagcuggugcuggccaccggccugagaaacagcccccugagagagagaagaagaaagagaggccuguucggcgccaucgccggcuucaucgagggcggcuggcagggcaugguggacggcugguacggcuaccaccacagcaacgagcagggcagcggcuacgccgccgacaaggagagcacccagaaggccaucgacggcgugaccaacaaggugaacagcaucaucgacaagaugaacacccaguucgaggccgugggcagagaguucaacaaccuggagagaagaaucgagaaccugaacaagaagauggaggacggcuuccuggacguguggaccuacaacgccgagcugcuggugcugauggagaacgagagaacccuggacuuccacgacagcaacgugaagaaccuguacgacaaggugagacugcagcugagagacaacgccaaggagcugggcaacggcugcuucgaguucuaccacaagugcgacaacgagugcauggagagcgugagaaacggcaccuacgacuacccccaguacagcgaggaggccagacugaagagagaggagaucagcggcgugaagcuggagagcaucggcaccuaccagauccugagcaucuacagcaccguggccagcagccuggcccuggccaucaugguggccggccugagccuguggaugugcagcaacggcagccugcagugcagaaucugcaucuga

SEQ ID NO: 173012 - RNA, 1707 nt, Artificial Sequence
  derived and/or modified CDS sequence (opt4) from hemagglutinin__InfluenzaA__AJK00177
auggagaagaucgugcugcugcuggccguggugagccuggugagaagcgaccagaucugcaucggcuaccacgccaacaacagcaccgagcagguggacaccaucauggagaagaacgugaccgugacccacgcccaggacauccuggagaagacccacaacggcaagcugugcgaccuggacggcgugaagccccugauccugagagacugcagcguggccggcuggcugcugggcaaccccaugugcgacgaguucaucaacgugcccgaguggagcuacaucguggagaaggccaaccccgccaacgaccugugcuaccccggcaaccugaacgacuacgaggagcugaagcaccugcugagcagaaucaaccacuucgagaagauccagaucauccccaagagcagcuggagcgaccacgaggccagccugggcgugagcagcgccugccccuaccagggcacccccagcuucuucagaaacgugguguggcugaucaagaagaacaacaccuaccccaccaucaagagaagcuacaacaacaccaaccaggaggaccugcugauccuguggggcauccaccacagcaacgacgaggccgagcagaucaagcuguaccagaaccccaccaccuacgugagcgugggcaccagcacccugaaccagagacuggugcccaagaucgccaccagaagcaaggugaacggccagagcggcagaauggacuucuucuggaccauccugaagcccgacgacgccaucaacuucgagagcaacggcaacuucaucgcccccgaguacgccuacaagaucgugaagaagggcgacagcgccaucaugaagagcgagguggaguacggcaacugcaacaccaagugccagacccccaucggcgccaucaacagcagcaugcccuuccacaacauccacccccugaccaucggcgagugccccaaguacgugaagagcaacaagcuggugcuggccaccggccugagaaacagcccccugagagagaagagaagaagaaagagaggccuguucggcgccaucgccggcuucaucgagggcggcuggcagggcaugguggacggcugguacggcuaccaccacagcaacgagcagggcagcggcuacgccgccgacaaggagagcacccagaaggccaucgacggcgugaccaacaaggugaacagcaucaucgacaagaugaacacccaguucgaggccgugggcagagaguucaacaaccuggagagaagaaucgagaaccugaacaagaagauggaggacggcuuccuggacguguggaccuacaacgccgagcugcuggugcugauggagaacgagagaacccuggacuuccacgacagcaacgugaagaaccuguacgacaaggugagacugcagcugagagacaacgccaaggagcugggcaacggcugcuucgaguucuaccacaagugcgacaacgagugcauggagagcgugagaaacggcaccuacgacuacccccaguacagcgaggaggccagacugaagagagaggagaucagcggcgugaagcuggagagcaucggcaucuaccagauccugagcaucuacagcaccguggccagcagccuggcccuggccaucaugguggccggccugagccuguggaugugcagcaacggcagccugcagugcagaaucugcaucuga

SEQ ID NO: 173013 - RNA, 1704 nt, Artificial Sequence
  derived and/or modified CDS sequence (opt4) from hemagglutinin__InfluenzaA__AJK00188
auggagaagaucgugcugcugcuggccguggugagccuggugagaagcgaccagaucugcaucggcuaccacgccaacaacagcaccgagcagguggacaccaucauggagaagaacgugaccgugacccacgcccaggacauccuggagaagacccacaacggcaagcugugcgaccuggacggcgugaagccccugauccugagagacugcagcguggccggcuggcugcugggcaaccccaugugcgacgaguucaucaacgugcccgaguggagcuacaucguggagaaggccaaccccgccaacgaccugugcuaccccggcaaccugaacgacuacgaggagcugaagcaccugcugagcagaaucaaccacuucgagaagauccagaucauccccaagagcagcuggagcgaccacgaggccagccugggcgugagcagcgccugccccuaccagggcacccccagcuucuucagaaacgugguguggcugaucaagaagaacaacaccuaccccaccaucaagagaagcuacaacaacaccaaccaggaggaccugcugauccuguggggcauccaccacagcaacgacgaggccgagcagaucaagcuguaccagaaccccaccaccuacaucagcgugggcaccagcacccugaaccagagacuggugcccaagaucgccaccagaagcaaggugaacggccagagcggcagaauggacuucuucuggaccauccugaagcccgacgacgccaucaacuucgagagcaacggcaacuucaucgcccccgaguacgccuacaagaucgugaagaagggcgacagcgccaucaugaagagcgagguggaguacggcaacugcaacaccaagugccagacccccaucggcgccaucaacagcagcaugcccuuccacaacauccacccccugaccaucggcgagugccccaaguacgugaagagcaacaagcuggugcuggccaccggccugagaaacagcccccugagagagaagagaagaaagagaggccuguucggcgccaucgccggcuucaucgagggcggcuggcagggcaugguggacggcugguacggcuaccaccacagcaacgagcagggcagcggcuacgccgccgacaaggagagcacccagaaggccaucgacggcgugaccaacaaggugaacagcaucaucgacaagaugaacacccaguucgaggccgugggcagagaguucaacaaccuggagagaagaaucgagaaccugaacaagaagauggaggacggcuuccuggacguguggaccuacaacgccgagcugcuggugcugauggagaacgagagaacccuggacuuccacgacagcaacgugaagaaccuguacgacaaggugagacugcagcugagagacaacgccaaggagcugggcaacggcugcuucgaguucuaccacaagugcgacaacgagugcauggagagcgugagaaacggcaccuacgacuacccccaguacagcgaggaggccagacugaagagagaggagaucagcggcgugaagcuggagagcaucggcaccuaccagauccugagcaucuacagcaccguggccagcagccuggcccuggccaucaugguggccggccugagccuguggaugugcagcaacggcagccugcagugcagaaucugcaucuga

SEQ ID NO: 173014 - RNA, 1704 nt, Artificial Sequence
  derived and/or modified CDS sequence (opt4) from hemagglutinin__InfluenzaA__AJK00207
auggagaagaucgugcugcugcuggccaucgugagccuggugagaagcgaccagaucugcaucggcuaccacgccaacaacagcaccgagcagguggacaccaucauggagaagaacgugaccgugacccacgcccaggacauccuggagaagacccacaacggcaagcugugcgaccuggacggcgugaagccccugauccugagagacugcagcguggccggcuggcugcugggcaaccccaugugcgacgaguucaucaacgugcccgaguggagcuacaucguggagaaggccaaccccgccaacgaccugugcuaccccggcaacuucaacgacuacgaggagcugaagcaccugcugagcagaaucaaccacuucgagaagauccagaucauccccaagagcagcuggagcgaccacgaggccagcagcggcgugagcagcgccugccccuaccagggcacccccagcuucuucagaaacgugguguggcugaucaagaagaacaacaccuaccccaccaucaagagaagcuacaacaacaccagccaggaggaccugcuggugcuguggggcauccaccacagcaacgacgccaccgagcagaugaagcuguaccagaaccccaccaccuacgugagcgugggcaccagcacccugaaccagagacuggugcccaagaucgccaccagaagcaaggugaacggccagagcggcagaauggacuucuucuggaccauccugaagagcaacgacgccaucaacuucgagagcaacggcaacuucaucgcccccgaguacgccuacaagaucgugaagaagggcgacagcgccaucaugaagagcgagguggaguacggcaacugcagcaccaagugccagacccccaucggcgccaucaacagcagcaugcccuuccacaacauccacccccugaccaucggcgagugccccaaguacgugaagagcaacaagcuggugcuggccaccggccugagaaacagcccccugagagagagaagaagaaagagaggccuguucggcgccaucgccggcuucaucgagggcggcuggcagggcaugguggacggcugguacggcuaccaccacagcaacgagcagggcagcggcuacgccgccgacaaggagagcacccagaaggccaucgacggcgugaccaacaaggugaacagcaucaucgacaagaugaacacccaguucgaggccgugggcagagaguucaacaaccuggagagaagaaucgagaaccugaacaagaagauggaggacggcuuccuggacguguggaccuacaacgccgagcugcuggugcugauggagaacgagagaacccuggacuuccacgacagcaacgugaagaaccuguacgacaaggugagacugcagcugagagacaacaccaaggagcugggcaacggcugcuucgaguucuaccacaagugcgacaacgagugcauggagagcgugagaaacggcaccuacgacuacccccaguacagcgaggaggccagacugaagagagaggagaucagcggcgugaagcuggagagcaucggcaccuaccagauccugagcaucuacagcaccguggccagcagccuggcccuggccaucaugguggccggccugagccuguggaugugcagcaacggcagccugcagugcagaaucugcaucuga

SEQ ID NO: 173015 - RNA, 1704 nt, Artificial Sequence
  derived and/or modified CDS sequence (opt4) from hemagglutinin__InfluenzaA__AJK00218
auggagaagaucgugcuguuccuggccaucgugagccuggugagaagcgaccagaucugcaucggcuaccacgccaacaacagcaccgagcagguggacaccaucauggagaagaacgugaccgugacccacgcccaggacauccuggagaagacccacaacggcaagcugugcgaccuggacggcgugaagccccugauccugagagacugcagcguggccggcuggcugcugggcaaccccaugugcgacgaguucaucaacgugcccgaguggagcuacaucguggagaaggccaaccccgccaacgaccugugcuaccccggcaacuucaacgacuacgaggagcugaagcaccugcugagcagaaucaaccacuucgagaagaucagaaucauccccaagagcagcuggcccgaccacgaggccagcagcggcgugagcagcgccugccccuaccagggcacccccagcuucuucagaaacaucguguggcugaucaagaagaacaacaccuaccccaccaucaagagaagcuacaacaacaccagccaggaggaccugcuggugcuguggggcauccaccacagcagcgacgccaccgagcagaucaagcuguaccagaaccccaccaccuacgugagcgugggcaccagcacccugaaccagagacuggugcccaagaucgccaccagaagcaaggugaacggccagagcggcagaauggacuucuucuggaccauccugaagagcaacgacgccaucaacuucgagagcaacggcaacuucaucgcccccgaguacgccuacaagaucgugaagaagggcgacagcgccaucaugaagagcgagguggaguacggcaacugcagcaccaagugccagacccccaucggcgccaucaacagcagcaugcccuuccacaacauccacccccugaccaucggcgagugccccaaguacgugaagagcaacaagcuggugcuggccaccggccugagaaacagcccccugagagagagaagaagaaagagaggccuguucggcgccaucgccggcuucaucgagggcggcuggcagggcaugguggacggcugguacggcuaccaccacagcaacgagcagggcagcggcuacgccgccgacaaggagagcacccagaaggccaucgacggcgugaccaacaaggugaacagcaucaucgacaagaugaacacccaguucgaggccgugggcagagaguucaacaaccuggagagaagaaucgagaaccugaacaagaagauggaggacggcuuccuggacguguggaccuacaacgccgagcugcuggugcugauggagaacgagagaacccuggacuuccacgacagcaacgugaagaaccuguacgacaaggugagacugcagcugagagacaacgccaaggagcugggcaacggcugcuucgaguucuaccacaagugcgacaacgagugcauggagagcgugagaaacggcaccuacgacuacccccaguacagcgaggaggccagacugaagagagaggagaucagcggcgugaagcuggagagcaucggcaccuaccagauccugagcaucuacagcaccgccgccagcagccuggcccuggccaucaugguggccggccugagccuguggaugugcagcaacggcagccugcagugcagaaucugcaucuga

SEQ ID NO: 173016 - RNA, 1704 nt, Artificial Sequence
  derived and/or modified CDS sequence (opt4) from hemagglutinin__InfluenzaA__AJK00239
auggagaagaucgugcugcugcuggccaucgugagccuggugagaagcgaccagaucugcaucggcuaccacgccaacaacagcaccgagcagguggacaccaucauggagaagaacgugaccgugacccacgcccaggacauccuggagaagacccacaacggcaagcugugcgaccuggacggcgugaagccccugauccugagagacugcagcguggccggcuggcugcugggcaaccccaugugcgacgaguucaucaacgugcccgaguggagcuacaucguggagaaggccaaccccgccaacgaccugugcuaccccggcaacuucaacgacuacgaggagcugaagcaccugcugagcagaaucaaccacuucgagaagauccagaucauccccaagagcagcuggagcgaccacgaggccagcagcggcgugagcagcgccugccccuaccagggcacccccagcuucuucagaaacgugguguggcugaucaagaagaacaacaccuaccccaccaucaagagaagcuacaacaacaccagccaggaggaccugcuggugcuguggggcauccaccacagcaacgacgccaccgagcagaugaagcuguaccagaaccccaccaccuacgugagcgugggcaccagcacccugaaccagagacuggugcccaagaucgccaccagaagcaaggugaacggccagagcggcagaauggacuucuucuggaccauccugaagagcaacgacgccaucaacuucgagagcaacggcaacuucaucgcccccgaguacgccuacaagaucgugaagaagggcgacagcgccaucaugaagagcgagguggaguacggcaacugcagcaccaagugccagacccccaucggcgccaucaacagcagcaugcccuuccacaacauccacccccugaccaucggcgagugccccaaguacgugaagagcaacaagcuggugcuggccaccggccugagaaacagcccccugagagagagaagaagaaagagaggccuguucggcgccaucgccggcuucaucgagggcggcuggcagggcaugguggacggcugguacggcuaccaccacagcaacgagcagggcagcggcuacgccgccgacaaggagagcacccagaaggccaucgacggcgugaccaacaaggugaacagcaucaucgacaagaugaacacccaguucgaggccgugggcagagaguucaacaaccuggagagaagaaucgagaaccugaacaagaagauggaggacggcuuccuggacguguggaccuacaacgccgagcugcuggugcugauggagaacgagagaacccuggacuuccacgacagcaacgugaagaaccuguacgacaaggugagacugcagcugagagacaacgccaaggagcugggcaacggcugcuucgaguucuaccacaagugcgacaacgagugcauggagagcgugagaaacggcaccuacgacuacccccaguacagcgaggaggccagacugaagagagaggagaucagcggcgugaagcuggagagcaucggcaccuaccagauccugagcaucuacagcaccguggccagcagccuggcccuggccaucaugguggccggccugagccuguggaugugcagcaacggcagccugcagugcagaaucugcaucuga

SEQ ID NO: 173017 - RNA, 1704 nt, Artificial Sequence
  derived and/or modified CDS sequence (opt4) from hemagglutinin__InfluenzaA__AJS18468
auggagaagaucgugcugcugcuggccguggugagccuggugaagagcgaccagaucugcaucggcuaccacgccaacaacagcaccgagcagguggacaccaucauggagaagaacgugaccgugacccacgcccaggacauccuggagaagacccacaacggcagacugugcgaccugaacggcgugaagccccugauccugaaggacugcagcguggccggcuggcugcugggcaaccccaugugcgacgaguucaucagagugcccgaguggagcuacaucguggagagagccaaccccgccaacgaccugugcuaccccggcaaccugaacgacuacgaggagcugaagcaccugcugagcagaaucaaccacuucgagaagacccugaucauccccaagagcagcuggcccaaccacgagaccagccugggcgugagcgccgccugccccuaccagggcgugcccagcuucuucagaaacgugguguggcugaccaagaagaacgacgccuaccccaccaucaagaugagcuacaacaacaccaacagagaggaccugcugauccuguggggcauccaccacagcaacaacgccgccgagcagaccaaccuguacaagaaccccaccaccuacgugagcgugggcaccagcacccugaaccagagacuggugcccaagaucgccaccagaagccaggugaacggccagagaggcagaauggacuucuucuggaccauccugaagcccaacgacgccauccacuucgagagcaacggcaacuucaucgcccccgaguacgccuacaagaucgugaagaagggcgacagcaccaucaugaagagcgagauggaguacggccacugcaacaccaagugccagacccccaucggcgccaucaacagcagcaugcccuuccacaacauccacccccugaccaucggcgagugccccaaguacgugaagagcaacaagcuggugcuggccaccggccugagaaacagcccccugagagagagaagaagaaagagaggccuguucggcgccaucgccggcuucaucgagggcggcuggcagggcaugguggacggcugguacggcuaccaccacagcaacgagcagggcagcggcuacgccgccgacagagagagcacccagaaggccaucgacggcgugaccaacaaggugaacagcaucaucgacaagaugaacacccaguucgaggccgugggcagagaguucaacaaccuggagagaagaaucgagaaccugaacaagaagauggaggacggcuuccuggacguguggaccuacaacgccgagcugcuggugcugauggagaacgagagaacccuggacuuccacgacagcaacgugaagaaccuguacgacaaggugagacugcagcugagagacaacgccaaggagcugggcaacggcugcuucgaguucuaccacaagugcgacaacgagugcauggagagcgugagaaacggcaccuacgacuacccccaguacagcgaggaggccagacugaagagagaggagaucagcggcgugaagcuggagagcaucggcaccuaccagauccugagcaucuacagcaccguggccagcagccugacccuggccaucaucguggccggccugagccuguggaugugcagcaacggcagccugcagugcagaaucugcaucuga

SEQ ID NO: 173018 - RNA, 1704 nt, Artificial Sequence
  derived and/or modified CDS sequence (opt4) from hemagglutinin__InfluenzaA__AJS18479
auggagaagaucgugcugcugcuggccguggugagccuggugaagagcgaccagaucugcaucggcuaccacgccaacaacagcaccgagcagguggacaccaucauggagaagaacgugaccgugacccacgcccaggacauccuggagaagacccacaacggcagacugugcgaccugaacggcgugaagccccugauccugaaggacugcagcguggccggcuggcugcugggcaaccccaugugcgacgaguucaucagagugcccgaguggagcuacaucguggagagagccaaccccgccaacgaccugugcuaccccggcaaccugaacgacuacgaggagcugaagcaccugcugagcagaaucaaccacuucgagaagacccugaucauccccaagagcagcuggcccaaccacgagaccagccugggcgugagcgccgccugccccuaccagggcaugcccagcuucuucagaaacgugguguggcugaccaagaagaacgacaccuaccccaccaucaagaugagcuacaacaacaccaacagagaggaccugcugauccuguggggcauccaccacagcaacaacgccgccgagcagaccaaccuguacaagaaccccaccaccuacgugagcgugggcaccgccacccugaaccagagacuggugcccaagaucgccaccagaagccaggugaacggccagagaggcagaauggacuucuucuggaccauccugaagcccaacgacgccauccacuucgagagcaacggcaacuucaucgcccccgaguacgccuacaagaucgugaagaagggcgacagcaccaucaugaagagcgagauggaguacggccacugcaacaccaagugccagacccccaucggcgccaucaacagcagcaugcccuuccacaacauccacccccugaccaucggcgagugccccaaguacgugaagagcaacaagcuggugcuggccaccggccugagaaacagcccccugagagagagaagaagaaagagaggccuguucggcgccaucgccggcuucaucgagggcggcuggcagggcaugguggacggcugguacggcuaccaccacagcaacgagcagggcagcggcuacgccgccgacagagagagcacccagaaggccaucgacggcgugaccaacaaggugaacagcaucaucgacaagaugaacacccaguucgaggccgugggcagagaguucaacaaccuggagagaagaaucgagaaccugaacaagaagauggaggacggcuuccuggacguguggaccuacaacgccgagcugcuggugcugauggagaacgagagaacccuggacuuccacgacagcaacgugaagaaccuguacgacaaggugagacugcagcugagagacaacgccaaggagcugggcaacggcugcuucgaguucuaccacaagugcgacaacgagugcauggagagcgugagaaacggcaccuacgacuacccccaguacagcgaggaggccagacugaagagagaggagaucagcggcgugaagcuggagagcaucggcaccuaccagauccugagcaucuacagcaccguggccagcagccuggcccuggccaucaucguggccggccugagccuguggaugugcagcaacggcagccugcagugcagaaucugcaucuga

SEQ ID NO: 173019 - RNA, 1704 nt, Artificial Sequence
  derived and/or modified CDS sequence (opt4) from hemagglutinin__InfluenzaA__AJY79339
auggagaagaucgugcugcugcuggccaucgugagcaucgugaagagcgaccagaucugcaucggcuaccacgccaacaacagcaccgagcagguggacaccaucauggagaagaacgugaccgugacccacgcccaggacauccuggagaagacccacaacggcaagcugugcaaccuggacggcgugaagccccugauccugagagacugcagcguggccggcuggcugcugggcaaccccaugugcgacgaguuccugaacgugcccgaguggagcuacaucguggagaagaucaaccccgccaacgaccugugcuaccccggcaaccugaacgacuacgaggagcugaagcaccugcugagcagaaucaaccacuucgagaagauccagaucauccccaaggacagcuggagcgaccacgaggccagcggcgugagcagcgccugccccuaccagggcagaagcagcuucuucagaaacgugguguggcugaccaagaagaacgacgccuaccccaccaucaagaagagcuacaacaacaccaaccaggaggaccugcuggugcuguggggcauccaccaccccaacgacgccgccgagcagaccagacuguaccagaaccccaccaccuacaucagcgugggcaccagcacccugaaccagagacuggugcccaagaucgccaccagaagcaaggugaacggccagagcggcagaauggaguucuucuggaccauccugaagagcaacgacgccaucaacuucgagagcaacggcaacuucaucgcccccgagaacgccuacaagaucgugaagaagggcgacagcaccaucaugaagagcgagcuggaguacagcaacugcaacaccaagugccagacccccaucggcgccaucaacagcagcaugcccuuccacaacauccacccccugaccaucggcgagugccccaaguacgugaagagcaacagacuggugcuggccaccggccugagaaacagcccccagggcgagaagagaagaaagaagagaggccuguucggcgccaucgccggcuucaucgagggcggcuggcagggcaugguggacggcugguacggcuaccaccacagcaacgagcagggcagcggcuacgccgccgacaaggagagcacccagagagccaucgacggcgugaccaacaaggugaacagcaucaucgacaagaugaacacccaguucgaggccgugggcagagaguucaacaaccuggagagaagaaucgagaaccugaacaagaagauggaggacggcuuccuggacguguggaccuacaacgccgagcugcuggugcugauggagaacgagagaacccuggacuuccacgacagcaacgugaagaaccuguacgacaaggugagacugcagcugagagacaacgccaaggagcugggcaacggcugcuucgaguucuaccacagaugcgacaacgagugcauggagagcgugagaaacggcaccuacgacuacccccaguacagcgaggaggccagacugaagagagaggagaucagcggcgugaagcuggagagcaucggcaccuaccagauccugagcaucuacagcaccguggccagcagccuggcccuggccaucaugguggccggccugagccuguggaugugcagcaacggcagccugcagugcagaaucugcaucuga

SEQ ID NO: 173020 - RNA, 1704 nt, Artificial Sequence
  derived and/or modified CDS sequence (opt4) from hemagglutinin__InfluenzaA__AJY79341
auggagaagaucgugcugcugcuggccaucgugagcaucgugaagagcgaccagaucugcaucggcuaccacgccaacaacagcaccgagcagguggacaccaucauggagaagaacgugaccgugacccacgcccaggacauccuggagaagacccacaacggcaagcugugcaaccuggacggcgugaagccccugauccugagagacugcagcguggccggcuggcugcugggcaaccccaugugcgacgaguuccugaacgugcccgaguggagcuacaucguggagaagaucaaccccgccaacgaccugugcuaccccggcaacuucaacgacuacgaggagcugaagcaccugcugagcagaaucaaccacuucgagaagauccagaucauccccaaggacagcuggagcgaccacgagaccagcggcgugagcagcgccugccccuaccagggcagaagcagcuucuucagaaacgugguguggcugaccaagaagaacgacgccuaccccaccaucaagaagagcuacaacaacaccaaccaggaggaccugcuggugcuguggggcauccaccaccccaacgacgccgccgagcagaccagacuguaccagaaccccaccaccuacaucagcgugggcaccagcacccugaaccagagacuggugcccaagaucgccaccagaagcaaggugaacggccagaacggcagaauggaguucuucuggaccauccugaagagcaacgacgccaucaacuucgagagcaacggcaacuucaucgcccccgagaacgccuacaagaucgugaagaagggcgacagcaccaucaugagaagcgagcuggaguacagcaacugcaacaccaagugccagacccccaucggcgccaucaacagcagcaugcccuuccacaacauccacccccugaccaucggcgagugccccaaguacgugaagagcaacagacuggugcuggccaccggccugagaaacagcccccagggcgagaagagaagaaagaagagaggccuguucggcgccaucgccggcuucaucgagggcggcuggcagggcaugguggacggcugguacggcuaccaccacagcaacgagcagggcagcggcuacgccgccgacaaggagagcacccagagagccaucgacggcgugaccaacaaggugaacagcaucaucgacaagaugaacacccaguucgaggccgugggcagagaguucaacaaccuggagagaagaaucgagaaccugaacaagaagauggaggacggcuuccuggacguguggaccuacaacgccgagcugcuggugcugauggagaacgagagaacccuggacuuccacgacagcaacgugaagaaccuguacgacaaggugagacugcagcugagagacaacgccaaggagcugggcaacggcugcuucgaguucuaccacagaugcgacaacgagugcauggagagcgugagaaacggcaccuacgacuacccccaguacagcgaggaggccagacugaagagagaggagaucagcggcgugaagcuggagagcaucggcaccuaccagauccugagcaucuacagcaccguggccagcagccuggcccuggccaucaugguggccggccugagccuguggaugugcagcaacggcagccugcagugcagaaucugcaucuga

SEQ ID NO: 173021 - RNA, 1704 nt, Artificial Sequence
  derived and/or modified CDS sequence (opt4) from hemagglutinin__InfluenzaA__AJY79342
auggagaagaucgugcugcugcuggccaucgugagcaucgugaagagcgaccagaucugcaucggcuaccacgccaacaacagcaccgagcagguggacaccaucauggagaagaacgugaccgugacccacgcccaggacauccuggagaagacccacaacggcaagcugugcaaccuggacggcgugaagccccugauccugagagacugcagcguggccggcuggcugcugggcaaccccaugugcgacgaguuccugaacgugcccgaguggagcuacaucguggagaagaucaaccccgccaacgaccugugcuaccccggcaacuucaacgacuacgaggagcugaagcaccugcugagcagaaucaaccacuucgagaagauccagaucauccccaaggacagcuggagcgaccacgaggccagcggcgugagcagcgccugccccuaccagggcagaagcagcuucuucagaaacgugguguggcugaccaagaagaacgacgccuaccccaccaucaagaagagcuacaacaacaccaaccaggaggaccugcuggugcuguggggcauccaccaccccaacgacgccgccgagcagaccagacuguaccagaaccccaccaccuacaucagcgugggcaccagcacccugaaccagagacuggugcccaagaucgccaccagaagcaaggugaacggccagagcggcagaauggaguucuucuggaccauccugaagagcaacgacgccaucaacuucgagagcaacggcaacuucaucgcccccgagaacgccuacaagaucgugaagaagggcgacagcaccaucaugaagagcgagcuggaguacagcaacugcaacaccaagugccagacccccaucggcgccaucaacagcagcaugcccuuccacaacauccacccccugaccaucggcgagugccccaaguacgugaagagcaacagacuggugcuggccaccggccugagaaacagcccccagggcgagaagagaagaaagaagagaggccuguucggcgccaucgccggcuucaucgagggcggcuggcagggcaugguggacggcugguacggcuaccaccacagcaacgagcagggcagcggcuacgccgccgacaaggagagcacccagagagccaucgacggcgugaccaacaaggugaacagcaucaucgacaagaugaacacccaguucgaggccgugggcagagaguucaacaaccuggagagaagaaucgagaaccugaacaagaagauggaggacggcuuccuggacguguggaccuacaacgccgagcugcuggugcugauggagaacgagagaacccuggacuuccacgacagcaacgugaagaaccuguacgacaaggugagacugcagcugagagacaacgccaaggagcugggcaacggcugcuucgaguucuaccacagaugcgacaacgagugcauggagagcgugagaaacggcaccuacgacuacccccaguacagcgaggaggccagacugaagagagaggagaucagcggcgugaagcuggagagcaucggcaccuaccagauccugagcaucuacagcaccguggccagcagccuggcccuggccaucaugguggccggccugagccuguggaugugcagcaacggcagccugcagugcagaaucugcaucuga

SEQ ID NO: 173022 - RNA, 1704 nt, Artificial Sequence
  derived and/or modified CDS sequence (opt4) from hemagglutinin__InfluenzaA__AJY79343
auggagaagaucgugcugcugcuggccaucgugagcaucgugaagagcgaccagaucugcaucggcuaccacgccaacaacagcaccgagcagguggacaccaucauggagaagaacgugaccgugacccacgcccaggacauccuggagaagacccacaacggcaagcugugcaaccuggacggcgugaagccccugauccugagagacugcagcguggccggcuggcugcugggcaaccccaugugcgacgaguuccugaacgugcccgaguggagcuacaucguggagaagaucaaccccgccaacgaccugugcuaccccggcaacuucaacgacuacgaggagcugaagcaccugcugagcagaaucaaccacuucgagaagauccagaucauccccaaggacagcuggagcgaccacgaggccagcggcgugagcagcgccugccccuaccagggcagaagcagcuucuucagaaacgugguguggcugaccaagaagaacgacgccuaccccaccaucaagaagagcuacaacaacaccaaccaggaggaccugcuggugcuguggggcauccaccaccccaacgacgccgccgagcagaccagacuguaccagaaccccaccaccuacaucagcgugggcaccagcacccugaaccagagacuggugcccaagaucgccaccagaagcaaggugaacggccagagcggcagaauggaguucuucuggaccauccugaagagcaacgacgccaucaacuucgagagcaacggcaacuucaucgcccccgagaacgccuacaagaucgugaagaagggcgacagcaccaucaugaagagcgagcuggaguacagcaacugcaacaccaagugccagacccccaucggcgccaucaacagcagcaugcccuuccacaacauccacccccugaccaucggcgagugccccaaguacgugaagagcaacagacuggugcuggccaccggccugagaaacagcccccagggcgagaagagaagaaagaagagaggccuguucggcgccaucgccggcuucaucgagggcggcuggcagggcaugguggacggcugguacggcuaccaccacagcaacgagcagggcagcggcuacgccgccgacaaggagagcacccagagagccaucgacggcgugaccaacaaggugaacagcaucaucgacaagaugaacacccaguucgaggccgugggcagagaguucaacaaccuggagagaagaaucgagaaccugaacaagaagauggaggacggcuuccuggacguguggaccuacaacgccgagcugcuggugcugauggagaacgagagaacccuggacuuccacgacagcaacgugaagaaccuguacgacaaggugagacugcagcugagagacaacgccaaggagcugggcaacggcugcuucgaguucuaccacagaugcgacgacgagugcauggagagcgugagaaacggcaccuacgacuacccccaguacagcgaggaggccagacugaagagagaggagaucagcggcgugaagcuggagagcaucggcaccuaccagauccugagcaucuacagcaccguggccagcagccuggcccuggccaucaugguggccggccugagccuguggaugugcagcaacggcagccugcagugcagaaucugcaucuga

SEQ ID NO: 173023 - RNA, 1704 nt, Artificial Sequence
  derived and/or modified CDS sequence (opt4) from hemagglutinin__InfluenzaA__AJY79345
auggagaagaucgugcugcugcuggccaucgugagcaucgugaagagcgaccagaucugcaucggcuaccacgccaacaacagcaccgagcagguggacaccaucauggagaagaacgugaccgugaccagagcccaggacauccuggagaagacccacaacggcaagcugugcaaccuggacggcgugaagccccugauccugagagacugcagcguggccggcuggcugcugggcaaccccaugugcgacgaguuccugaacgugcccgaguggagcuacaucguggagaagaucaaccccgccaacgaccugugcuaccccggcaacuucaacgacuacgaggagcugaagcaccugcugagcagaaucaaccacuucgagaagauccagaucauccccaaggacagcuggagcgaccacgaggccagcggcgugagcagcgccugccccuaccagggcagaagcagcuucuucagaaacgugguguggcugaccaagaagaacgacgccuaccccaccaucaagaagagcuacaacaacaccaaccaggaggaccugcuggugcuguggggcauccaccaccccaacgacgccgccgagcagaccagacuguaccagaaccccaccaccuacaucagcgugggcaccagcacccugaaccagagacuggugcccaagaucgccaccagaagcaaggugaacggccagagcggcagaauggaguucuucuggaccauccugaagagcaacgacgccaucaacuucgagagcaacggcaacuucaucgcccccgagaacgccuacaagaucgugaagaagggcgacagcaccaucaugaagagcgagcuggaguacagcaacugcaacaccaagugccagacccccaucggcgccaucaacagcagcaugcccuuccacaacauccacccccugaccaucggcgagugccccaaguacgugaagagcaacagacuggugcuggccaccggccugagaaacagcccccagggcgagaagagaagaaagaagagaggccuguucggcgccaucgccggcuucaucgagggcggcuggcagggcaugguggacggcugguacggcuaccaccacagcaacgagcagggcagcggcuacgccgccgacaaggagagcacccagagagccaucgacggcgugaccaacaaggugaacagcaucaucgacaagaugaacacccaguucgaggccgugggcagagaguucaacaaccuggagagaagaaucgagaaccugaacaagaagauggaggacggcuuccuggacguguggaccuacaacgccgagcugcuggugcugauggagaacgagagaacccuggacuuccacgacagcaacgugaagaaccuguacgacaaggugagacugcagcugagagacaacgccaaggagcugggcaacggcugcuucgaguucuaccacagaugcgacaacgagugcauggagagcgugagaaacggcaccuacgacuacccccaguacagcgaggaggccagacugaagagagaggagaucagcggcgugaagcuggagagcaucggcaccuaccagauccugagcaucuacagcaccguggccagcagccuggcccuggccaucaugguggccggccugagccuguggaugugcagcaacggcagccugcagugcagaaucugcaucuga

SEQ ID NO: 173024 - RNA, 1701 nt, Artificial Sequence; identical to SEQ ID NO: 172501
  derived and/or modified CDS sequence (opt4) from hemagglutinin__InfluenzaA__AKA54643

SEQ ID NO: 173025 - RNA, 1701 nt, Artificial Sequence
  derived and/or modified CDS sequence (opt4) from hemagglutinin__InfluenzaA__AKA54650
augaagaccaucaucgcccugagcuacauccugugccugguguucacccagaagauccccggcaacgacaacagcaccgccacccugugccugggccaccacgccgugcccaacggcaccaucgugaagaccaucaccaacgacagaaucgaggugaccaacgccaccgagcuggugcagaacagcagcaucggcgagaucugcgacagcccccaccagauccuggacggcgagaacugcacccugaucgacgcccugcugggcgacccccagugcgacggcuuccagaacaagaagugggaccuguucguggagagaagcaaggccuacagcaacugcuaccccuacgacgugcccgacuacgccagccugagaagccugguggccagcagcggcacccuggaguucaacaacgagagcuucaacuggaccggcgugacccagaacggcaccagcagcgccugcaucagaagaagcagcagcagcuucuucagcagacugaacuggcugacccaccugaacuacaaguaccccgcccugaacgugaccaugcccaacaacgagcaguucgacaagcuguacaucuggggcgugcaccaccccggcaccgacaaggaccagaucuuccuguacgcccagagcagcggcagaaucaccgugagcaccaagagaagccagcaggccgugauccccaacaucggcagcagacccagaaucagagacauccccagcagaaucagcaucuacuggaccaucgugaagcccggcgacauccugcugaucaacagcaccggcaaccugaucgcccccagaggcuacuucaagaucagaagcggcaagagcagcaucaugagaagcgacgcccccaucggcaagugcaagagcgagugcaucacccccaacggcagcauccccaacgacaagcccuuccagaacgugaacagaaucaccuacggcgccugccccagauacgugaagcacagcacccugaagcuggccaccggcaugagaaacgugcccgagaagcagaccagaggcaucuucggcgccaucgccggcuucaucgagaacggcugggagggcaugguggacggcugguacggcuucagacaccagaacagcgagggcagaggccaggccgccgaccugaagagcacccaggccgccaucgaccagaucaacggcaagcugaacagacugaucggcaagaccaacgagaaguuccaccagaucgagaaggaguucagcgagguggagggcagaauccaggaccuggagaaguacguggaggacaccaagaucgaccuguggagcuacaacgccgagcugcugguggcccuggagaaccagcacaccaucgaccugaccgacagcgagaugaacaagcuguucgagaagaccaagaagcagcugagagagaacgccgaggacaugggcaacggcugcuucaagaucuaccacaagugcgacaacgccugcaucggcagcaucagaaacggcaccuacgaccacaacguguacagagacgaggcccugaacaacagauuccagaucaagggcguggagcugaagagcggcuacaaggacuggauccuguggaucagcuucgccaucagcugcuuccugcugugcguggcccugcugggcuucaucaugugggccugccagaagggcaacaucagaugcaacaucugcaucuga

SEQ ID NO: 173026 - RNA, 1701 nt, Artificial Sequence
  derived and/or modified CDS sequence (opt4) from hemagglutinin__InfluenzaA__AKA54651
augaagaccaucaucgccuucagcugcauccugugccagaucagcgcccagaagcugcccggcagcgacaacagcauggccacccugugccugggccaccacgccgugcccaacggcacccuggugaagaccaucaccgacgaccagaucgaggugaccaacgccaccgagcuggugcagagcaccagcaagggcgagaucugcagcagcccccaccagauccuggacggcaagaacugcacccugaucgacgcccugcugggcgacccccacugcgacgacuuccagaacaagaagugggaccuguucguggagagaagcaccgccuacagcaacugcuaccccuacuacgugcccgacuacgccagccugagaagccugguggccagcagcggcacccuggaguucacccaggagagcuucaacuggaccggcguggcccaggacggcgccagcuacagcugcagaagagagagcgagaacagcuucuucagcagacugaacuggcuguacagccugaacuacaaguaccccgcccugaacgugaccaugcccaacaacgacaaguucgacaagcuguacaucuggggcgugcaccaccccggcaccgacaaggaccagaccagccuguacauccaggccagcggcagagugaccgugagcaccaaguggagccagcagaccgugauccccaacaucggcagcagacccuggaucagaggcgugagcagcaucaucagcaucuacuggaccaucgugaagcccggcgacauccugcugaucaacagcaccggcaaccugaucgcccccagaggcuacuucaagauccagagcggcaagagcagcaucaugagaagcgacgcccacaucggcaacugcaacagcgagugcaucacccccaacggcagcauccccaacgacaagcccuuccagaacgugaacagaaucaccuacggcgccugccccagauacgugaagcagaacacccugaagcuggccaccggcaugagaaacgugcccgagaagcagaccagaggcaucuucggcgccaucgccggcuucaucgagaacggcugggagggcaugguggacggcugguacggcuucagacaccagaacagcgagggcaccggccaggccgccgaccugaagagcacccaggccgccaucaaccagaucaccggcaagcugaacagagugaucaagaagaccaacgagaaguuccaccagaucgagaaggaguucagcgagguggagggcagaauccaggaccuggagagauacguggaggacaccaagaucgaccuguggagcuacaacgccgagcugcugguggcccuggagaaccagcacaccaucgaccugaccgacagcgagaugaacaagcuguucgagagaaccagaaagcagcugagagagaacgccgaggacaugggcaacggcugcuucaagaucuaccacaagugcgacaacgccugcaucggcagcaucagaaacggcaccuacgaccacgacguguacagagacgaggccgugaacaacagauuccagaucaagggcgugcagcugaagcugggcuacaaggacuggauccuguggaucagcuucgccaucagcugcuuccugcugugcgccgugcugcugggcuucaucaugugggccugccagaagggcaacaucagaugcaacaucugcaucuga

SEQ ID NO: 173027 - RNA, 1701 nt, Artificial Sequence
  derived and/or modified CDS sequence (opt4) from hemagglutinin__InfluenzaA__AKA59351
augaaggccauccuggugauccugcuguacaccuucgccgccgccaacgccgacaccaucugcaucggcuaccacgccaacaacagcaccgacaccguggacaccgugcuggagaagaacgugaccgugacccacagcguggaccugcuggaggacaagcacaacggcagacugugcaagcugagaggcguggccccccugcaccugggcaagugcaacaucgccggcuggauccugggcaaccccgagugcgagagccugagcaccgccagcagcuggagcuacaucguggagaccagcagcagcgacaacggcaccugcuaccccggcgacuucaucgacuacgaggagcugagagagcagcugagcagcgugagcagcuucgagagauucgagaucuuccccaagaccagcagcuggcccaaccacgagagcaacaagggcgugaccgccgccugcccccaggccggcgccaagagcuucuacaagaaccugaucuggcuggugaagaaggagaacagcuaccccaagcugagcaagagcuacaucaacgacaagggcaaggaggugcuggugcuguggggcauccaccaccccagcaccagcgccgaccagcagagccuguaccagaacgccgacgccuacguguucgugggcaccagcagauacagcaagaaguucaagcccgagaucgccaucagacccaaggugagagaccaggagggcagaaugaacuacuacuggacccugguggagcccggcgacaagaucaccuucgaggccaccggcaaccugguggugcccagauacgccuucgccauggagagaaacgccggcagcggcaucaucaucagcgacacccccgugcacgacugcaacaccaccugccagacccccaagggcgccaucaacaccagccugcccuuccagaacauccaccccaucaccaucggcaagugccccaaguacgugaagagcaccaagcugagacuggccaccggccugagaaacgugcccagcauccagagcagaggccuguucggcgccaucgccggcuucaucgagggcggcuggaccggcaugguggacggcugguacggcuaccaccaccagaacgagcagggcagcggcuacgccgccgaccugaagagcacccagaacgccaucgacgagaucaccaacaaggugaacagcgugaucgagaagaugaacacccaguucaccgccgugggcaaggaguucaaccaccuggagaagagaaucgagaaccugaacaagaagguggacgacggcuuccuggacaucuggaccuacaacgccgagcugcuggugcugcuggagaacgagagaacccuggacuaccacgacagcaacgugaagaaccuguacgagaaggugagaagccagcugaagaacaacgccaaggagaucggcaacggcugcuucgaguucuaccacaagugcgacaacaccugcauggagagcgugaagaacggcaccuacgacuaccccaaguacagcgaggaggccaagcugaacagagaggagaucgacggcgugaagcuggagagcaccagaaucuaccagauccuggccaucuacagcaccguggccagcagccuggugcugguggugagccugggcgccaucagcuucuggaugugcagcaacggcagccugcagugcagaaucugcaucuga

SEQ ID NO: 173028 - RNA, 1701 nt, Artificial Sequence
  derived and/or modified CDS sequence (opt4) from hemagglutinin__InfluenzaA__AKA59353
augaaggccauccugguggugcugcuguacaccuucgccaccgccaacgccgacacccugugcaucggcuaccacgccaacaacagcaccgacaccguggacaccgugcuggagaagaacgugaccgugacccacagcgugaaccugcuggaggacaagcacaacggcaagcugugcaagcugagaggcguggccccccugcaccugggcgagugcaacaucgccggcuggauccugggcaaccccgagugcgagagccugagcaccgccagcagcuggagcuacaucguggagacccccagcagcaacaacggcaccugcuaccccggcgacuucaucgacuacgaggagcugagagagcagcugagcagcgugagcagcuucgagagauucgagaucuuccccaacaccagcagcuggcccaaccacgacagcagcaagggcgugaccgccgccugcccccacgccggcgccaagagcuucuacaagaaccugaucuggcuggugaagaagggcaacagcuaccccaagcugagcaagagcuacaucaacgacaagggcaaggaggugcuggugcuguggggcauccaccaccccagcaccagcgccgaccagcagaagcuguaccagaacgaggacgccuacguguucgugggcaccagcagauacagcaagaaguucaagcccgagaucgccaucagacccaaggugagagaccaggagggcagaaugaacuacuacuggacccugguggagcccggcgacaagaucaccuucgaggccaccggcaacaucguggugcccagauacgccuucgccauggagagaaacgccggcagcggcaucaucaucagcgacacccccgugcacaacugcaacaccaccugccagacccccaagggcgccaucaacaccagccugcccuuccagaacgugcaccccaucaccaucggcaagugccccaaguacgugaagagcaccaagcugagacuggccaccggccugagaaacgugcccagcauccagagcagaggccuguucggcgccaucgccggcuucaucgagggcggcuggaccggcaugguggacggcugguacggcuaccaccaccagaacgagcagggcagcggcuucgccgccgaccugaagagcacccagaacgccaucgacggcaucaccaacaaggugaacagcgugaucgagaagaugaacacccaguucaccgccgugggcaaggaguucaaccaccuggagaagagaaucgagaaccugaacagaaagaucgacgacggcuuccuggacaucuggaccuacaacgccgagcugcugauccugcuggagaacgagagaacccuggacuaccacgacagcaacgugagaaaccuguacgagaaggugagaagccagcugaagaacaacgccaaggagaucggcaacggcugcuucgaguucuaccacaagugcgacaacaccugcauggagagcgugaagaacggcaccuacgacuaccccaaguacagcgaggaggccaagcugaacagagaggagaucgacggcgugaagcuggagagcaccagaaucuaccagauccuggccaucuacagcaccguggccagcagccuggugcugaucgugagccugggcgccaucagcuucuggaugugcagcaacggcagccugcagugcagaaucugcaucuga

SEQ ID NO: 173029 - RNA, 1701 nt, Artificial Sequence
  derived and/or modified CDS sequence (opt4) from hemagglutinin__InfluenzaA__AKA59355
augaaggccauccugguggugcugcuguacaccuucgccaccgccaacgccgacacccugugcaucggcuaccacgccaacaacagcaccgacaccguggacaccgugcuggagaagaacgugaccgugacccacagcgugaaccugcuggaggacaagcacaacggcaagcugugcaagcugagaggcguggccccccugcaccugggcaagugcaacaucgccggcuggauccugggcaaccccgagugcgagagccugagcaccgccagcagcuggagcuacaucguggagaccagcagcagcgacaacggcaccugcuaccccggcgacuucaucgacuacgaggagcugagagagcagcugagcagcgugagcagcuucgagagauucgagaucuuccccaagaccagcagcuggcccaaccacgacagcaacaagggcgugaccgccgccugcccccacgccggcgccagaagcuucuacaagaaccugaucuggcuggugaagaagggcaacagcuaccccaagcugaaccagagcuacaucaacgacaagggcaaggaggugcuggugcuguggggcauccaccacccccccaccagcgccgaccagcagagccuguaccagaacgccgacgccuacguguucgugggcaccagcagauacagcaagaaguucaagcccgagaucgccaucagacccaaggugagagaccaggagggcagaaugaacuacuacuggacccugguggagcccggcgacaagaucaccuucgaggccaccggcaaccugguggugcccagauacgccuucgccauggagagaaacgccggcagcggcaucaucaucagcgacacccccgugcacgacugcaacaccaccugccagacccccaagggcgccaucaacaccagccugcccuuccagaacauccaccccaucaccaucggcaagugccccaaguacgugaagagcaccaagcugagacuggccaccggccugagaaacgugcccagcauccagagcagaggccuguucggcgccaucgccggcuucaucgagggcggcuggaccggcaugguggacggcugguacggcuaccaccaccagaacgagcagggcagcggcuacgccgccgaccugaagagcacccagaacgccaucgacgagaucaccaacaaggugaaccuggugaucgagaagaugaacacccaguucaccgccgugggcaaggaguucagccaccuggagaagagaaucgagaaccugaacaagaagguggacgacggcuuccuggacaucuggaccuacaacgccgagcugcuggugcugcuggagaacgagagaacccuggacuaccacgacagcaacgugaagaaccuguacgagaagaucagaagccagcugaagaacaacgccaaggagaucggcaacggcugcuucgaguucuaccacaagugcgacaacaccugcauggagagcgugaagaacggcaccuacgacuaccccaaguacagcgaggaggccaagcugaacagagaggagaucgacggcgugaagcuggagagcaccagaguguaccagauccuggccaucuacagcaccguggccagcagccuggugcugguggugagccugggcgccaucagcuucuggaugugcagcaacggcagccugcagugcagaaucugcaucuga

SEQ ID NO: 173030 - RNA, 1701 nt, Artificial Sequence
  derived and/or modified CDS sequence (opt4) from hemagglutinin__InfluenzaA__AKE37137
augaaggccagacugguggugcugcuguacaccuucgccaccgccaacgccgacacccugugcaucggcuaccacgccaacaacagcaccgacaccguggacaccgugcuggagaagaacgugaccgugacccacagcgugaaccugcuggaggacaagcacaacggcaagcugugcaagcugagaggcguggccccccugcaccugggcaagugcaacaucgccggcuggauccugggcaaccccgagugcgagagccugagcaccgccagcagcuggagcuacaucguggagaccagcagcagcgacaacggcaccugcuaccccggcgacuucaucgacuacgaggagcugagagagcagcugagcagcgugagcagcuucgagagauucgagaucuuccccaagaccagcagcuggcccaaccacgaccccaacaagggcgugaccgccgccugcccccacgccggcgccaagagcuucuacaagaaccugaucuggcuggugaagaagggcaacagcuaccccaagcugagcaccagcuacaucaacgacaagggcaaggaggugcuggugcuguggggcauccaccaccccagcaccagcgccgaccagcagagccuguaccagaacgccgacgccuacgccuucgugggcaccagcagauacagcaagaaguucaagcccgagaucgccaucagacccaaggugagagacagagagggcagaaugaacuacuacuggacccugguggagcccggcgacaagaucaccuucgaggccaccggcaaccugguggugcccagauacgccuucgccauggagagaaacgccggcagcggcaucaucaucagcgacaccagcgugcacgacugcaacaccaccugccagacccccaagggcgccaucaacaccagccugcccuuccagaacgugcaccccaucaccaucggcaagugccccaaguacgugaagagcaccaagcugagacuggccaccggccugagaaacgugcccagcauccagagcagaggccuguucggcgccaucgccggcuucaucgagggcggcuggaccggcaugguggacggcugguacggcuaccaccaccagaacgagcagggcagcggcuacgccgccgaccugaagagcacccagaacgccuucgacgagaucaccaacaaggugaacagcgugaucgagaagaugaacacccaguucaccgccgugggcaaggaguucaaccaccuggagaagagaaucgagaaccugaacaagaagguggacgacggcuuccuggacaucuggaccuacaacgccgagcugcuggugcugcuggagaacgagagaacccuggacuaccacgacagcaacgugaagaaccuguacgagaaggugagaagccagcugaagaacaacgccaaggagaucggcaacggcugcuucgaguucuaccacaagugcgacaacaccugcauggagagcgugaagaacggcaccuacgacuaccccaaguacagcgaggaggccaagcugaacagagaggagaucgacggcgugaagcuggagagcaccagaaucuaccagauccuggccaucuacagcaccguggccagcagccuggugcugguggugagccugggcgccaucagcuucuggaugugcagcaacggcagccugcagugcagaaucugcaucuga

SEQ ID NO: 173031 - RNA, 1701 nt, Artificial Sequence
  derived and/or modified CDS sequence (opt4) from hemagglutinin__InfluenzaA__AKS48035
auggagaagauggugcugcugcuggccguggugagccuggugaagagcgaccagaucugcaucggcuaccacgccaacaacagcaccgagcagguggacaccaucauggagaagaacgugaccgugacccacgcccaggacauccuggagaagacccacaacggcagacugugcgaccugaacggcgugaagccccugauccugaaggacugcagcguggccggcuggcugcugggcaaccccaugugcgacgaguucaucagagugcccgaguggagcuacaucguggagagagccaaccccgccaacgaccugugcuaccccggcaaccugaacgacuacgaggagcugaagcaccugcugagcagaaucaaccacuucgagaagacccugaucauccccaagagcagcuggcccaaccacaccagcagcggcgugagcgccgccugccccuaccagggcaugcccagcuucuucagaaacgugguguggcugaccaagaagaacgacgccuaccccaccaucaagaugagcuacaacaacaccuacagagaggaccugcugauccuguggggcauccaccacagcaacaacgccgccgagcagaccaaccuguacaagaaccccaccaccuacgugagcgugggcaccagcacccugaaccagagacuggagcccaagaucgccaccagaagccaggugaacggccagagaggcagaauggacuucuucuggaccauccugaagcccaacgacgccauccacuucgagagcaacggcaacuucaucgcccccgaguacgccuacaagaucgugaagaagggcgacagcaccaucaugaagagcgagauggaguacggccacugcaacaccaagugccagacccccaucggcgccaucaacagcagcaugcccuuccacaacauccacccccugaccaucggcgagugccccaaguacgugaagagcaacaagcuggugcuggccaccggccugagaaacagcccccugagagagagaagaagaaagagaggccuguucggcgccaucgccggcuucaucgagggcggcuggcagggcaugguggacggcugguacggcuaccaccacagcaacgagcagggcagcggcuacgccgccgacagagagagcacccagaaggccaucgacggcgugaccaacaaggugaacagcaucaucgacaagaugaacacccaguucgaggccgugggcagagaguucaacaaccuggagagaagaaucgagaaccugaacaagaagauggaggacggcuuccuggacguguggaccuacaacgccgagcugcuggugcugauggagaacgagagaacccuggacuuccacgacagcaacgugaagaaccuguacgacaaggugagacugcagcugagagacaacgccaaggagcugggcaacggcugcuucgaguucuaccacaagugcgacaacgagugcauggagagcgugagaaacggcaccuacgacuacccccaguacagcgaggaggccagacugaagagagaggagaucagcggcgugaagcuggagagcaucggcaccuaccagauccugagcaucuacagcaccguggccagcagccuggcccuggccaucaucguggccggccugagccuguggaugugcagcaacggcagccugcagugcagaaucugcaucuga

SEQ ID NO: 173032 - RNA, 1701 nt, Artificial Sequence
  derived and/or modified CDS sequence (opt4) from hemagglutinin__InfluenzaA__ALA08472
augaagaccaucaucgcccugagcuacauccugugccugguguucgcccagaagauccccggcaacgacaacagcaccgccacccugugccugggccaccacgccgugcccaacggcaccaucgugaagaccaucaccaacgacagaaucgaggugaccaacgccaccgagcuggugcagaacagcagcaucggcgagaucugcgacagcccccaccagauccuggacggcgagaacugcacccugaucgacgcccugcugggcgacccccagugcgacggcuuccagaacaagaagugggaccuguucguggagagaagcaaggccuacagcaacugcuaccccuacgacgugcccgacuacgccagccugagaagccugguggccagcagcggcacccuggaguucaacaacgagagcuucaacuggaccggcgugacccagaacggcaccagcagcgccugcaucagaagaagcagcagcagcuucuucagcagacugaacuggcugacccaccugaacuacaccuaccccgcccugaacgugaccaugcccaacaacgagcaguucgacaagcuguacguguggggcgugcaccaccccggcaccgacaaggaccagaucuuccuguacgcccagagcagcggcagaaucaccgugagcaccaagagaagccagcaggccgugauccccaacaucggcagcagacccagaaucagagacauccccagcagaaucagcaucuacuggaccaucgugaagcccggcgacauccugcugaucaacagcaccggcaaccugaucgcccccagaggcuacuucaagaucagaagcggcaagagcagcaucaugagaagcgacgcccccaucggcaagugcaagagcgagugcaucacccccaacggcagcauccccaacgacaagcccuuccagaacgugaacagaaucaccuacggcgccugccccagauacgugaagcacagcacccugaagcuggccaccggcaugagaaacgugcccgagaagcagaccagaggcaucuucggcgccaucgccggcuucaucgagaacggcugggagggcaugguggacggcugguacggcuucagacaccagaacagcgagggcagaggccaggccgccgaccugaagagcacccaggccgccaucgaccagaucaacggcaagcugaacagacugaucggcaagaccaacgagaaguuccaccagaucgagaaggaguucagcgagguggagggcagaauccaggaccuggagaaguacguggaggacaccaagaucgaccuguggagcuacaacgccgagcugcugguggcccuggagaaccagcacaccaucgaccugaccgacagcgagaugaacaagcuguucgagaagaccaagaagcagcugagagagaacgccgaggacaugggcaacggcugcuucaagaucuaccacaagugcgacaacgccugcaucggcagcaucagaaacggcaccuacgaccacaacguguacagagacgaggcccugaacaacagauuccagaucaagggcguggagcugaagagcggcuacaaggacuggauccuguggaucagcuucgccaucagcugcuuccugcugugcguggcccugcugggcuucaucaugugggccugccagaagggcaacaucagaugcaacaucugcaucuga

SEQ ID NO: 173033 - RNA, 1701 nt, Artificial Sequence; identical to SEQ ID NO: 172501
  derived and/or modified CDS sequence (opt4) from hemagglutinin__InfluenzaA__ALA08475

SEQ ID NO: 173034 - RNA, 1701 nt, Artificial Sequence
  derived and/or modified CDS sequence (opt4) from hemagglutinin__InfluenzaA__ALA08478
augaagaccaucaucgcccugagcuacauccugugccugguguucgcccagaagcugcccggcaacgacaacagcaccgccacccugugccugggccaccacgccgugcccaacggcaccaucgugaagaccaucaccaacgacagaaucgaggugaccaacgccaccgagcuggugcagaacagcagcaucggcgagaucugcgacagcccccaccagauccuggacggcaagaacugcacccugaucgacgcccugcugggcgacccccagugcgacggcuuccagaacaagagaugggaccuguucguggagagaagcaaggccuacagcaacugcuaccccuacgacgugcccgacuacgccagccugagaagccugguggccagcagcggcacccuggaguucaacgacgagagcuucaacugggccggcgugacccagaacggcaccagcagcgccugcaucagaggcagcaacagcagcuucuucagcagacugaacuggcugacccacagcaacuucaaguaccccgcccugaacgugaccaugcccaacaacgagcaguucgacaagcuguacaucuggggcgugcaccaccccggcaccgacaaggaccagaucuuccuguacgcccagagcagcggcagaaucaccgugagcaccaagagaagccagcaggccgugauccccaacaucggcagcagacccagaaucagaaacauccccagcagaaucagcaucuacuggaccaucgugaagcccggcgacauccugcugaucaacagcaccggcaaccugaucgcccccagaggcuacuucaagauccagagcggcaagagcagcaucaugagaagcgacgcccccaucggcaagugcaagagcgagugcaucacccccaacggcagcauccccaacgacaagcccuuccagaacgugaacagaaucaccuacggcgccugccccagauacgugaagcagagcacccugaagcuggccaccggcaugagaaacgugcccgagaagcagaccagaggcaucuucggcgccaucgccggcuucaucgagaacggcugggagggcaugaaggacggcugguacggcuucagacaccagaacagcgagggcagaggccaggccgccgaccugaagagcacccaggccgccaucgaccagaucaacggcaagcugaacagacugaucggcaagaccaacgagaaguuccaccagaucgagaaggaguucagcgagguggagggcagaauccaggaccuggagaaguacguggaggacaccaagaucgaccuguggagcuacaacgccgagcugcugguggcccuggagaaccagcacaccaucgaccugaccgacagcgagaugaacaagcuguucgagaagaccaagaagcagcugagagagaacgccgaggacaugggcaacggcugcuucaagaucuaccacaagugcgacaacgccugcaucggcagcaucagaaacggcaccuacgaccacgacguguacagagacgaggcccugaacaacagauuccagaucaagggcguggagcugaagagcggcuacaaggacuggauccuguggaucagcuucgccaucagcugcuuccugcugugcguggcccugcugggcuucaucaugugggccugccagaagggcaacaucagaugcaacaucugcaucuga

SEQ ID NO: 173035 - RNA, 1701 nt, Artificial Sequence; identical to SEQ ID NO: 170054
  derived and/or modified CDS sequence (opt4) from hemagglutinin__InfluenzaA__ALA08479

SEQ ID NO: 173036 - RNA, 1701 nt, Artificial Sequence
  derived and/or modified CDS sequence (opt4) from hemagglutinin__InfluenzaA__ALA08481
augaagaccaucaucgcccugagcuacauccugugccugguguucgcccagaagcugcccggcaacgacaacagcaccgccacccugugccugggccaccacgccgugcccaacggcaccaucgugaagaccaucaccaacgacagaaucgaggugaccaacgccaccgagcuggugcagaacagcagcaucggcgagaucugcgacagcccccaccagauccuggacggcgagaacugcacccugaucgacgcccugcugggcgacccccagugcgacggcuuccagaacaagaagugggaccuguucguggagagaagcaaggcccacagcaacugcuaccccuacgacgugcccgacuacgccagccugagaagccugguggccagcagcggcacccuggaguucaacaacgagagcuucaacugggccggcgugacccagaacggcaccagcagcagcugcaucagaggcagcaacagcagcuucuucagcagacugaacuggcugacccaccugaacagcaaguaccccgcccugaacgugaccaugcccaacaacgagcaguucgacaagcuguacaucuggggcgugcaccaccccggcaccgacaaggaccagaucuuccuguacgcccagagcagcggcagaaucaccgugagcaccaagagaagccagcaggccgugauccccaacaucggcagcagacccagaaucagagacauccccagcagaaucagcaucuacuggaccaucgugaagcccggcgacauccugcugaucaacagcaccggcaaccugaucgcccccagaggcuacuucaagaucagaagcggcaagagcagcaucaugagaagcgacgcccccaucggcaagugcaagagcgagugcaucacccccaacggcagcauccccaacgacaagcccuuccagaacgugaacagaaucaccuacggcgccugccccagauacgugaagcagagcacccugaagcuggccaccggcaugagaaacgugcccgagagacagaccagaggcaucuucggcgccaucgccggcuucaucgagaacggcugggagggcaugguggacggcugguacggcuucagacaccagaacagcgagggcagaggccaggccgccgaccugaagagcacccaggccgccaucgaccagaucaacggcaagcugaacagacugaucggcaagaccaacgagaaguuccaccagaucgagaaggaguucagcgagguggagggcagaauccaggaccuggagaaguacguggaggacaccaagaucgaccuguggagcuacaacgccgagcugcugguggcccuggagaaccagcacaccaucgaccugaccgacagcgagaugaacaagcuguucgagaagaccaagaagcagcugagagagaacgccgaggacaugggcaacggcugcuucaagaucuaccacaagugcgacaacgccugcaucggcagcaucagaaacggcaccuacgaccacgacguguacagagacgaggcccugaacaacagauuccagaucaagggcguggagcugaagagcggcuacaaggacuggauccuguggaucagcuucgccaucagcugcuuccugcugugcguggcccugcugggcuucaucaugugggccugccagaagggcaacaucagaugcaacaucugcaucuga

SEQ ID NO: 173037 - RNA, 1701 nt, Artificial Sequence; identical to SEQ ID NO: 173036
  derived and/or modified CDS sequence (opt4) from hemagglutinin__InfluenzaA__ALA08482

SEQ ID NO: 173038 - RNA, 1701 nt, Artificial Sequence
  derived and/or modified CDS sequence (opt4) from hemagglutinin__InfluenzaA__ALA08483
augaagaccaucaucggccugagcuacauccugugccugguguucgcccagaagcugcccggcaacgacaacagcaccgccacccugugccugggccaccacgccgugcccaacggcaccaucgugaagaccaucaccaacgacagaaucgaggugaccaacgccaccgagcuggugcagaacagcagcaucggcgagaucugcgacagcccccaccagauccuggacggcgagaacugcacccugaucgacgcccugcugggcgacccccagugcgacggcuuccagaacaagaagugggaccuguucguggagagaagcaaggccuacagcaacugcuaccccuacgacgugcccgacuacgccagccugagaagccugguggccagcagcggcacccuggaguucaacaacgagagcuucaacugggccggcgugacccagaacggcaccagcagcagcugcaucagaggcagcaacagcagcuucuucagcagacugaacuggcugacccaccugaacagcaaguaccccgcccugaacgugaccaugcccaacaacgagcaguucgacaagcuguacaucuggggcgugcaccaccccggcaccgacaaggaccagaucuuccuguacgcccagagcagcggcagaaucaccgugagcaccaagagaagccagcaggccgugauccccaacaucggcagcagacccagaaucagagacauccccagcagaaucagcaucuacuggaccaucgugaagcccggcgacauccugcugaucaacagcaccggcaaccugaucgcccccagaggcuacuucaagaucagaagcggcaagagcagcaucaugagaagcgacgcccccaucggcaagugcaagagcgagugcaucacccccaacggcagcauccccaacgacaagcccuuccagaacgugaacagaaucaccuacggcgccugccccagauacgugaagcagagcacccugaagcuggccaccggcaugagaaacgugcccgagagacagaccagaggcaucuucggcgccaucgccggcuucaucgagaacggcugggagggcaugguggacggcugguacggcuucagacaccagaacagcgagggcagaggccaggccgccgaccugaagagcacccaggccgccaucgaccagaucaacggcaagcugaacagacugaucggcaagaccaacgagaaguuccaccagaucgagaaggaguucagcgagguggagggcagaauccaggaccuggagaaguacguggaggacaccaagaucgaccuguggagcuacaacgccgagcugcugguggcccuggagaaccagcacaccaucgaccugaccgacagcgagaugaacaagcuguucgagaagaccaagaagcagcugagagagaacgccgaggacaugggcaacggcugcuucaagaucuaccacaagugcgacaacgccugcaucggcagcaucagaaacggcaccuacgaccacgacguguacagagacgaggcccugaacaacagauuccagaucaagggcguggagcugaagagcggcuacaaggacuggauccuguggaucagcuucgccaucagcugcuuccugcugugcguggcccugcugggcuucaucaugugggccugccagaagggcaacaucagaugcaacaucugcaucuga

SEQ ID NO: 173039 - RNA, 1701 nt, Artificial Sequence
  derived and/or modified CDS sequence (opt4) from hemagglutinin__InfluenzaA__ALA08484
augaagaccaucaucgcccugagcuacauccugugccugguguucgcccagaagauccccggcaacgacaacagcaccgccacccugugccugggccaccacgccgugcccaacggcaccaucgugaagaccaucaccaacgacagaaucgaggugaccaacgccaccgagcuggugcagaacagcagcaucggcgagaucugcgacagcccccaccagauccuggacggcgagaacugcacccugaucgacgcccugcugggcgacccccagugcgacggcuuccagaacaagaagugggaccuguucguggagagaagcaaggccuacagcaacugcuaccccuacgacgugcccgacuacgccagccugagaagccugguggccagcagcggcacccuggaguucaacaacgagagcuucaacuggaccggcgugacccagaacggcaccagcagcgccugcaucagaagaagcagcagcagcuucuucagcagacugaacuggcugacccaccugaacuacaccuaccccgcccugaacgugaccaugcccaacaacgagcaguucgacaagcuguacaucuggggcgugcaccaccccggcaccgacaaggaccagaucuuccuguacgcccagagcagcggcagaaucaccaucagcaccaagagaagccagcaggccgugauccccaacaucggcagcagacccagaaucagagacauccccagcagaaucagcaucuacuggaccaucgugaagcccggcgacauccugcugaucaacagcaccggcaaccugaucgcccccagaggcuacuucaagaucagaagcggcaagagcagcaucaugagaagcgacgcccccaucggcaagugcaagagcgagugcaucacccccaacggcagcauccccaacgacaagcccuuccagaacgugaacagaaucaccuacggcgccugccccagauacgugaagcacagcacccugaagcuggccaccggcaugagaaacgugcccgagaagcagaccagaggcaucuucggcgccaucgccggcuucaucgagaacggcugggagggcaugguggacggcugguacggcuucagacaccagaacagcgagggcagaggccaggccgccgaccugaagagcacccaggccgccaucgaccagaucaacggcaagcugaacagacugaucggcaagaccaacgagaaguuccaccagaucgagaaggaguucagcgagguggagggcagaauccaggaccuggagaaguacguggaggacaccaagaucgaccuguggagcuacaacgccgagcugcugguggcccuggagaaccagcacaccaucgaccugaccgacagcgagaugaacaagcuguucgagaagaccaagaagcagcugagagagaacgccgaggacaugggcaacggcugcuucaagaucuaccacaagugcgacaacgccugcaucggcagcaucagaaacggcaccuacgaccacaacguguacagagacgaggcccugaacaacagauuccagaucaagggcguggagcugaagagcggcuacaaggacuggauccuguggaucagcuucgccaucagcugcuuccugcugugcguggcccugcugggcuucaucaugugggccugccagaagggcaacaucagaugcaacaucugcaucuga

SEQ ID NO: 173040 - RNA, 1701 nt, Artificial Sequence
  derived and/or modified CDS sequence (opt4) from hemagglutinin__InfluenzaA__ALA08488
augaagaccaucaucgcccugagcuacauccugugccugguguucgcccagaagauccccggcaacggcaacagcaccgccacccugugccugggccaccacgccgugcccaacggcaccaucgugaagaccaucaccaacgacagaaucgaggugaccaacgccaccgagcuggugcagaacagcagcaucggcgagaucugcgacagcccccaccagauccuggacggcgagaacugcacccugaucgacgcccugcugggcgacccccagugcgacggcuuccagaacaagaagugggaccuguucguggagagaagcaaggccuacagcaacugcuaccccuacgacgugcccgacuacgccagccugagaagccugguggccagcagcggcacccuggaguucaacaacgagagcuucaacuggaccggcgugacccagaacggcaccagcagcgccugcaucagaagaagcagcagcagcuucuucagcagacugaacuggcugacccaccugaacuacaccuaccccgcccugaacgugaccaugcccaacaacgagcaguucgacaagcuguacaucuggggcgugcaccaccccggcaccgacaaggaccagaucuuccuguacgcccagagcagcggcagaaucaccgugagcaccaagagaagccagcaggccgugauccccaacaucggcagcagacccagaaucagagacauccccagcagaaucagcaucuacuggaccaucgugaagcccggcgacauccugcugaucaacagcaccggcaaccugaucgcccccagaggcuacuucaagaucagaagcggcaagagcagcaucaugagaagcgacgcccccaucggcaagugcaagagcgagugcaucacccccaacggcagcauccccaacgacaagcccuuccagaacgugaacagaaucaccuacggcgccugccccagauacgugaagcacagcacccugaagcuggccaccggcaugagaaacgugcccgagaagcagaccagaggcaucuucggcgccaucgccggcuucaucgagaacggcugggagggcaugguggacggcugguacggcuucagacaccagaacagcgagggcagaggccaggccgccgaccugaagagcacccaggccgccaucgaccagaucaacggcaagcugaacagacugaucggcaagaccaacgagaaguuccaccagaucgagaaggaguucagcgagguggagggcagaauccaggaccuggagaaguacguggaggacaccaagaucgaccuguggagcuacaacgccgagcugcugguggcccuggagaaccagcacaccaucgaccugaccgacagcgagaugaacaagcuguucgagaagaccaagaagcagcugagagagaacgccgaggacaugggcaacggcugcuucaagaucuaccacaagugcgacaacgccugcaucggcagcaucagaaacggcaccuacgaccacaacguguacagagacgaggcccugaacaacagauuccagaucaagggcguggagcugaagagcggcuacaaggacuggauccuguggaucagcuucgccaucagcugcuuccugcugugcguggcccugcugggcuucaucaugugggccugccagaagggcaacaucagaugcaacaucugcaucuga

SEQ ID NO: 173041 - RNA, 1701 nt, Artificial Sequence
  derived and/or modified CDS sequence (opt4) from hemagglutinin__InfluenzaA__ALA08490
augaagaccaucaucgcccugagcuacauccugugccugguguucgcccagaagauccccggcaacgacaacagcaccgccacccugugccugggccaccacgccgugcccaacggcaccaucgugaagaccaucaccaacgacagaaucgaggugaccaacgccaccgagcuggugcagaacagcagcaucggcgagaucugcgacagcccccaccagauccuggacggcgagaacugcacccugaucgacgcccugcugggcgacccccagugcgacggcuuccagaacaagaagugggaccuguucguggagagaagcaaggccuacagcaacugcuaccccuacgacgugcccgacuacgccagccugagaagccugguggccagcagcggcacccuggaguucaacaacgagagcuucaacuggaccggcgugacccagaacggcaccagcagcgccugcaucagaagaagcagcagcagcuucuucagcagacugaacuggcugacccaccugaacuacaccuaccccgcccugaacgugaccaugcccaacaacgagcaguucgacaagcuguacaucuggggcgugcaccaccccggcaccgacaaggaccagaucuuccuguacgcccagagcagcggcagaaucaccgugagcaccaagagaagccagcaggccgugauccccaacaucggcagcagacccagaaucagagacauccccagcagaaucagcaucuacuggaccaucgugaagcccggcgacauccugcugaucaacagcaccggcaaccugaucgcccccagaggcuacuucaagaucagaagcggcaagagcagcaucaugagaagcgacgcccccaucggcaagugcaagagcgagugcaucacccccaacggcagcauccccaacgacaagcccuuccagaacgugaacagaaucaccuacggcgccugccccagauacgugaagcacagcacccugaagcuggccaccggcaugagaaacgugcccgagaagcagaccagaggcaucuucggcgccaucgccggcuucaucgagaacggcugggagggcaugguggacggcugguacggcuucagacaccagaacagcgagggcagaggccaggccgccgaccugaagagcacccaggccgccaucgaccagaucaacggcaagcugaacagacugaucggcaagaccaacgagaaguuccaccagaucgagaaggaguucagcgagguggagggcagaauccaggaccuggagaaguacguggaggacaccaagaucgaccuguggagcuacaacgccgagcugcugguggcccuggagaaccagcacaccaucgaccugaccgacagcgagaugaacaagcuguucgagaagaccaagaagcagcugagagagaacgccgaggacaugggcaacggcugcuucaagaucuaccacaagugcgacaacgccugcaucggcagcaucagaaacggcaccuacgaccacaacguguacagagacgaggcccugaacaacagauuccagaucaagggcaucgagcugaagagcggcuacaaggacuggauccuguggaucagcuucgccaucagcugcuuccugcugugcguggcccugcugggcuucaucaugugggccugccagaagggcaacaucagaugcaacaucugcaucuga

SEQ ID NO: 173042 - RNA, 1701 nt, Artificial Sequence
  derived and/or modified CDS sequence (opt4) from hemagglutinin__InfluenzaA__ALA08491
augaagaccaucaucgcccugagcuacauccugugccugguguucgcccagaagcugcccggcaacgacaacagcaccgccacccugugccugggccaccacgccgugcccaacggcaccaucgugaagaccaucaccaacgacagaaucgaggugaccaacgccaccgagcuggugcagaacagcagcaucggcgagaucugcgacagcccccaccagauccuggacggcgagaacugcacccugaucgacgcccugcugggcgacccccagugcgacggcuuccagaacaagaagugggaccuguucguggagagaagcaaggccuacagcaacugcuaccccuacgacgugcccgacuacgccagccugagaagccugguggccagcagcggcacccuggaguucaacaacgagagcuucaacugggccggcgugacccagaacggcaccagcagcgccugcaucagaggcagcaacagcagcuucuucagcagacugaacuggcugacccaccugaacuucaaguaccccgcccugaacaugaccaugcccaacaacgagcaguucgacaagcuguacaucuggggcgugcaccaccccggcaccgacaaggaccagaucuuccuguacgcccagagcagcggcagaaucaccgugagcaccaagagaagccagcaggccgugauccccaacaucggcagcagacccagaaucagaaacauccccagcagaaucagcaucuacuggaccaucgugaagcccggcgacauccugcugaucaacagcaccggcaaccugaucgcccccagaggcuacuucaagaucagaagcggcaagagcagcaucaugagaagcgacgcccccaucggcaagugcaagagcgagugcaucacccccaacggcagcauccccaacgacaagcccuuccagaacgugaacagaaucaccuacggcgccugccccagauacgugaagcagagcacccugaagcuggccaccggcaugagaaacgugcccgagaagcagaccagaggcaucuucggcgccaucgccggcuucaucgagaacggcugggagggcaugaaggacggcugguacggcuucagacaccagaacagcgagggcagaggccaggccgccgaccugaagagcacccaggccgccaucgaccagaucaacggcaagcugaacagacugaucggcaagaccaacgagaaguuccaccagaucgagaaggaguucagcgagguggagggcagaauccaggaccuggagaaguacguggaggacaccaagaucgaccuguggagcuacaacgccgagcugcugguggcccuggagaaccagcacaccaucgaccugaccgacagcgagaugaacaagcuguucgagaagaccaagaagcagcugagagagaacgccgaggacaugggcaacggcugcuucaagaucuaccacaagugcgacaacgccugcaucggcagcaucagaaacggcaccuacgaccacgacguguacagagacgaggcccugaacaacagauuccagaucaagggcguggagcugaagagcggcuacaaggacuggauccuguggaucagcuucgccaucagcugcuuccugcugugcguggcccugcugggcuucaucaugugggccugccagaagggcaacaucagaugcaacaucugcaucuga

SEQ ID NO: 173043 - RNA, 1701 nt, Artificial Sequence; identical to SEQ ID NO: 173041
  derived and/or modified CDS sequence (opt4) from hemagglutinin__InfluenzaA__ALA08492

SEQ ID NO: 173044 - RNA, 1701 nt, Artificial Sequence
  derived and/or modified CDS sequence (opt4) from hemagglutinin__InfluenzaA__ALA08493
augaagaccaucaucgcccugagcuacauccugugccugguguucgcccagaagauccccggcaacgacaacagcaccgccacccugugccugggccaccacgccgugcccaacggcaccaucgugaagaccaucaccaacgacagaaucgaggugaccaacgccaccgagcuggugcagaacagcagcaucggcgagaucugcgacagcccccaccagauccuggacggcgagaacugcacccugaucgacgcccugcugggcgacccccagugcgacggcuuccagaacaagaagugggaccuguucguggagagaagcaaggccuacagcaacugcuaccccuacgacgugcccgacuacgccagccugagaagccugguggccagcagcggcacccuggaguucaacaacgagagcuucaacuggaccggcgugacccagaacggcaccagcagcgccugcaucagaagaagcagcagcagcuucuucagcagacugaacuggcugacccaccugaacuacaccuaccccgcccugaacgugaccaugcccaacaacgagcaguucgacaagcuguacaucuggggcgugcaccaccccggcaccgacaaggaccagaucuuccuguacgcccagagcagcggcagaaucaccgugagcaccaagagaagccagcaggccgugauccccaacaucggcagcagacccagaaucagagacauccccagcagaaucagcaucuacuggaccaucgugaagcccggcgacauccugcugaucaacagcaccggcaaccugaucgcccccagaggcuacuucaagaucagaagcggcaagagcagcaucaugagaagcgacgcccccaucggcaagugcagaagcgagugcaucacccccaacggcagcauccccaacgacaagcccuuccagaacgugaacagaaucaccuacggcgccugccccagauacgugaagcacagcacccugaagcuggccaccggcaugagaaacgugcccgagaagcagaccagaggcaucuucggcgccaucgccggcuucaucgagaacggcugggagggcaugguggacggcugguacggcuucagacaccagaacagcgagggcagaggccaggccgccgaccugaagagcacccaggccgccaucgaccagaucaacggcaagcugaacagacugaucggcaagaccaacgagaaguuccaccagaucgagaaggaguucagcgagguggagggcagaauccaggaccuggagaaguacguggaggacaccaagaucgaccuguggagcuacaacgccgagcugcugguggcccuggagaaccagcacaccaucgaccugaccgacagcgagaugaacaagcuguucgagaagaccaagaagcagcugagagagaacgccgaggacaugggcaacggcugcuucaagaucuaccacaagugcgacaacgccugcaucggcagcaucagaaacggcaccuacgaccacaacguguacagagacgaggcccugaacaacagauuccagaucaagggcaucgagcugaagagcggcuacaaggacuggauccuguggaucagcuucgccaucagcugcuuccugcugugcguggcccugcugggcuucaucaugugggccugccagaagggcaacaucagaugcaacaucugcaucuga

SEQ ID NO: 173045 - RNA, 1701 nt, Artificial Sequence
  derived and/or modified CDS sequence (opt4) from hemagglutinin__InfluenzaA__ALA08494
augaagaccaucaucgcccugagcuacauccugugccugguguucgcccagaagauccccggcaacgacaacagcaccgccacccugugccugggccaccacgccgugcccaacggcaccaucgugaagaccaucaccaacgacagaaucgaggugaccaacgccaccgagcuggugcagaacagcagcaucggcgagaucugcgacagcccccaccagauccuggacggcgagaacugcacccugaucgacgcccugcugggcgacccccagugcgacggcuuccagaacaagaagugggaccuguucguggagagaagcaaggccuacagcaacugcuaccccuacgacgugcccgacuacgccagccugagaagccugguggccagcagcggcacccuggaguucaacaacgagagcuucaacuggaccggcgugacccagaacggcaccagcagcgccugcaucagaagaagcagcagcagcuucuucagcagacugaacuggcugacccaccugaacuacaccuaccccgcccugaacgugaccaugcccaacaacgagcaguucgacaagcuguacaucuggggcgugcaccaccccggcaccgacaaggaccagaucuuccuguacgcccagagcagcggcagaaucaccgugagcaccaagggcagccagcaggccgugauccccaacaucggcagcagacccagaaucagagacauccccagcagaaucagcaucuacuggaccaucgugaagcccggcgacauccugcugaucaacagcaccggcaaccugaucgcccccagaggcuacuucaagaucagaagcggcaagagcagcaucaugagaagcgacgcccccaucggcaagugcaagagcgagugcaucacccccaacggcagcauccccaacgacaagcccuuccagaacgugaacagaaucaccuacggcgccugccccagauacgugaagcacagcacccugaagcuggccaccggcaugagaaacgugcccgagaagcagaccagaggcaucuucggcgccaucgccggcuucaucgagaacggcugggagggcaugguggacggcugguacggcuucagacaccagaacagcgagggcagaggccaggccgccgaccugaagagcacccaggccgccaucgaccagaucaacggcaagcugaacagacugaucggcaagaccaacgagaaguuccaccagaucgagaaggaguucagcgagguggagggcagaauccaggaccuggagaaguacguggaggacaccaagaucgaccuguggagcuacaacgccgagcugcugguggcccuggagaaccagcacaccaucgaccugaccgacagcgagaugaacaagcuguucgagaagaccaagaagcagcugagagagaacgccgaggacaugggcaacggcugcuucaagaucuaccacaagugcgacaacgccugcaucggcagcaucagaaacggcaccuacgaccacaacguguacagagacgaggcccugaacaacagauuccagaucaagggcguggagcugaagagcggcuacaaggacuggauccuguggaucagcuucgccaucagcugcuuccugcugugcguggcccugcugggcuucaucaugugggccugccagaagggcaacaucagaugcaacaucugcaucuga

SEQ ID NO: 173046 - RNA, 1701 nt, Artificial Sequence; identical to SEQ ID NO: 173045
  derived and/or modified CDS sequence (opt4) from hemagglutinin__InfluenzaA__ALA08495

SEQ ID NO: 173047 - RNA, 1701 nt, Artificial Sequence; identical to SEQ ID NO: 173045
  derived and/or modified CDS sequence (opt4) from hemagglutinin__InfluenzaA__ALA08496

SEQ ID NO: 173048 - RNA, 1701 nt, Artificial Sequence; identical to SEQ ID NO: 172501
  derived and/or modified CDS sequence (opt4) from hemagglutinin__InfluenzaA__ALA08497

SEQ ID NO: 173049 - RNA, 1701 nt, Artificial Sequence; identical to SEQ ID NO: 172501
  derived and/or modified CDS sequence (opt4) from hemagglutinin__InfluenzaA__ALA08498

SEQ ID NO: 173050 - RNA, 1701 nt, Artificial Sequence
  derived and/or modified CDS sequence (opt4) from hemagglutinin__InfluenzaA__ALA08499
augaagaccaucaucgcccugagcuacauccugugccugguguucgcccagaagcugcccgagaacgacaacagcaccgccacccugugccugggccaccacgccgugcccaacggcaccaucgugaagaccaucaccagcgacagaaucgaggugaccaacgccaccgagcuggugcagaacagcagcaucggcgagaucugcgacagcccccaccagauccuggacggcaagaacugcacccugaucgacgcccugcugggcgacccccagugcgacggcuuccagaacaagaagugggaccuguucguggagagaagcaaggccuacagcaacugcuaccccuacgacgugcccgacuacgccagccugagaagccugguggccagcagcggcacccuggaguucaacgacgagagcuucaacugggccggcgugacccagaacggcaccagcagcgccugcaucagaggcagcaacagcagcuucuucagcagacugaacuggcugacccacagcaacuucaaguaccccgcccugaacgugaccaugcccaacaacgagcaguucgacaagcuguacaucuggggcgugcaccaccccggcaccgacaaggaccagaucuuccuguacgcccagagcagcggcagaaucaccgugagcaccaagagaagccagcaggccgugauccccaacaucggcagcagacccagaaucagagacauccccagcagaaucagcaucuacuggaccaucgugaagcccggcgacauccugcugaucaacagcaccggcaaccugaucgcccccagaggcuacuucaagaucagaagcggcaagagcagcaucaugagaagcgacgcccccaucggcaagugcaagagcgagugcaucacccccaacggcagcauccccaacgacaagcccuuccagaacgugaacagaaucaccuacggcgccugccccagauacgugaagcagagcacccugaagcuggccaccggcaugagaaacgugcccgagaagcagaccagaggcaucuucggcgccaucgccggcuucaucgagaacggcugggagggcaugaaggacggcugguacggcuucagacaccagaacagcgagggcagaggccaggccgccgaccugaagagcacccaggccgccaucgaccagaucaacggcaagcugaacagacugaucggcaagaccaacgagaaguuccaccagaucgagaaggaguucagcgagguggagggcagaauccaggaccuggagaaguacguggaggacaccaagguggaccuguggagcuacaacgccgagcugcugguggcccuggagaaccagcacaccaucgaccugaccgacagcgagaugaacaagcuguucgagaagaccaagaagcagcugagagagaacgccgaggacaugggcaacggcugcuucaagaucuaccacaagugcgacaacgccugcaucggcagcaucagaaacggcaccuacgaccacgacguguacagagacgaggcccugaacaacagauuccagaucaagggcguggagcugaagagcggcuacaaggacuggauccuguggaucagcuucgccaucagcugcuuccugcugugcguggcccugcugggcuucaucaugugggccugccagaagggcaacaucagaugcaacaucugcaucuga

SEQ ID NO: 173051 - RNA, 1701 nt, Artificial Sequence; identical to SEQ ID NO: 173034
  derived and/or modified CDS sequence (opt4) from hemagglutinin__InfluenzaA__ALA08501

SEQ ID NO: 173052 - RNA, 1701 nt, Artificial Sequence
  derived and/or modified CDS sequence (opt4) from hemagglutinin__InfluenzaA__ALA08502
augaagaccaucaucgcccugagcuacauccugugccugguguucgcccagaagcugcccgagaacgacaacagcaccgccacccugugccugggccaccacgccgugcccaacggcaccaucgugaagaccaucaccagcgacagaaucgaggugaccaacgccaccgagcuggugcagaacagcagcaucggcgagaucugcgacagcccccaccagauccuggacggcaagaacugcacccugaucgacgcccugcugggcgacccccagugcgacggcuuccagaacaagaagugggaccuguucguggagagaagcaaggccuacagcaacugcuaccccuacgacgugcccgacuacgccagccugagaagccugguggccagcagcggcacccuggaguucaacgacgagagcuucaacugggccggcgugacccagaacggcaccagcagcgccugcaucagaggcagcaacagcagcuucuucagcagacugaacuggcugacccacagcaacuucaaguaccccgcccugaacgugaccaugcccaacaacgagcaguucgacaagcuguacaucuggggcgugcaccaccccggcaccgacaaggaccagaucuuccuguacgcccagagcagcggcagaaucaccgugagcaccaagagaagccagcaggccgugauccccaacaucggcagcagacccagaaucagaaacauccccagcagaaucagcaucuacuggaccaucgugaagcccggcgacauccugcugaucaacagcaccggcaaccugaucgcccccagaggcuacuucaagaucagaagcggcaagagcagcaucaugagaagcgacgcccccaucggcaagugcaagagcgagugcaucacccccaacggcagcauccccaacgacaagcccuuccagaacgugaacagaaucaccuacggcgccugccccagauacgugaagcagagcacccugaagcuggccaccggcaugagaaacgugcccgagaagcagaccagaggcaucuucggcgccaucgccggcuucaucgagaacggcugggagggcaugaaggacggcugguacggcuucagacaccagaacagcgagggcagaggccaggccgccgaccugaagagcacccaggccgccaucgaccagaucaacggcaagcugaacagacugaucggcaagaccaacgagaaguuccaccagaucgagaaggaguucagcgagguggagggcagaauccaggaccuggagaaguacguggaggacaccaagguggaccuguggagcuacaacgccgagcugcugguggcccuggagaaccagcacaccaucgaccugaccgacagcgagaugaacaagcuguucgagaagaccaagaagcagcugagagagaacgccgaggacaugggcaacggcugcuucaagaucuaccacaagugcgacaacgccugcaucggcagcaucagaaacggcaccuacgaccacgacguguacagagacgaggcccugaacaacagauuccagaucaagggcguggagcugaagagcggcuacaaggacuggauccuguggaucagcuucgccaucagcugcuuccugcugugcguggcccugcugggcuucaucaugugggccugccagaagggcaacaucagaugcaacaucugcaucuga

SEQ ID NO: 173053 - RNA, 1701 nt, Artificial Sequence; identical to SEQ ID NO: 173052
  derived and/or modified CDS sequence (opt4) from hemagglutinin__InfluenzaA__ALA08503

SEQ ID NO: 173054 - RNA, 1701 nt, Artificial Sequence; identical to SEQ ID NO: 172501
  derived and/or modified CDS sequence (opt4) from hemagglutinin__InfluenzaA__ALA08504

SEQ ID NO: 173055 - RNA, 1701 nt, Artificial Sequence; identical to SEQ ID NO: 172501
  derived and/or modified CDS sequence (opt4) from hemagglutinin__InfluenzaA__ALA08505

SEQ ID NO: 173056 - RNA, 1701 nt, Artificial Sequence; identical to SEQ ID NO: 172501
  derived and/or modified CDS sequence (opt4) from hemagglutinin__InfluenzaA__ALA08506

SEQ ID NO: 173057 - RNA, 1701 nt, Artificial Sequence; identical to SEQ ID NO: 172501
  derived and/or modified CDS sequence (opt4) from hemagglutinin__InfluenzaA__ALA08507

SEQ ID NO: 173058 - RNA, 1701 nt, Artificial Sequence
  derived and/or modified CDS sequence (opt4) from hemagglutinin__InfluenzaA__ALA08508
augaagaccaucaucgcccugagcuacauccugugccugguguucgcccagaagcugcccgagaacgacaacagcaccgccacccugugccugggccaccacgccgugcccaacggcaccaucgugaagaccaucaccagcgacagaaucgaggugaccaacgccaccgagcuggugcagaacagcagcaucggcgagaucugcgacagcccccaccagauccuggacggcaagaacugcacccugaucgacgcccugcugggcgacccccagugcgacggcuuccagaacaagaagugggaccuguucguggagagaagcaaggccuacagcaacugcuaccccuacgacgugcccgacuacgccagccugagaagccugguggccagcagcggcacccuggaguucaacgacgagagcuucaacugggccggcgugacccagaacggcaccagcagcgccugcaucagaggcagcaacagcagcuucuucagcagacugaacuggcugacccacagcaacuucaaguaccccgcccugaacgugaccaugcccaacaacgagcaguucgacaagcuguacaucuggggcgugcaccaccccggcaccgacaaggaccagaucuuccuguacgcccagagcagcggcagaaucaccgugagcaccaagagaagccagcaggccgugauccccaacaucggcagcagacccagaaucagaaacauccccagcagaaucagcaucuacuggaccaucgugaagcccggcgacauccugcugaucaacagcaccggcaaccugaucgcccccagaggcuacuucaagaucagaagcggcaagagcagcaucaugagaagcgacgcccccaucggcaagugcaagagcgagugcaucacccccaacggcagcauccccaacgacaagcccuuccagaacgugaacagaaucaccuacggcgccugccccagauacgugaagcagagcacccugaagcuggccaccggcaugagaaacgugcccgagaagcagaccagaggcaucuucggcgccaucgccggcuucaucgagaacggcugggagggcaugaaggacggcugguacggcuucagacaccagaacagcgagggcagaggccaggccgccgaccugaagagcacccaggccgccaucgaccagaucaacggcaagcugaacagacugaucggcaagaccaacgagaaguuccaccagaucgagaaggaguucagcgagguggagggcagaauccaggaccuggagaaguacguggaggacaccaagaucgaccuguggagcuacaacgccgagcugcugguggcccuggagaaccagcacaccaucgaccugaccgacagcgagaugaacaagcuguucgagaagaccaagaagcagcugagagagaacgccgaggacaugggcaacggcugcuucaagaucuaccacaagugcgacaacgccugcaucggcagcaucagaaacggcaccuacgaccacgacguguacagagacgaggcccugaacaacagauuccagaucaagggcguggagcugaagagcggcuacaaggacuggauccuguggaucagcuucgccaucagcugcuuccugcugugcguggcccugcugggcuucaucaugugggccugccagaagggcaacaucagaugcaacaucugcaucuga

SEQ ID NO: 173059 - RNA, 1701 nt, Artificial Sequence; identical to SEQ ID NO: 172501
  derived and/or modified CDS sequence (opt4) from hemagglutinin__InfluenzaA__ALA08509

SEQ ID NO: 173060 - RNA, 1701 nt, Artificial Sequence; identical to SEQ ID NO: 172501
  derived and/or modified CDS sequence (opt4) from hemagglutinin__InfluenzaA__ALA08510

SEQ ID NO: 173061 - RNA, 1701 nt, Artificial Sequence
  derived and/or modified CDS sequence (opt4) from hemagglutinin__InfluenzaA__ALA08511
augaagaccaucaucgcccugagcuacauccugugccugguguucgcccagaagauccccggcaacgacaacagcaccgccacccugugccugggccaccacgccgugcccaacggcaccaucgugaagaccaucaccaacgacagaaucgaggugaccaacgccaccgagcuggugcagaacagcagcaucggcgagaucugcgacagcccccaccagauccuggacggcgagaacugcacccugaucgacgcccugcugggcgacccccagugcgacggcuuccagaacaagaagugggaccuguucguggagagaagcaaggccuacagcaacugcuaccccuacgacgugcccgacuacgccagccugagaagccugguggccagcagcggcacccuggaguucaacaacgagagcuucaacuggaccggcgugacccagaacggcaccagcagcagcugcaucagaagaagcagcagcagcuucuucagcagacugaacuggcugacccaccugaacuacaccuaccccgcccugaacgugaccaugcccaacaacgagcaguucgacaagcuguacaucuggggcgugcaccaccccagcaccgacaaggaccagaucuuccuguacgcccagagcagcggcagaaucaccgugagcaccaagagaagccagcaggccgugauccccaacaucggcagcagacccagaaucagagacauccccagcagaaucagcaucuacuggaccaucgugaagcccggcgacauccugcugaucaacagcaccggcaaccugaucgcccccagaggcuacuucaagaucagaagcggcaagagcagcaucaugagaagcgacgcccccaucggcaagugcaagagcgagugcaucacccccaacggcagcauccccaacgacaagcccuuccagaacgugaacagaaucaccuacggcgccugccccagauacgugaagcacagcacccugaagcuggccaccggcaugagaaacgugcccgagaagcagaccagaggcaucuucggcgccaucgccggcuucaucgagaacggcugggagggcaugguggacggcugguacggcuucagacaccagaacagcgagggcagaggccaggccgccgaccugaagagcacccaggccgccaucgaccagaucaacggcaagcugaacagacugaucggcaagaccaacgagaaguuccaccagaucgagaaggaguucagcgagguggagggcagaauccaggaccuggagaaguacguggaggacaccaagaucgaccuguggagcuacaacgccgagcugcugguggcccuggagaaccagcacaccaucgaccugaccgacagcgagaugaacaagcuguucgagaagaccaagaagcagcugagagagaacgccgaggacaugggcaacggcugcuucaagaucuaccacaagugcgacaacgccugcaucggcagcaucagaaacggcaccuacgaccacaacguguacagagacgaggcccugaacaacagauuccagaucaagggcguggagcugaagagcggcuacaaggacuggauccuguggaucagcuucgccaucagcugcuuccugcugugcguggcccugcugggcuucaucaugugggccugccagaagggcaacaucagaugcaacaucugcaucuga

SEQ ID NO: 173062 - RNA, 1701 nt, Artificial Sequence; identical to SEQ ID NO: 172501
  derived and/or modified CDS sequence (opt4) from hemagglutinin__InfluenzaA__ALA08512

SEQ ID NO: 173063 - RNA, 1701 nt, Artificial Sequence; identical to SEQ ID NO: 172501
  derived and/or modified CDS sequence (opt4) from hemagglutinin__InfluenzaA__ALA08514

SEQ ID NO: 173064 - RNA, 1701 nt, Artificial Sequence; identical to SEQ ID NO: 172501
  derived and/or modified CDS sequence (opt4) from hemagglutinin__InfluenzaA__ALA08515

SEQ ID NO: 173065 - RNA, 1701 nt, Artificial Sequence; identical to SEQ ID NO: 172501
  derived and/or modified CDS sequence (opt4) from hemagglutinin__InfluenzaA__ALA08516

SEQ ID NO: 173066 - RNA, 1701 nt, Artificial Sequence; identical to SEQ ID NO: 173058
  derived and/or modified CDS sequence (opt4) from hemagglutinin__InfluenzaA__ALA08517

SEQ ID NO: 173067 - RNA, 1701 nt, Artificial Sequence; identical to SEQ ID NO: 172501
  derived and/or modified CDS sequence (opt4) from hemagglutinin__InfluenzaA__ALA08519

SEQ ID NO: 173068 - RNA, 1701 nt, Artificial Sequence
  derived and/or modified CDS sequence (opt4) from hemagglutinin__InfluenzaA__ALA08520
augaagaccaucaucgcccugagcuacauccugugccugguguucgcccagaagauccccggcaacgacaacagcaccgccacccugugccugggccaccacgccgugcccaacggcaccaucgugaagaccaucaccaacgacagaaucgaggugaccaacgccaccgagcuggugcagaacagcagcaucggcgagaucugcgacagcccccaccagauccuggacggcgagaacugcacccugaucgacgcccugcugggcgacccccagugcgacggcuuccagaacaagaagugggaccuguucguggagagaagcaaggccuacagcaacugcuaccccuacgacgugcccgacuacgccagccugagaagccugguggccagcagcggcacccuggaguucaacaacgagagcuucaacuggaccggcgugacccagaacggcaccagcagcgccugcaucagaagaagcagcagcagcuucuucagcagacugaacuggcugacccaccugaacuacaccuaccccgcccugaacgugaccaugcccaacaacgagcaguucgacaagcuguacaucuggggcgugcaccaccccggcaccgacaaggaccagaucuuccuguacgcccagcccagcggcagaaucaccgugagcaccaagagaagccagcaggccgugauccccaacaucggcagcagacccagaaucagagacauccccagcagaaucagcaucuacuggaccaucgugaagcccggcgacauccugcugaucaacagcaccggcaaccugaucgcccccagaggcuacuucaagaucagaaacggcaagagcagcaucaugagaagcgacgcccccaucggcaagugcaagagcgagugcaucacccccaacggcagcauccccaacgacaagcccuuccagaacgugaacagaaucaccuacggcgccugccccagauacgugaagcacagcacccugaagcuggccaccggcaugagaaacgugcccgagaagcagaccagaggcaucuucggcgccaucgccggcuucaucgagaacggcugggagggcaugguggacggcugguacggcuucagacaccagaacagcgagggcagaggccaggccgccgaccugaagagcacccaggccgccaucgaccagaucaacggcaagcugaacagacugaucggcaagaccaacgagaaguuccaccagaucgagaaggaguucagcgagguggagggcagaauccaggaccuggagaaguacguggaggacaccaagaucgaccuguggagcuacaacgccgagcugcugguggcccuggagaaccagcacaccaucgaccugaccgacagcgagaugaacaagcuguucgagaagaccaagaagcagcugagagagaacgccgaggacaugggcaacggcugcuucaagaucuaccacaagugcgacaacgccugcaucggcagcaucagaaacggcaccuacgaccacaacguguacagagacgaggcccugaacaacagauuccagaucaagggcguggagcugaagagcggcuacaaggacuggauccuguggaucagcuucgccaucagcugcuuccugcugugcguggcccugcugggcuucaucaugugggccugccagaagggcaacaucagaugcaacaucugcaucuga

SEQ ID NO: 173069 - RNA, 1701 nt, Artificial Sequence; identical to SEQ ID NO: 170198
  derived and/or modified CDS sequence (opt4) from hemagglutinin__InfluenzaA__ALA08522

SEQ ID NO: 173070 - RNA, 1701 nt, Artificial Sequence
  derived and/or modified CDS sequence (opt4) from hemagglutinin__InfluenzaA__ALA08523
augaagaccaucaucgcccugagcuacauccugugccugguguucgcccagaagauccccggcaacgacaacagcaccgccacccugugccugggccaccacgccgugcccaacggcaccaucgugaagaccaucaccaacgacagaaucgaggugaccaacgccaccgagcuggugcagaacagcagcaucggcgagaucugcgacagcccccaccagauccuggacggcgagaacugcacccugaucgacgcccugcugggcgacccccagugcgacggcuuccagaacaagaagugggaccuguucguggagagaagcaaggccuacagcaacugcuaccccuacgacgugcccgacuacgccagccugagaagccugguggccagcagcggcacccuggaguucaacaacgagagcuucaacuggaccggcgugacccagaacggcaccagcagcgccugcaucagaagaagcagcagcagcuucuucagcagacugaacuggcugacccaccugaacuacaccuaccccgcccugaacgugaccaugcccaacaacgagcaguucgacaagcuguacaucuggggcgugcaccaccccggcaccgacaaggaccagaucuuccuguacgcccagagcagcggcagaaucaccgugagcaccaagagaagccagcaggccgugauccccaacaucggcagcagacccagaaucagagacauccccagcagaaucagcaucuacuggaccaucgugaagcccggcgacauccugcugaucaacagcaucggcaaccugaucgcccccagaggcuacuucaagaucagaagcggcaagagcagcaucaugagaagcgacgcccccaucggcaagugcaagagcgagugcaucacccccaacggcagcauccccaacgacaagcccuuccagaacgugaacagaaucaccuacggcgccugccccagauacgugaagcacagcacccugaagcuggccaccggcaugagaaacgugcccgagaagcagaccagaggcaucuucggcgccaucgccggcuucaucgagaacggcugggagggcaugguggacggcugguacggcuucagacaccagaacagcgagggcagaggccaggccgccgaccugaagagcacccaggccgccaucgaccagaucaacggcaagcugaacagacugaucggcaagaccaacgagaaguuccaccagaucgagaaggaguucagcgagguggagggcagaauccaggaccuggagaaguacguggaggacaccaagaucgaccuguggagcuacaacgccgagcugcugguggcccuggagaaccagcacaccaucgaccugaccgacagcgagaugaacaagcuguucgagaagaccaagaagcagcugagagagaacgccgaggacaugggcaacggcugcuucaagaucuaccacaagugcgacaacgccugcaucggcagcaucagaaacggcaccuacgaccacaacguguacagagacgaggcccugaacaacagauuccagaucaagggcguggagcugaagagcggcuacaaggacuggauccuguggaucagcuucgccaucagcugcuuccugcugugcguggcccugcugggcuucaucaugugggccugccagaagggcaacaucagaugcaacaucugcaucuga

SEQ ID NO: 173071 - RNA, 1701 nt, Artificial Sequence
  derived and/or modified CDS sequence (opt4) from hemagglutinin__InfluenzaA__ALA08524
augaagaccaucaucgcccugagcuacauccugugcaugguguucgcccagaagauccccggcaacgacaacagcaccgccacccugugccugggccaccacgccgugcccaacggcaccaucgugaagaccaucaccaacgacagaaucgaggugaccaacgccaccgagcuggugcagaacagcagcaucggcgagaucugcgacagcccccaccagauccuggacggcgagaacugcacccugaucgacgcccugcugggcgacccccagugcgacggcuuccagaacaagaagugggaccuguucguggagagaagcaaggccuacagcaacugcuaccccuacgacgugcccgacuacgccagccugagaagccugguggccagcagcggcacccuggaguucaacaacgagagcuucaacuggaccggcgugacccagaacggcaccagcagcgccugcaucagaagaagcagcagcagcuucuucagcagacugaacuggcugacccaccugaacuacaccuaccccgcccugaacgugaccaugcccaacaacgagcaguucgacaagcuguacaucuggggcgugcaccaccccggcaccgacaaggaccagaucuuccuguacgcccagagcagcggcagaaucaccgugagcaccaagagaagccagcaggccgugauccccaacaucggcagcagacugagaaucagagacauccccagcagaaucagcaucuacuggaccaucgugaagcccggcgacauccugcugaucaacagcaccggcaaccugaucgcccccagaggcuacuucaagaucagaagcggcaagagcagcaucaugagaagcgacgcccccaucggcaagugcaagagcgagugcaucacccccaacggcagcauccccaacgacaagcccuuccagaacgugaacagaaucaccuacggcgccugccccagauacgugaagcacagcacccugaagcuggccaccggcaugagaaacgugcccgagaagcagaccagaggcaucuucggcgccaucgccggcuucaucgagaacggcugggagggcaugguggacggcugguacggcuucagacaccagaacagcgagggcagaggccaggccgccgaccugaagagcacccaggccgccaucgaccagaucaacggcaagcugaacagacugaucggcaagaccaacgagaaguuccaccagaucgagaaggaguucagcgagguggagggcagaauccaggaccuggagaaguacguggaggacaccaagaucgaccuguggagcuacaacgccgagcugcugguggcccuggagaaccagcacaccaucgaccugaccgacagcgagaugaacaagcuguucgagaagaccaagaagcagcugagagagaacgccgaggacaugggcaacggcugcuucaagaucuaccacaagugcgacaacgccugcaucggcagcaucagaaacggcaccuacgaccacaacguguacagagacgaggcccugaacaacagauuccagaucaagggcguggagcugaagagcggcuacaaggacuggauccuguggaucagcuucgccaucagcugcuuccugcugugcguggcccugcugggcuucaucaugugggccugccagaagggcaacaucagaugcaacaucugcaucuga

SEQ ID NO: 173072 - RNA, 1701 nt, Artificial Sequence; identical to SEQ ID NO: 172501
  derived and/or modified CDS sequence (opt4) from hemagglutinin__InfluenzaA__ALA08525

SEQ ID NO: 173073 - RNA, 1701 nt, Artificial Sequence; identical to SEQ ID NO: 172501
  derived and/or modified CDS sequence (opt4) from hemagglutinin__InfluenzaA__ALA08526

SEQ ID NO: 173074 - RNA, 1701 nt, Artificial Sequence; identical to SEQ ID NO: 173058
  derived and/or modified CDS sequence (opt4) from hemagglutinin__InfluenzaA__ALA08527

SEQ ID NO: 173075 - RNA, 1701 nt, Artificial Sequence
  derived and/or modified CDS sequence (opt4) from hemagglutinin__InfluenzaA__ALA08528
augaagaccaucaucgcccugagcuacauccugugccugguguucgcccagaagcugcccgagaacgacaacagcaccgccacccugugccugggccaccacgccgugcccaacggcaccaucgugaagaccaucaccagcgacagaaucgaggugaccaacgccaccgagcuggugcagaacagcagcaucggcgagaucugcgacagcccccaccagauccuggacggcaagaacugcacccugaucgacgcccugcugggcgacccccagugcgacggcuuccagaacaagaagugggaccuguucguggagagaagcaaggccuacagcaacugcuaccccuacgacgugcccgacuacgccagccugagaagccugguggccagcagcggcacccuggaguucaacgacgagagcuucaacugggccggcgugacccagaacggcaccagcagcgccugcaucagaggcagcaacagcagcuucuucagcagacugaacuggcugacccacagcaacuucaaguaccccgcccugaacgugaccaugcccaacaacgagcaguucgacaagcuguacaucuggggcgugcaccaccccggcaccgacaaggaccagaucuaccuguacgcccagagcagcggcagaaucaccgugagcaccaagagaagccagcaggccgugauccccaacaucggcagcagacccagaaucagaaacauccccagcagaaucagcaucuacuggaccaucgugaagcccggcgacauccugcugaucaacagcaccggcaaccugaucgcccccagaggcuacuucaagaucagaagcggcaagagcagcaucaugagaagcgacgcccccaucggcaagugcaagagcgagugcaucacccccaacggcagcauccccaacgacaagcccuuccagaacgugaacagaaucaccuacggcgccugccccagauacgugaagcagagcacccugaagcuggccaccggcaugagaaacgugcccgagaagcagaccagaggcaucuucggcgccaucgccggcuucaucgagaacggcugggagggcaugaaggacggcugguacggcuucagacaccagaacagcgagggcagaggccaggccgccgaccugaagagcacccaggccgccaucgaccagaucaacggcaagcugaacagacugaucggcaagaccaacgagaaguuccaccagaucgagaaggaguucagcgagguggagggcagaauccaggaccuggagaaguacguggaggacaccaagaucgaccuguggagcuacaacgccgagcugcugguggcccuggagaaccagcacaccaucgaccugaccgacagcgagaugaacaagcuguucgagaagaccaagaagcagaugagagagaacgccgaggacaugggcaacggcugcuucaagaucuaccacaagugcgacaacgccugcaucggcagcaucagaaacggcaccuacgaccacgacguguacagagacgaggcccugaacaacagauuccagaucaagggcguggagcugaagagcggcuacaaggacuggauccuguggaucagcuucgccaucagcugcuuccugcugugcguggcccugcugggcuucaucaugugggccugccagaagggcaacaucagaugcaacaucugcaucuga

SEQ ID NO: 173076 - RNA, 1701 nt, Artificial Sequence; identical to SEQ ID NO: 172501
  derived and/or modified CDS sequence (opt4) from hemagglutinin__InfluenzaA__ALA08529

SEQ ID NO: 173077 - RNA, 1701 nt, Artificial Sequence; identical to SEQ ID NO: 172501
  derived and/or modified CDS sequence (opt4) from hemagglutinin__InfluenzaA__ALA08530

SEQ ID NO: 173078 - RNA, 1701 nt, Artificial Sequence
  derived and/or modified CDS sequence (opt4) from hemagglutinin__InfluenzaA__ALA08531
augaagaccaucaucgcccugagcuacauccugugccugguguucgcccagaagcugcccgagaacgacaacagcaccgccacccugugccugggccaccacgccgugcccaacggcaccaucgugaagaccaucaccagcgacagaaucgaggugaccaacgccaccgagcuggugcagaacagcagcaucggcgagaucugcgacagcccccaccagauccuggacggcaagaacugcacccugaucgacgcccugcugggcgacccccagugcgacggcuuccagaacaagaagugggaccuguucguggagagaagcaaggccuacagcaacugcuaccccuacgacgugcccgacuacgccagccugagaagccugguggccagcagcggcacccuggaguucaacgacgagagcuucaacugggccggcgugacccagaacggcaccagcagcgccugcaucagaggcagcaacagcagcuucuucagcagacugaacuggcugacccacagcaacuucaaguaccccgcccugaacgugaccaugcccaacaacgagcaguucgacaagcuguacaucuggggcgugcaccaccccggcaccgacaaggaccagaucuuccuguacgcccagagcagcggcagaaucaccgugagcaccaagagaagccagcaggccgugauccccaacaucggcagcagacccagaaucagaaacauccccagcagaaucagcaucuacuggaccaucgugaagcccggcgacauccugcugaucaacagcaccggcaaccugaucgcccccagaggcuacuucaagaucagaagcggcaagagcagcaucaugagaagcgacgcccccaucggcaagugcaagagcgagugcaucacccccaacggcagcauccccaacgacaagcccuuccagaacgugaacagaaucaccuacggcgccugccccagauacgugaagcagagcacccugaagcuggccaccggcaugagaaacgugcccgagaagcagaccagaggcaucuucggcgccaucgccggcuucaucgagaacggcugggagggcaugaaggacggcugguacggcuucagacaccagaacagcgagggcagaggccaggccgccgaccugaagagcacccaggccgccaucgaccagaucaacggcaagcugaacagacugaucggcaagaccaacgagaaguuccaccagaucgagaaggaguucagcgagguggagggcagaauccaggaccuggagaaguacguggaggacaccaagaucgaccuguggagcuacaacgccgagcugcugguggcccuggagaaccagcacaccaucgaccugaccgacagcgagaugaacaagcuguucgagaagaccaagaagcagcugagagagaacgccgaggacaugggcaacggcugcuucaagaucuaccacaagugcgacaacgccugcaucggcagcaucagaaacggcaccuacaaccacgacguguacagagacgaggcccugaacaacagauuccagaucaagggcguggagcugaagagcggcuacaaggacuggauccuguggaucagcuucgccaucagcugcuuccugcugugcguggcccugcugggcuucaucaugugggccugccagaagggcaacaucagaugcaacaucugcaucuga

SEQ ID NO: 173079 - RNA, 1701 nt, Artificial Sequence; identical to SEQ ID NO: 172501
  derived and/or modified CDS sequence (opt4) from hemagglutinin__InfluenzaA__ALA08532

SEQ ID NO: 173080 - RNA, 1701 nt, Artificial Sequence; identical to SEQ ID NO: 172501
  derived and/or modified CDS sequence (opt4) from hemagglutinin__InfluenzaA__ALA08533

SEQ ID NO: 173081 - RNA, 1701 nt, Artificial Sequence; identical to SEQ ID NO: 172501
  derived and/or modified CDS sequence (opt4) from hemagglutinin__InfluenzaA__ALA08534

SEQ ID NO: 173082 - RNA, 1701 nt, Artificial Sequence; identical to SEQ ID NO: 172501
  derived and/or modified CDS sequence (opt4) from hemagglutinin__InfluenzaA__ALA08535

SEQ ID NO: 173083 - RNA, 1701 nt, Artificial Sequence; identical to SEQ ID NO: 173058
  derived and/or modified CDS sequence (opt4) from hemagglutinin__InfluenzaA__ALA08536

SEQ ID NO: 173084 - RNA, 1701 nt, Artificial Sequence; identical to SEQ ID NO: 173058
  derived and/or modified CDS sequence (opt4) from hemagglutinin__InfluenzaA__ALA08537

SEQ ID NO: 173085 - RNA, 1701 nt, Artificial Sequence; identical to SEQ ID NO: 173058
  derived and/or modified CDS sequence (opt4) from hemagglutinin__InfluenzaA__ALA08538

SEQ ID NO: 173086 - RNA, 1701 nt, Artificial Sequence; identical to SEQ ID NO: 172501
  derived and/or modified CDS sequence (opt4) from hemagglutinin__InfluenzaA__ALA08539

SEQ ID NO: 173087 - RNA, 1701 nt, Artificial Sequence; identical to SEQ ID NO: 173058
  derived and/or modified CDS sequence (opt4) from hemagglutinin__InfluenzaA__ALA08540

SEQ ID NO: 173088 - RNA, 1701 nt, Artificial Sequence; identical to SEQ ID NO: 173058
  derived and/or modified CDS sequence (opt4) from hemagglutinin__InfluenzaA__ALA08541

SEQ ID NO: 173089 - RNA, 1701 nt, Artificial Sequence; identical to SEQ ID NO: 173058
  derived and/or modified CDS sequence (opt4) from hemagglutinin__InfluenzaA__ALA08542

SEQ ID NO: 173090 - RNA, 1701 nt, Artificial Sequence
  derived and/or modified CDS sequence (opt4) from hemagglutinin__InfluenzaA__ALA08543
augaagaccaucaucgcccugagcuacauccugugccugguguucgcccagaagauccccggcaacgacaacagcaccgccacccugugccugggccaccacgccgugcccaacggcaccaucgugaagaccaucaccaacgacagaaucgaggugaccaacgccaccgagcuggugcagaacagcagcaucggcgagaucugcgacagcccccaccagauccuggacggcgagaacugcacccugaucgacgcccugcugggcgacccccagugcgacggcuuccagaacaagaagugggaccuguucguggagagaagcaaggccuacagcaacugcuaccccuacgacgugcccgacuacgccagccugagaagccugguggccagcagcggcacccuggaguucaacaacgagagcuucaacuggaccggcgugacccagaacggcaccagcagcgccugcaucagaagaagcagcagcagcuucuucagcagacugaacuggcugacccaccugaacuacaccuaccccgcccugaacgugaccaugcccaacaacgagcaguucgacaagcuguacaucuggggcgugcaccaccccggcaccgacaaggaccagaucuuccuguacgcccagagcagcggcagaaucaccgugagcaccaagagaagccagcaggccgccauccccaacaucggcagcagacccagaaucagagacauccccagcagaaucagcaucuacuggaccaucgugaagcccggcgacauccugcugaucaacagcaccggcaaccugaucgcccccagaggcuacuucaagaucagaagcggcaagagcagcaucaugagaagcgacgcccccaucggcaagugcaagagcgagugcaucacccccaacggcagcauccccaacgacaagcccuuccagaacgugaacagaaucaccuacggcgccugccccagauacgugaagcacagcacccugaagcuggccaccggcaugagaaacgugcccgagaagcagaccagaggcaucuucggcgccaucgccggcuucaucgagaacggcugggagggcaugguggacggcugguacggcuucagacaccagaacagcgagggcagaggccaggccgccgaccugaagagcacccaggccgccaucgaccagaucaacggcaagcugaacagacugaucggcaagaccaacgagaaguuccaccagaucgagaaggaguucagcgagguggagggcagaauccaggaccuggagaaguacguggaggacaccaagaucgaccuguggagcuacaacgccgagcugcugguggcccuggagaaccagcacaccaucgaccugaccgacagcgagaugaacaagcuguucgagaagaccaagaagcagcugagagagaacgccgaggacaugggcaacggcugcuucaagaucuaccacaagugcgacaacgccugcaucggcagcaucagaaacggcaccuacgaccacaacguguacagagacgaggcccugaacaacagauuccagaucaagggcguggagcugaagagcggcuacaaggacuggauccuguggaucagcuucgccaucagcugcuuccugcugugcguggcccugcugggcuucaucaugugggccugccagaagggcaacaucagaugcaacaucugcaucuga

SEQ ID NO: 173091 - RNA, 1701 nt, Artificial Sequence; identical to SEQ ID NO: 172501
  derived and/or modified CDS sequence (opt4) from hemagglutinin__InfluenzaA__ALA08545

SEQ ID NO: 173092 - RNA, 1701 nt, Artificial Sequence; identical to SEQ ID NO: 172501
  derived and/or modified CDS sequence (opt4) from hemagglutinin__InfluenzaA__ALA08546

SEQ ID NO: 173093 - RNA, 1701 nt, Artificial Sequence
  derived and/or modified CDS sequence (opt4) from hemagglutinin__InfluenzaA__ALA08548
augaagaccaucaucgcccugagcuacauccugugccugguguucgcccagaagcugcccgagaacgacaacagcaccgccacccugugccugggccaccacgccgugcccaacggcaccaucgugaagaccaucaccagcgacagaaucgaggugaccaacgccaccgagcuggugcagaacagcagcaucggcgagaucugcgacagcccccaccagauccuggacggcaagaacugcacccugaucgacgcccugcugggcgacccccagugcgacggcuuccagaacaagaagugggaccuguucguggagagaagcaaggccuacagcaacugcuaccccuacgacgugcccgacuacgccagccugagaagccugguggccagcagcggcacccuggaguucaacgacgagagcuucaacugggccggcguggcccagaacggcaccagcagcgccugcaucagaggcagcaacagcagcuucuucagcagacugaacuggcugacccacagcaacuucaaguaccccgcccugaacgugaccaugcccaacaacgagcaguucgacaagcuguacaucuggggcgugcaccaccccggcaccgacaaggaccagaucuuccuguacgcccagagcagcggcagaaucaccgugagcaccaagagaagccagcaggccgugauccccaacaucggcagcagacccagaaucagaaacauccccagcagaaucagcaucuacuggaccaucgugaagcccggcgacauccugcugaucaacagcaccggcaaccugaucgcccccagaggcuacuucaagaucagaagcggcaagagcagcaucaugagaagcgacgcccccaucggcaagugcaagagcgagugcaucacccccaacggcagcauccccaacgacaagcccuuccagaacgugaacagaaucaccuacggcgccugccccagauacgugaagcagagcacccugaagcuggccaccggcaugagaaacgugcccgagaagcagaccagaggcaucuucggcgccaucgccggcuucaucgagaacggcugggagggcaugaaggacggcugguacggcuucagacaccagaacagcgagggcagaggccaggccgccgaccugaagagcacccaggccgccaucgaccagaucaacggcaagcugaacagacugaucggcaagaccaacgagaaguuccaccagaucgagaaggaguucagcgagguggagggcagaauccaggaccuggagaaguacguggaggacaccaagaucgaccuguggagcuacaacgccgagcugcugguggcccuggagaaccagcacaccaucgaccugaccgacagcgagaugaacaagcuguucgagaagaccaagaagcagcugagagagaacgccgaggacaugggcaacggcugcuucaagaucuaccacaagugcgacaacgccugcaucggcagcaucagaaacggcaccuacgaccacgacguguacagagacgaggcccugaacaacagauuccagaucaagggcguggagcugaagagcggcuacaaggacuggauccuguggaucagcuucgccaucagcugcuuccugcugugcguggcccugcugggcuucaucaugugggccugccagaagggcaacaucagaugcaacaucugcaucuga

SEQ ID NO: 173094 - RNA, 1701 nt, Artificial Sequence
  derived and/or modified CDS sequence (opt4) from hemagglutinin__InfluenzaA__ALA08549
augaagaccaucaucgcccugagcuacauccugugccugguguucgcccagaagauccccggcaacgacaacagcaccgccacccugugccugggccaccacgccgugcccaacggcaccaucgugaagaccaucaccaacgacagaaucgaggugaccaacgccaccgagcuggugcagaacagcagcaccggcgugaucugcgacagcccccaccagauccuggacggcgagaacugcacccugaucgacgcccugcugggcgacccccagugcgacggcuuccagaacaagaagugggaccuguucguggagagaagcaaggccuacagcaacugcuaccccuacgacgugcccgacuacgccagccugagaagccugguggccagcagcggcacccuggaguucaacaacgagagcuucaacuggaccggcgugacccagaacggcaccagcagcgccugcaucagaagaagcagcagcagcuucuucagcagacugaacuggcugacccaccugaacuacaccuaccccgcccugaacgugaccaugcccaacaacgagcaguucgacaagcuguacaucuggggcgugcaccaccccggcaccgacaaggaccagaucuuccuguacgcccagagcagcggcagaaucaccgugagcaccaagggcagccagcaggccgugauccccaacaucggcagcagacccagaaucagagacauccccagcagaaucagcaucuacuggaccaucgugaagcccggcgacauccugcugaucaacagcaccggcaaccugaucgcccccagaggcuacuucaagaucagaagcggcaagagcagcaucaugagaagcgacgcccccaucggcaagugcaagagcgagugcaucacccccaacggcagcauccccaacgacaagcccuuccagaacgugaacagaaucaccuacggcgccugccccagauacgugaagcacagcacccugaagcuggccaccggcaugagaaacgugcccgagaagcagaccagaggcaucuucggcgccaucgccggcuucaucgagaacggcugggagggcaugguggacggcugguacggcuucagacaccagaacagcgagggcagaggccaggccgccgaccugaagagcacccaggccgccaucgaccagaucaacggcaagcugaacagacugaucggcaagaccaacgagaaguuccaccagaucgagaaggaguucagcgagguggagggcagaauccaggaccuggagaaguacguggaggacaccaagaucgaccuguggagcuacaacgccgagcugcugguggcccuggagaaccagcacaccaucgaccugaccgacagcgagaugaacaagcuguucgagaagaccagaaagcagcugagagagaacgccgaggacaugggcaacggcugcuucaagaucuaccacaagugcgacaacgccugcaucggcagcaucagaaacggcaccuacgaccacaacguguacagagacgaggcccugaacaacagauuccagaucaagggcguggagcugaagagcggcuacaaggacuggauccuguggaucagcuucgccaucagcugcuuccugcugugcguggcccugcugggcuucaucaugugggccugccagaagggcaacaucagaugcaacaucugcaucuga

SEQ ID NO: 173095 - RNA, 1701 nt, Artificial Sequence; identical to SEQ ID NO: 173058
  derived and/or modified CDS sequence (opt4) from hemagglutinin__InfluenzaA__ALA08550

SEQ ID NO: 173096 - RNA, 1701 nt, Artificial Sequence
  derived and/or modified CDS sequence (opt4) from hemagglutinin__InfluenzaA__ALA08551
augaagaccaucaucgcccugagcuacauccugugccugguguucgcccagaagcugcuggagaacgacaacagcaccgccacccugugccugggccaccacgccgugcccaacggcaccaucgugaagaccaucaccagcgacagaaucgaggugaccaacgccaccgagcuggugcagaacagcagcaucggcgagaucugcgacagcccccaccagauccuggacggcaagaacugcacccugaucgacgcccugcugggcgacccccagugcgacggcuuccagaacaagaagugggaccuguucguggagagaagcaaggccuacagcaacugcuaccccuacgacgugcccgacuacgccagccugagaagccugguggccagcagcggcacccuggaguucaacgacgagagcuucaacugggccggcgugacccagaacggcaccagcagcgccugcaucagaggcagcaacagcagcuucuucagcagacugaacuggcugacccacagcaacuucaaguaccccgcccugaacgugaccaugcccaacaacgagcaguucgacaagcuguacaucuggggcgugcaccaccccggcaccgacaaggaccagaucuuccuguacgcccagagcagcggcagaaucaccgugagcaccaagagaagccagcaggccgugauccccaacaucggcagcagacccagaaucagaaacauccccagcagaaucagcaucuacuggaccaucgugaagcccggcgacauccugcugaucaacagcaccggcaaccugaucgcccccagaggcuacuucaagaucagaagcggcaagagcagcaucaugagaagcgacgcccccaucggcaagugcaagagcgagugcaucacccccaacggcagcauccccaacgacaagcccuuccagaacgugaacagaaucaccuacggcgccugccccagauacgugaagcagagcacccugaagcuggccaccggcaugagaaacgugcccgagaagcagaccagaggcaucuucggcgccaucgccggcuucaucgagaacggcugggagggcaugaaggacggcugguacggcuucagacaccagaacagcgagggcagaggccaggccgccgaccugaagagcacccaggccgccaucgaccagaucaacggcaagcugaacagacugaucggcaagaccaacgagaaguuccaccagaucgagaaggaguucagcgagguggagggcagaauccaggaccuggagaaguacguggaggacaccaagaucgaccuguggagcuacaacgccgagcugcugguggcccuggagaaccagcacaccaucgaccugaccgacagcgagaugaacaagcuguucgagaagaccaagaagcagcugagagagaacgccgaggacaugggcaacggcugcuucaagaucuaccacaagugcgacaacgccugcaucggcagcaucagaaacggcaccuacgaccacaacguguacagagacgaggcccugaacaacagauuccagaucaagggcguggagcugaagagcggcuacaaggacuggauccuguggaucagcuucgccaucagcugcuuccugcugugcguggcccugcugggcuucaucaugugggccugccagaagggcaacaucagaugcaacaucugcaucuga

SEQ ID NO: 173097 - RNA, 1701 nt, Artificial Sequence; identical to SEQ ID NO: 173058
  derived and/or modified CDS sequence (opt4) from hemagglutinin__InfluenzaA__ALA08552

SEQ ID NO: 173098 - RNA, 1701 nt, Artificial Sequence; identical to SEQ ID NO: 173058
  derived and/or modified CDS sequence (opt4) from hemagglutinin__InfluenzaA__ALA08553

SEQ ID NO: 173099 - RNA, 1701 nt, Artificial Sequence
  derived and/or modified CDS sequence (opt4) from hemagglutinin__InfluenzaA__ALA08554
augaagaccaucaucgcccugagcuacauccugugccugguguucgcccagaagauccccggcaacgacaacagcaccgccacccugugccugggccaccacgccgugcccaacggcaccaucgugaagaccaucaccaacgacagaaucgaggugaccaacgccaccgagcuggugcagaacagcagcaucggcgagaucugcgacagcccccaccagauccuggacggcgagaacugcacccugaucgacgcccugcugggcgacccccagugcgacggcuuccagaacaagaagugggaccuguucguggagagaagcaaggccuacagcaacugcuaccccuacgacgugcccgacuacgccagccugagaagccugguggccagcagcggcacccuggaguucaacaacgagagcuucaacuggaccggcgugacccagaacggcaccagcagcgccugcaucagaagaagcagcagcagcuucuucagcagacugaacuggcugacccaccugaacuacaccuaccccgcccugaacgugaccaugcccaacaacgagcaguucgacaagcuguacaucuggggcgugcaccaccccggcaccgacaaggaccagaucuuccuguacgcccagagcagcggcagaaucaccgugagcaccaagagaagccagcaggccgugauccccaacaucggcagcagacccagaaucagagacauccccagcagaaucagcaucuacuggaccaucgugaagcccggcgacauccugcugaucaacagcaccggcaaccugaucgcccccagaggcuacuucaagaucagaagcggcaagagcagcaucaugagaagcgacgcccccaucggcaagugcaagagcgagugcaucacccccaacggcagcauccccaacgacaagcccuuccagaacgugaacagaaucaccuacggcgccugccccagauacgugaagcacagcacccugaagcuggccaccggcaugagaaacgugcccgagaagcagaccagaggcaucuucggcgccaucgccggcuucaucgagaacggcugggagggcaugguggacggcugguacggcuucagacaccagaacagcgagggcagaggccaggccgccgaccugaagagcacccaggccgccaucgaccagaucaacggcaagcugaacagacugaucggcaagaccaacgagaaguuccaccagaucgagaaggaguucagcgagguggagggcagaauccaggaccuggagaaguacguggaggacaccaagaucgaccuguggagcuacaacgccgagcugcugguggcccuggagaaccagcacaccaucgaccugaccgacagcgagaugaacaagcuguucgagaagaccaagaagcagcugagagagaacgccgaggacaugggcaacggcugcuucaagaucuaccacaagugcgacaacgccugcaucggcagcaucagaaacggcaccuacgaccacaacguguacagagacgaggcccugaacaacagauuccagaucaagggcguggagcugaugagcggcuacaaggacuggauccuguggaucagcuucgccaucagcugcuuccugcugugcguggcccugcugggcuucaucaugugggccugccagaagggcaacaucagaugcaacaucugcaucuga

SEQ ID NO: 173100 - RNA, 1701 nt, Artificial Sequence
  derived and/or modified CDS sequence (opt4) from hemagglutinin__InfluenzaA__ALA08555
augaagaccaucaucgcccugagcuacauccugugccugguguucgcccagaagcugcccgagaacgacaacagcaccgccacccugugccugggccaccacgccgugcccaacggcaccaucgugaagaccaucaccagcgaccagaucgaggugaccaacgccaccgagcuggugcagaacagcagcaucggcgagaucugcgacagcccccaccagauccuggacggcaagaacugcacccugaucgacgcccugcugggcgacccccagugcgacggcuuccagaacaagaagugggaccuguucguggagagaagcaaggccuacagcaacugcuaccccuacgacgugcccgacuacgccagccugagaagccugguggccagcagcggcacccuggaguucaacgacgagagcuucaacugggccggcgugacccagaacggcaccagcagcgccugcaucagaggcagcaacagcagcuucuucagcagacugaacuggcugacccacagcaacuucaaguaccccgcccugaacgugaccaugcccaacaacgagcaguucgacaagcuguacaucuggggcgugcaccaccccggcaccgacaaggaccagaucuuccuguacgcccagagcagcggcagaaucaccgugagcaccaagagaagccagcaggccgugauccccagcaucggcagcagacccagaaucagaaacauccccagcagaaucagcaucuacuggaccaucgugaagcccggcgacauccugcugaucaacagcaccggcaaccugaucgcccccagaggcuacuucaagaucagaagcggcaagagcagcaucaugagaagcgacgcccccaucggcaagugcaagagcgagugcaucacccccaacggcagcauccccaacgacaagcccuuccagaacgugaacagaaucaccuacggcgccugccccagauacgugaagcagagcacccugaagcuggccaccggcaugagaaacgugcccgagaagcagaccagaggcaucuucggcgccaucgccggcuucaucgagaacggcugggagggcaugaaggacggcugguacggcuucagacaccagaacagcgagggcagaggccaggccgccgaccugaagagcacccaggccgccaucgaccagaucaacggcaagcugaacagacugaucggcaagaccaacgagaaguuccaccagaucgagaaggaguucagcgagguggagggcagaauccaggaccuggagaaguacguggaggacaccaagaucgaccuguggagcuacaacgccgagcugcugguggcccuggagaaccagcacaccaucgaccugaccgacagcgagaugaacaagcuguucgagaagaccaagaagcagcugagagagaacgccgaggacaugggcaacggcugcuucaagaucuaccacaagugcgacaacgccugcaucggcagcaucagaaacggcaccuacgaccacaacguguacagagacgaggcccugaacaacagauuccagaucaagggcguggagcugaagagcggcuacaaggacuggauccuguggaucagcuucgccaucagcugcuuccugcugugcguggcccugcugggcuucaucaugugggccugccagaagggcaacaucagaugcaacaucugcaucuga

SEQ ID NO: 173101 - RNA, 1701 nt, Artificial Sequence
  derived and/or modified CDS sequence (opt4) from hemagglutinin__InfluenzaA__ALA08556
augaagaccaucaucgcccugagcuacauccugugccugguguucgcccagaagauccccggcaacgacaacagcaccgccacccugugccugggccaccacgccgugcccaacggcaccaucgugaagaccaucaccaacgacagaaucgaggugaccaacgccaccgagcuggugcagaacagcagcaucggcgagaucugcgacagcccccaccagauccuggacggcgagaacugcacccugaucgacgcccugcugggcgacccccagugcgacggcuuccagaacaagaagugggaccuguucguggagagaagcaaggccuacagcaacugcuaccccuacgacgugcccgacuacgccagccugagaagccugguggccagcagcggcacccuggaguucaacaacgagagcuucaacuggaccggcaucacccagaacggcaccagcagcgccugcaucagaagaagcagcagcagcuucuucagcagacugaacuggcugacccaccugaacuacaccuaccccgcccugaacgugaccaugcccaacaacgagcaguucgacaagcuguacaucuggggcgugcaccaccccggcaccgacaaggaccagaucuuccuguacgcccagagcagcggcagaaucaccgugagcaccaagagaagccagcaggccgugauccccaacaucggcagcagacccagaaucagagacauccccagcagaaucagcaucuacuggaccaucgugaagcccggcgacauccugcugaucaacagcaccggcaaccugaucgcccccagaggcuacuucaagaucagaagcggcaagagcagcaucaugagaagcgacgcccccaucggcaagugcaagagcgagugcaucacccccaacggcagcauccccaacgacaagcccuuccagaacgugaacagaaucaccuacggcgccugccccagauacgugaagcacagcacccugaagcuggccaccggcaugagaaacgugcccgagaagcagaccagaggcaucuucggcgccaucgccggcuucaucgagaacggcugggagggcaugguggacggcugguacggcuucagacaccagaacagcgagggcagaggccaggccgccgaccugaagagcacccaggccgccaucgaccagaucaacggcaagcugaacagacugaucggcaagaccaacgagaaguuccaccagaucgagaaggaguucagcgagguggagggcagaauccaggaccuggagaaguacguggaggacaccaagaucgaccuguggagcuacaacgccgagcugcugguggcccuggagaaccagcacaccaucgaccugaccgacagcgagaugaacaagcuguucgagaagaccaagaagcagcugagagagaacgccgaggacaugggcaacggcugcuucaagaucuaccacaagugcgacaacgccugcaucggcagcaucagaaacggcaccuacgaccacaacguguacagagacgaggcccugaacaacagauuccagaucaagggcguggagcugaagagcggcuacaaggacuggauccuguggaucagcuucgccaucagcugcuuccugcugugcguggcccugcugggcuucaucaugugggccugccagaagggcaacaucagaugcaacaucugcaucuga

SEQ ID NO: 173102 - RNA, 1701 nt, Artificial Sequence; identical to SEQ ID NO: 173058
  derived and/or modified CDS sequence (opt4) from hemagglutinin__InfluenzaA__ALA08557

SEQ ID NO: 173103 - RNA, 1701 nt, Artificial Sequence; identical to SEQ ID NO: 173058
  derived and/or modified CDS sequence (opt4) from hemagglutinin__InfluenzaA__ALA08558

SEQ ID NO: 173104 - RNA, 1701 nt, Artificial Sequence
  derived and/or modified CDS sequence (opt4) from hemagglutinin__InfluenzaA__ALA08559
augaagaccaucaucgcccugagcuacauccugugccugguguucgcccagaagauccccggcaacgacaacagcaccgccacccugugccugggccaccacgccgugcccaacggcaccaucgugaagaccaucaccaacgacagaaucgaggugaccaacgccaccgagcuggugcagaacagcagcaucggcgagaucugcgacagcccccaccagauccuggacggcgagaacugcacccugaucgacgcccugcugggcgacccccagugcgacggcuuccagaacaagaagugggaccuguucguggagagaagcaaggccuacagcaacugcuaccccuacgacgugcccgacuacgccagccugagaagccugguggccagcagcggcacccuggaguucaacaacgagagcuucaacuggaccggcgugacccagaacggcaccagcagcgccugcaucagaagaagcagcagcagcuucuucagcagacugaacuggcugacccaccugaacuacaccuaccccgcccugaacgugaccaugcccaacaacgagcaguucgacaagcuguacaucuggggcgugcaccaccccggcaccgacaaggaccagaucuuccuguacgccagaagcagcggcagaaucaccgugagcaccaagggcagccagcaggccgugauccccaacaucggcagcagacccagaaucagagacauccccagcagaaucagcaucuacuggaccaucgugaagcccggcgacauccugcugaucaacagcgccggcaaccugaucgcccccagaggcuacuucaagaucagaagcggcaagagcagcaucaugagaagcgacgcccccaucggcaagugcaagagcgagugcaucacccccaacggcagcauccccaacgacaagcccuuccagaacgugaacagaaucaccuacggcgccugccccagauacgugaagcacagcacccugaagcuggccaccggcaugagaaacgugcccgagaagcagaccagaggcaucuucggcgccaucgccggcuucaucgagaacggcugggagggcaugguggacggcugguacggcuucagacaccagaacagcgagggcagaggccaggccgccgaccugaagagcacccaggccgccaucgaccagaucaacggcaagcugaacagacugaucggcaagaccaacgagaaguuccaccagaucgagaaggaguucagcgagguggagggcagaauccaggaccuggagaaguacguggaggacaccaagaucgaccuguggagcuacaacgccgagcugcugguggcccuggagaaccagcacaccaucgaccugaccgacagcgagaugaacaagcuguucgagaagaccaagaagcagcugagagagaacgccgaggacaugggcaacggcugcuucaagaucuaccacaagugcgacaacgccugcaucggcagcaucagaaacggcaccuacgaccacaacguguacagagacgaggcccugaacaacagauuccagaucaagggcguggagcugaagagcggcuacaaggacuggauccuguggaucagcuucgccaucagcugcuuccugcugugcguggcccugcugggcuucaucaugugggccugccagaagggcaacaucagaugcaacaucugcaucuga

SEQ ID NO: 173105 - RNA, 1701 nt, Artificial Sequence; identical to SEQ ID NO: 172501
  derived and/or modified CDS sequence (opt4) from hemagglutinin__InfluenzaA__ALA08560

SEQ ID NO: 173106 - RNA, 1701 nt, Artificial Sequence
  derived and/or modified CDS sequence (opt4) from hemagglutinin__InfluenzaA__ALA08561
augaagaccaucaucgcccugagcuacauccugugccugguguucgcccagaagauccccggcaacgacaacagcaccgccacccugugccugggccaccacgccgugcccaacggcaccaucgugaagaccaucaccaacgacagaaucgaggugaccaacgccaccgagcuggugcagaacagcagcaucggcgagaucugcgacagcccccaccagauccuggacggcgagaacugcacccugaucgacgcccugcugggcgacccccagugcgacggcuuccagaacaagaagugggaccuguucguggagagaagcaaggccuacagcaacugcuaccccuacgacgugcccgacuacgccagccugagaagccugguggccagcagcggcacccuggaguucaacaacgagagcuucaacuggaccggcgugacccagaacggcaccagcagcgccugcaucagaagaagcagcagcagcuucuucagcagacugaacuggcugacccaccugaacuacaaguaccccgcccugaacgugaccaugcccaacaaggagcaguucgacaagcuguacaucuggggcgugcaccaccccggcaccgacaaggaccagaucuuccuguacgcccagagcagcggcagaaucaccgugagcaccaagagaagccagcaggccgugauccccaacaucggcagcagacccagaaucagagacauccccagcagaaucagcaucuacuggaccaucgugaagcccggcgacauccugcugaucaacagcaccggcaaccugaucgcccccagaggcuacuucaagaucagaagcggcaagagcagcaucaugagaagcgacgcccccaucggcaagugcaagagcgagugcaucacccccaacggcagcauccccaacgacaagcccuuccagaacgugaacagaaucaccuacggcgccugccccagauacgugaagcacagcacccugaagcuggccaccggcaugagaaacgugcccgagaagcagaccagaggcaucuucggcgccaucgccggcuucaucgagaacggcugggagggcaugguggacggcugguacggcuucagacaccagaacagcgagggcagaggccaggccgccgaccugaagagcacccaggccgccaucgaccagaucaacggcaagcugaacagacugaucggcaagaccaacgagaaguuccaccagaucgagaaggaguucagcgagguggagggcagaauccaggaccuggagaaguacguggaggacaccaagaucgaccuguggagcuacaacgccgagcugcugguggcccuggagaaccagcacaccaucgaccugaccgacagcgagaugaacaagcuguucgagaagaccaagaagcagcugagagagaacgccgaggacaugggcaacggcugcuucaagaucuaccacaagugcgacaacgccugcaucggcagcaucagaaacggcaccuacgaccacaacguguacagagacgaggcccugaacaacagauuccagaucaagggcguggagcugaagagcggcuacaaggacuggauccuguggaucagcuucgccaucagcugcuuccugcugugcguggcccugcugggcuucaucaugugggccugccagaagggcaacaucagaugcaacaucugcaucuga

SEQ ID NO: 173107 - RNA, 1701 nt, Artificial Sequence
  derived and/or modified CDS sequence (opt4) from hemagglutinin__InfluenzaA__ALA08563
augaagaccaucaucgcccugagcuacauccugugccugguguucgcccagaagauccccggcaacgacaacagcaccgccacccugugccugggccaccacgccgugcccaacggcaccaucgugaagaccaucaccaacgacagaaucgaggugaccaacgccaccgagcuggugcagaacagcagcaucggcgagaucugcgacagcccccaccagauccuggacggcgagaacugcacccugaucgacgcccugcugggcgacccccagugcgacggcuuccagaacaagaagugggaccuguucguggagagaagcaaggccuacagcaacugcuaccccuacgacgugcccgacuacgccagccugagaagccugguggccagcagcggcacccuggaguucaacaacgagagcuucaacuggaccggcgugacccagaacggcaccagcagcgccugcaucagaagaagcagcagcagcuucuucagcagacugaacuggcugacccaccugaacuacaccuaccccgcccugaacgugaccaugcccaacaacgagcaguucgacaagcuguacaucuggggcgugcaccaccccggcaccgacaaggaccagaucuuccuguacgcccagagcagcggcagaaucaccgugagcaccaagagaagccagcaggccgugauccccaacaucggcagcagacccagaaucagagacauccccagcagaaucagcaucuacuggaccaucgugaagcccggcgacauccugcugaucaacagcaccggcaaccugaucgcccccagaggcuacuucaagauccugagcggcaagagcagcaucaugagaagcgacgcccccaucggcaagugcaagagcgagugcaucacccccaacggcagcauccccaacgacaagcccuuccagaacgugaacagaaucaccuacggcgccugccccagauacgugaagcacagcacccugaagcuggccaccggcaugagaaacgugcccgagaagcagaccagaggcaucuucggcgccaucgccggcuucaucgagaacggcugggagggcaugguggacggcugguacggcuucagacaccagaacagcgagggcagaggccaggccgccgaccugaagagcacccaggccgccaucgaccagaucaacggcaagcugaacagacugaucggcaagaccaacgagaaguuccaccagaucgagaaggaguucagcgagguggagggcagaauccaggaccuggagaaguacguggaggacaccaagaucgaccuguggagcuacaacgccgagcugcugguggcccuggagaaccagcacaccaucgaccugaccgacagcgagaugaacaagcuguucgagaagaccaagaagcagcugagagagaacgccgaggacaugggcaacggcugcuucaagaucuaccacaagugcgacaacgccugcaucggcagcaucagaaacggcaccuacgaccacaacguguacagagacgaggcccugaacaacagauuccagaucaagggcguggagcugaagagcggcuacaaggacuggauccuguggaucagcuucgccaucagcugcuuccugcugugcguggcccugcugggcuucaucaugugggccugccagaagggcaacaucagaugcaacaucugcaucuga

SEQ ID NO: 173108 - RNA, 1701 nt, Artificial Sequence
  derived and/or modified CDS sequence (opt4) from hemagglutinin__InfluenzaA__ALA08571
augaagaccaucaucgcccugagcuacauccugugccugguguucgcccagaagauccccggcaacgacaacagcaccgccacccugugccugggccaccacgccgugcccaacggcaccaucgugaagaccaucaccaacgacagaaucgaggugaccaacgccaccgagcuggugcagaacagcagcaucggcgagaucugcgacagcccccaccagauccuggacggcgagaacugcacccugaucgacgcccugcugggcgacccccagugcgacggcuuccagaacaagaagugggaccuguucguggagagaagcaaggccuacagcaacugcuaccccuacgacgugcccgacuacgccagccugagaagccugguggccagcagcggcacccuggaguucaacaacgagagcuucaacuggaccggcgugacccagaacggcaccagcagcgccugcaucagaagaagcagcagcagcuucuucagcagacugaacuggcugacccaccugaacuacaccuaccccgcccugaacgugaccaugcccaacaacgagcaguucgacaagcuguacaucuggggcgugcaccaccccggcaccgacaaggaccagaucuuccuguacgcccagagcagcggcagaaucaccgugagcaccaagagaagccagcaggccgugauccccaacaucggcagcagacccagaaucagagacauccccagcagaaucagcaucuacuggaccaucgugaagcccggcgacauccugcugaucaacagcaccggcaaccugaucgcccccagaggcuacuucaagaucagaagcggcaagagcagcaucaugagaagcgacgcccccaucggcaagugcaagagcgagugcaucacccccaacggcagcauccccaacgacaagcccuuccagaacgugaacagaaucaccuacggcgccugccccagauacgugaagcacagcacccugaagcuggccaccggcaugagaaacgugcccgagaagcagaccagaggcaucuucggcgccaucgccggcuucaucgagaacggcugggagggcaugguggacggcugguacggcuucagacaccagaacagcgagggcagaggccaggccgccgaccugaagagcacccaggccgccaucgaccagaucaacggcaagcugaacagacugaucggcaagaccaacgagaaguuccaccagaucgagaaggaguucagcgagguggagggcagaauccaggaccuggagaaguacguggaggacaccaagaucgaccuguggagcuacaacgccgagcugcugguggcccuggagaaccagcacaccaucgaccugaccgacagcgagaugaacaagcuguucgagaagaccaagaagcagcugagagagaacgccgaggacaugggcaacggcugcuucaagaucuaccacaagugcgacaacgccugcaucggcagcaucagaaacggcaccuacgaccacaacguguacagagacgaggcccugaacaacagauuccagaucaagggcguggagcugaagagcggcuacaaggacuggauccuguggaucagcuucgccaccagcugcuuccugcugugcguggcccugcugggcuucaucaugugggccugccagaagggcaacaucagaugcaacaucugcaucuga

SEQ ID NO: 173109 - RNA, 1701 nt, Artificial Sequence; identical to SEQ ID NO: 173044
  derived and/or modified CDS sequence (opt4) from hemagglutinin__InfluenzaA__ALA08572

SEQ ID NO: 173110 - RNA, 1701 nt, Artificial Sequence; identical to SEQ ID NO: 173041
  derived and/or modified CDS sequence (opt4) from hemagglutinin__InfluenzaA__ALA08573

SEQ ID NO: 173111 - RNA, 1701 nt, Artificial Sequence
  derived and/or modified CDS sequence (opt4) from hemagglutinin__InfluenzaA__ALA08574
augaagaccaucaucgcccugagcuacauccugugccugguguucgcccagaagauccccggcaacgacaacagcaccgccacccugugccugggccaccacgccgugcccaacggcaccaucgugaagaccaucaccaacgacagaaucgaggugaccaacgccaccgagcuggugcagaacagcagcaucggcgagaucugcgacagcccccaccagauccuggacggcgagaacugcacccugaucgacgcccugcugggcgacccccagugcgacggcuuccagaacaagaagugggaccuguucguggagagaagcaaggccuacagcaacugcuaccccuacgacgugcccgacuacgccagccugagaagccugguggccagcagcggcacccuggaguucaacaacgagagcuucaacuggaccggcgugacccagaacggcaccagcagcgccugcaucagaagaagcagcagcagcuucuucagcagacugaacuggcugacccaccugaacuacaccuaccccgcccugaacgugaccaugcccaacaacgagcaguucgacaagcuguacaucuggggcgugcaccaccccggcaccgacaaggaccagaucuuccuguacgcccagagcagcggcagaaucaccgugagcaccaagagaagccagcaggccgugauccccaacaucggcagcagacccagaaucagagacauccccagcagaaucagcaucuacuggaccaucgugaagcccggcgacauccugcugaucaacagcaccggcaaccugaucgcccccagaggcuacuucaagaucagaagcggcaagagcagcaucaugagaagcgacgcccccaucggcaagugcaagagcgagugcaucacccccaacggcagcauccccaacgacaagcccuuccagaacgugaacagaaucaccuacggcgccugccccagauacgugaagcacagcacccugaagcuggccaccggcaugagaaacgugcccgagaagcagaccagaggcaucuucggcgccaucgccggcuucaucgagaacggcugggagggcaugguggacggcugguacggcuucagacaccagaacagcgagggcagaggccaggccgccgaccugaagagcacccaggccgccaucgaccagaucagcggcaagcugaacagacugaucggcaagaccaacgagaaguuccaccagaucgagaaggaguucagcgagguggagggcagaauccaggaccuggagaaguacguggaggacaccaagaucgaccuguggagcuacaacgccgagcugcugguggcccuggagaaccagcacaccaucgaccugaccgacagcgagaugaacaagcuguucgagaagaccaagaagcagcugagagagaacgccgaggacaugggcaacggcugcuucaagaucuaccacaagugcgacaacgccugcaucggcagcaucagaaacggcaccuacgaccacaacguguacagagacgaggcccugaacaacagauuccagaucaagggcguggagcugaagagcggcuacaaggacuggauccuguggaucagcuucgccaucagcugcuuccugcugugcguggcccugcugggcuucaucaugugggccugccagaagggcaacaucagaugcaacaucugcaucuga

SEQ ID NO: 173112 - RNA, 1701 nt, Artificial Sequence
  derived and/or modified CDS sequence (opt4) from hemagglutinin__InfluenzaA__ALA08575
augaagaccaucaucgcccugagcuacauccugugccugguguucgcccagaagauccccggcaacgacaacagcaccgccacccugugccugggccaccacgccgugcccaacggcaccaucgugaagaccaucaccaacgacagaaucgaggugaccaacgccaccgagcuggugcagaacagcagcaucggcgagaucugcgacagcccccaccagauccuggacggcgagaacugcacccugaucgacgcccugcugggcgacccccagugcgacggcuuccagaacaagaagugggaccuguucguggagagaagcaaggccuacagcaacugcuaccccuacgacgugcccgacuacgccagccugagaagccugguggccagcagcggcacccuggaguucaacaacgagagcuucaacuggaccggcgugacccagaacggcaccagcagcgccugcaucagaagaagcagcagcagcuucuucagcagacugaacuggcugacccaccugaacuacaccuaccccgcccugaacgugaccaugcccaacaacgagcaguucgacaagcuguacaucuggggcgugcaccaccccggcaccgacaaggaccagaucuuccuguacgcccagagcagcggcagaaucaccgugagcaccaagagaagccagcaggccgugauccccaacaucggcagcagacccagaaucagagacauccccagcagaaucagcaucuacuggaccaucgugaagcccggcgacauccugcugaucaacagcaccggcaaccugaucgcccccagaggcuacuucaagaucagaagcggcaagagcagcaucaugagaagcgacgcccccaucggcaagugcaagagcgagugcaucacccccaacggcagcauccccaacgacaagcccuuccagaacgugaacagaaucaccuacggcgccugccccagauacgugaagcagagcacccugaagcuggccaccggcaugagaaacgugcccgagaagcagaccagaggcaucuucggcgccaucgccggcuucaucgagaacggcugggagggcaugguggacggcugguacggcuucagacaccagaacagcgagggcagaggccaggccgccgaccugaagagcacccaggccgccaucgaccagaucaacggcaagcugaacagacugaucggcaagaccaacgagaaguuccaccagaucgagaaggaguucagcgagguggagggcagaauccaggaccuggagaaguacguggaggacaccaagaucgaccuguggagcuacaacgccgagcugcugguggcccuggagaaccagcacaccaucgaccugaccgacagcgagaugaacaagcuguucgagaagaccaagaagcagcugagagagaacgccgaggacaugggcaacggcugcuucaagaucuaccacaagugcgacaacgccugcaucggcagcaucagaaacggcaccuacgaccacaacguguacagagacgaggcccugaacaacagauuccagaucaagggcguggagcugaagagcggcuacaaggacuggauccuguggaucagcuucgccaucagcugcuuccugcugugcguggcccugcugggcuucaucaugugggccugccagaagggcaacaucagaugcaacaucugcaucuga

SEQ ID NO: 173113 - RNA, 1701 nt, Artificial Sequence; identical to SEQ ID NO: 172501
  derived and/or modified CDS sequence (opt4) from hemagglutinin__InfluenzaA__ALA08576

SEQ ID NO: 173114 - RNA, 1701 nt, Artificial Sequence; identical to SEQ ID NO: 172501
  derived and/or modified CDS sequence (opt4) from hemagglutinin__InfluenzaA__ALA08577

SEQ ID NO: 173115 - RNA, 1701 nt, Artificial Sequence
  derived and/or modified CDS sequence (opt4) from hemagglutinin__InfluenzaA__ALA08579
augaagaccaucaucgcccugagcuacauccugugccugaucuucgcccagaagauccccggcaacgacaacagcaccgccacccugugccugggccaccacgccgugcccaacggcaccaucgugaagaccaucaccaacgacagaaucgaggugaccaacgccaccgagcuggugcagaacagcagcaucggcgagaucugcgacagcccccaccagauccuggacggcgagaacugcacccugaucgacgcccugcugggcgacccccagugcgacggcuuccagaacaagaagugggaccuguucguggagagaagcaaggccuacagcaacugcuaccccuacgacgugcccgacuacgccagccugagaagccugguggccagcagcggcacccuggaguucaacaacgagagcuucaacuggaccggcgugacccagaacggcaccagcagcgccugcaucagaaagagcagcagcagcuucuucagcagacugaacuggcugacccaccugaacuacaccuaccccgcccugaacgugaccaugcccaacaacgagcaguucgacaagcuguacaucuggggcgugcaccaccccggcaccgacaaggaccagaucuuccuguacgccagaagcagcggcagaaucaccgugagcaccaagagaagccagcaggccgugauccccaacaucggcagcagacccagaaucagagacauccccagcagaaucagcaucuacuggaccaucgugaagcccggcgacauccugcugaucaacagcaccggcaaccugaucgcccccagaggcuacuucaagaucagaagcggcaagagcagcaucaugagaagcgacgcccccaucggcaagugcaagagcgagugcaucacccccaacggcagcauccccaacgacaagcccuuccagaacgugaacagaaucaccuacggcgccugccccagauacgugaagcacagcacccugaagcuggccaccggcaugagaaacgugcccgagaagcagaccagaggcaucuucggcgccaucgccggcuucaucgagaacggcugggagggcaugguggacggcugguacggcuucagacaccagaacagcgagggcagaggccaggccgccgaccugaagagcacccaggccgccaucgaccagaucaacggcaagcugaacagacugaucggcaagaccaacgagaaguuccaccagaucgagaaggaguucagcgagguggagggcagaauccaggaccuggagaaguacguggaggacaccaagaucgaccuguggagcuacaacgccgagcugcugguggcccuggagaaccagcacaccaucgaccugaccgacagcgagaugaacaagcuguucgagaagaccaagaagcagcugagagagaacgccgaggacaugggcaacggcugcuucaagaucuaccacaagugcgacaacgccugcaucggcagcaucagaaacggcaccuacgaccacaacguguacagagacgaggcccugaacaacagauuccagaucaagggcguggagcugaagagcggcuacaaggacuggauccuguggaucagcuucgccaucagcugcuuccugcugugcguggcccugcugggcuucaucaugugggccugccagaagggcaacaucagaugcaacaucugcaucuga

SEQ ID NO: 173116 - RNA, 1701 nt, Artificial Sequence
  derived and/or modified CDS sequence (opt4) from hemagglutinin__InfluenzaA__ALA08580
augaagaccaucaucgcccugagcuacauccugugccugguguucgcccagaagauccccggcaacgacaacagcaccgccacccugugccugggccaccacgccgugcccaacggcaccaucgugaagaccaucaccaacgacagaaucgaggugaccaacgccaccgagcuggugcagaacagcagcaucggcgagaucugcgacagcccccaccagauccuggacggcgagaacugcacccugaucgacgcccugcugggcgacccccagugcgacggcuuccagaacaagaagugggaccuguucguggagagaagcaaggccuacagcaacugcuaccccuacgacgugcccgacuacgccagccugagaagccugguggccagcagcggcacccuggaguucaacaacgagagcuucaacuggaccggcgugacccagaacggcaccagcagcgccugcaucagaagaagcagcagcagcuucuucagcagacugaacuggcugacccaccugaacuacaccuaccccgcccugaacgugaccaugcccaacaacgagcaguucgacaagcuguacaucuggggcgugcaccaccccggcaccgacaaggaccagaucuuccuguacgccagaagcagcggcagaaucaccgugagcaccaagggcagccagcaggccgugauccccaacaucggcagcagacccagaaucagagacauccccagcagaaucagcaucuacuggaccaucgugaagcccggcgacauccugcugaucaacagcaccggcaaccugaucgcccccagaggcuacuucaagaucagaagcggcaagagcagcaucaugagaagcgacgcccccaucggcaagugcaagagcgagugcaucacccccaacggcagcauccccaacgacaagcccuuccagaacgugaacagaaucaccuacggcgccugccccagauacgugaagcacagcacccugaagcuggccaccggcaugagaaacgugcccgagaagcagaccagaggcaucuucggcgccaucgccggcuucaucgagaacggcugggagggcaugguggacggcugguacggcuucagacaccagaacagcgagggcagaggccaggccgccgaccugaagagcacccaggccgccaucgaccagaucaacggcaagcugaacagacugaucggcaagaccaacgagaaguuccaccagaucgagaaggaguucagcgagguggagggcagaauccaggaccuggagaaguacguggaggacaccaagaucgaccuguggagcuacaacgccgagcugcugguggcccuggagaaccagcacaccaucgaccugaccgacagcgagaugaacaagcuguucgagaagaccaagaagcagcugagagagaacgccgaggacaugggcaacggcugcuucaagaucuaccacaagugcgacaacgccugcaucggcagcaucagaaacggcaccuacgaccacaacguguacagagacgaggcccugaacaacagauuccagaucaagggcguggagcugaagagcggcuacaaggacuggauccuguggaucagcuucgccaucagcugcuuccugcugugcguggcccugcugggcuucaucaugugggccugccagaagggcaacaucagaugcaacaucugcaucuga

SEQ ID NO: 173117 - RNA, 1701 nt, Artificial Sequence
  derived and/or modified CDS sequence (opt4) from hemagglutinin__InfluenzaA__ALA08582
augaagaccaucaucgcccugagcuacauccugugccugguguucgcccagaagcugcccgagaacgacaacagcaccgccacccugugccugggccaccacgccgugcccaacggcaccaucgugaagaccaucaccaacgacagaaucgaggugaccaacgccaccgagcuggugcagaacagcagcaucggcgagaucugcgacagcccccaccagauccuggacggcaagaacugcacccugaucgacgcccugcugggcgacccccagugcgacggcuuccagaacaagaagugggaccuguucguggagagaagcaaggccuacagcaacugcuaccccuacgacgugcccgacuacgccagccugagaagccugguggccagcagcggcacccuggaguucaacgacgagagcuucaacugggccggcgugacccagaacggcaccagcagcgccugcaucagaggcagcaacagcagcuucuucagcagacugaacuggcugacccacagcaacuucaaguaccccgcccugaacgugaccaugcccaacaacgagcaguucgacaagcuguacaucuggggcgugcaccaccccggcaccgacaaggaccagaucuuccuguacgcccagagcagcggcagaaucaccgugagcaccaagagaagccagcaggccgugauccccaacaucggcagcagacccagaaucagaaacauccccagcagaaucagcaucuacuggaccaucgugaagcccggcgacauccugcugaucaacagcaccggcaaccugaucgcccccagaggcuacuucaagaucagaagcggcaagagcagcaucaugagaagcgacgcccccaucggcaagugcaagagcgagugcaucacccccaacggcagcauccccaacgacaagcccuuccagaacgugaacagaaucaccuacggcgccugccccagauacgugaagcagagcacccugaagcuggccaccggcaugagaaacgugcccgagaagcagaccagaggcaucuucggcgccaucgccggcuucaucgagaacggcugggagggcaugaaggacggcugguacggcuucagacaccagaacagcgagggcagaggccaggccgccgaccugaagagcacccaggccgccaucgaccagaucaacggcaagcugaacagacugaucggcaagaccaacgagaaguuccaccagaucgagaaggaguucagcgagguggagggcagaauccaggaccuggagaaguacguggaggacaccaagaucgaccuguggagcuacaacgccgagcugcugguggcccuggagaaccagcacaccaucgaccugaccgacagcgagaugaacaagcuguucgagaagaccaagaagcagcugagagagaacgccgaggacaugggcaacggcugcuucaagaucuaccacaagugcgacaacgccugcaucggcagcaucagaaacggcaccuacgaccacgacguguacagagacgaggcccugaacaacagauuccagaucaagggcguggagcugaagagcggcuacaaggacuggauccuguggaucagcuucgccaucagcugcuuccugcugugcguggcccugcugggcuucaucaugugggccugccagaagggcaacaucagaugcaacaucugcaucuga

SEQ ID NO: 173118 - RNA, 1701 nt, Artificial Sequence; identical to SEQ ID NO: 173117
  derived and/or modified CDS sequence (opt4) from hemagglutinin__InfluenzaA__ALA08583

SEQ ID NO: 173119 - RNA, 1701 nt, Artificial Sequence; identical to SEQ ID NO: 173117
  derived and/or modified CDS sequence (opt4) from hemagglutinin__InfluenzaA__ALA08584

SEQ ID NO: 173120 - RNA, 1701 nt, Artificial Sequence; identical to SEQ ID NO: 173117
  derived and/or modified CDS sequence (opt4) from hemagglutinin__InfluenzaA__ALA08585

SEQ ID NO: 173121 - RNA, 1701 nt, Artificial Sequence; identical to SEQ ID NO: 172501
  derived and/or modified CDS sequence (opt4) from hemagglutinin__InfluenzaA__ALA08586

SEQ ID NO: 173122 - RNA, 1701 nt, Artificial Sequence; identical to SEQ ID NO: 173117
  derived and/or modified CDS sequence (opt4) from hemagglutinin__InfluenzaA__ALA08587

SEQ ID NO: 173123 - RNA, 1701 nt, Artificial Sequence; identical to SEQ ID NO: 172501
  derived and/or modified CDS sequence (opt4) from hemagglutinin__InfluenzaA__ALA08588

SEQ ID NO: 173124 - RNA, 1701 nt, Artificial Sequence; identical to SEQ ID NO: 172501
  derived and/or modified CDS sequence (opt4) from hemagglutinin__InfluenzaA__ALA08589

SEQ ID NO: 173125 - RNA, 1701 nt, Artificial Sequence; identical to SEQ ID NO: 173117
  derived and/or modified CDS sequence (opt4) from hemagglutinin__InfluenzaA__ALA08590

SEQ ID NO: 173126 - RNA, 1701 nt, Artificial Sequence; identical to SEQ ID NO: 172501
  derived and/or modified CDS sequence (opt4) from hemagglutinin__InfluenzaA__ALA08591

SEQ ID NO: 173127 - RNA, 1701 nt, Artificial Sequence; identical to SEQ ID NO: 173058
  derived and/or modified CDS sequence (opt4) from hemagglutinin__InfluenzaA__ALA08592

SEQ ID NO: 173128 - RNA, 1701 nt, Artificial Sequence
  derived and/or modified CDS sequence (opt4) from hemagglutinin__InfluenzaA__ALA08594
augaagaccaucaucgcccugagcuacauccugugccugguguucgcccagaagcugcccgagaacgacaacagcaccgccacccugugccugggccaccacgccgugcccaacggcaccaucgugaagaccaucaccagcgacagaaucgaggugaccaacgccaccgagcuggugcagaacagcagcaucggcgagaucugcgacagcccccaccagauccuggacggcaagaacugcacccugaucgacgcccugcugggcgacccccagugcgacggcuuccagaacaagaagugggaccuguucguggagagaagcaaggccuacagcaacugcuaccccuacgacgugcccgacuacgccagccugagaagccugguggccagcagcggcacccuggaguucaacgacgagagcuucaacugggccggcgugacccagaacggcaccagcagcgccugcaucagaggcagcaacagcagcuucuucagcagacugaacuggcugacccacagcaacuucaaguaccccgcccugaacgugaccaugcccaacaacgagcaguucgacaagcuguacaucuggggcgugcaccaccccggcaccgacaaggaccagaucuuccuguacgcccagagcagcggcagaaucaccgugagcaccaagagaagccagcaggccgugauccccaacaucggcagcagacccagaaucagaaacauccccagcagaaucagcaucuacuggaccaucgugaagcccggcgacauccugcugaucaacagcaccggcaaccugaucgcccccagaggcuacuucaagaucagaagcggcaagagcagcaucaugagaagcgacgcccccaucggcaagugcaagagcgagugcaucacccccaacggcagcauccccaacgacaagcccuuccagaacgugaacagaaucaccuacggcgccugccccagauacgugaagcagagcacccugaagcuggccaccggcaugagaaacgugcccgagaagcagaccagaggcaucuucggcgccaucgccggcuucaucgagaacggcugggagggcaugaaggacggcugguacggcuucagacaccagaacagcgagggcagaggccaggccgccgaccugaagagcacccaggccgccaucgaccagaucaacggcaagcugaacagacugaucggcaagaccaacgagaaguuccaccagaucgagaaggaguucagcgagguggagggcagaauccaggaccuggagaaguacguggaggacaccaagaucgaccuguggagcuacaacgccgagcugcugguggcccuggagaaccagcacaccaucgaccugaccgacagcgagaugaacaagcuguucgagaagaccaagaagcagcugagagagaacgccgaggacaugggcaacggcugcuucaagaucuaccacaagugcgacaacgccugcaucggcagcaucagaaacggcaccuacgaccacgacguguacagagacgaggcccugaacaacagauuccagaucaagggcguggagcugaagagcggcuacaaggacuggauccuguggaucagcuucgccaugagcugcuuccugcugugcguggcccugcugggcuucaucaugugggccugccagaagggcaacaucagaugcaacaucugcaucuga

SEQ ID NO: 173129 - RNA, 1701 nt, Artificial Sequence; identical to SEQ ID NO: 172501
  derived and/or modified CDS sequence (opt4) from hemagglutinin__InfluenzaA__ALA08595

SEQ ID NO: 173130 - RNA, 1701 nt, Artificial Sequence; identical to SEQ ID NO: 172501
  derived and/or modified CDS sequence (opt4) from hemagglutinin__InfluenzaA__ALA08596

SEQ ID NO: 173131 - RNA, 1701 nt, Artificial Sequence
  derived and/or modified CDS sequence (opt4) from hemagglutinin__InfluenzaA__ALA08597
augaagaccaucaucgcccugagcuacauccugugccugguguucgcccagaagauccccggcaacgacaacagcaccgccacccugugccugggccaccacgccgugcccaacggcaccaucgugaagaccaucaccaacgacagaaucgaggugaccaacgccaccgagcuggugcagaacagcagcaucggcgagaucugcgacagcccccaccagauccuggacggcgagaacugcacccugaucgacgcccugcugggcgacccccagugcgacggcuuccagaacaagaagugggaccuguucguggagagaagcaaggccuacagcaacugcuaccccuacgacgugcccgacuacgccagccugagaagccugguggccagcagcggcacccuggaguucaacaacgagagcuucaacuggaccggcgugacccagaacggcaccagcagcgccugcaucagaagaagcagcagcagcuucuucagcagacugaacuggcugacccaccugaacuacaccuaccccgcccugaacgugaccaugcccaacaacgagcaguucgacaagcuguacaucuggggcgugcaccaccccggcaccgacaaggaccagaucuuccuguacgcccagagcagcggcagaaucaccgugagcaccaagagaagccagcaggccgugauccccaacaucggcagcagacccagaaucagagacauccccagcagaaucagcaucuacuggaccaucgugaagcccggcgacauccugcugaucaacagcaccggcaaccugaucgcccccagaggcuacuucaagaucagaagcggcaagagcagcaucaugagaagcgacgcccccaucggcaagugcaagagcgagugcaucacccccaacggcagcauccccaacgacaagcccuuccagaacgugaacagaaucaccuacggcgccugccccagauacgugaagcacagcacccugaagcuggccaccggcaugagaaacgugcccgagaagcagaccagaggcaucuucggcgccaucgccggcuucaucgagaacggcugggagggcaugguggacggcugguacggcuucagacaccagaacagcgagggcagaggccaggccgccgaccugaagagcacccaggccgccaucgaccagaucaacggcaagcugaacagacugaucggcaagaccaacgagaaguuccaccagaucgagaaggaguucagcgagguggagggcagaauccaggaccuggagaaguacguggaggacaccaagaucgaccuguggagcuacaacgccgagcugcugguggcccuggagaaccagcacaccaucgaccugaccgacagcgagaugaacaagcuguucgagaagaccaagaagcagcugagagagaacgccgaggacaugggcaacggcugcuucaagaucuaccacaagugcgacaacgccugcaucggcagcaucagaaacggcaccuacgaccacaacguguacagagacgaggcccugaacaacagauuccagaucaagggcguggagcugaagagcggcuacaaggacuggauccuguggaucagcuucgccaucagcugcuuccugcugugcguggcccugcugggcuucaucaugugggccugccagaacggcaacaucagaugcaacaucugcaucuga

SEQ ID NO: 173132 - RNA, 1701 nt, Artificial Sequence
  derived and/or modified CDS sequence (opt4) from hemagglutinin__InfluenzaA__ALA08598
augaagaccaucaucgccagcagcuacauccugugccugguguucgcccagaagauccccggcaacgacaacagcaccgccacccugugccugggccaccacgccgugcccaacggcaccaucgugaagaccaucaccaacgacagaaucgaggugaccaacgccaccgagcuggugcagaacagcagcaucggcgagaucugcgacagcccccaccagauccuggacggcgagaacugcacccugaucgacgcccugcugggcgacccccagugcgacggcuuccagaacaagaagugggaccuguucguggagagaagcaaggccuacagcaacugcuaccccuacgacgugcccgacuacgccagccugagaagccugguggccagcagcggcacccuggaguucaacaacgagagcuucaacuggaccggcgugacccagaacggcaccagcagcgccugcaucagaagaagcagcagcagcuucuucagcagacugaacuggcugacccaccugaacuacaccuaccccgcccugaacgugaccaugcccaacaacgagcaguucgacaagcuguacaucuggggcgugcaccaccccggcaccgacaaggaccagaucuuccuguacgcccagagcagcggcagaaucaccgugagcaccaagagaagccagcaggccgugauccccaacaucggcagcagacccagaaucagagacauccccagcagaaucagcaucuacuggaccaucgugaagcccggcgacauccugcugaucaacagcaccggcaaccugaucgcccccagaggcuacuucaagaucagaagcggcaagagcagcaucaugagaagcgacgcccccaucggcaagugcaagagcgagugcaucacccccaacggcagcauccccaacgacaagcccuuccagaacgugaacagaaucaccuacggcgccugccccagauacgugaagcacagcacccugaagcuggccaccggcaugagaaacgugcccgagaagcagaccagaggcaucuucggcgccaucgccggcuucaucgagaacggcugggagggcaugguggacggcugguacggcuucagacaccagaacagcgagggcagaggccaggccgccgaccugaagagcacccaggccgccaucgaccagaucaacggcaagcugaacagacugaucggcaagaccaacgagaaguuccaccagaucgagaaggaguucagcgagguggagggcagaauccaggaccuggagaaguacguggaggacaccaagaucgaccuguggagcuacaacgccgagcugcugguggcccuggagaaccagcacaccaucgaccugaccgacagcgagaugaacaagcuguucgagaagaccaagaagcagcugagagagaacgccgaggacaugggcaacggcugcuucaagaucuaccacaagugcgacaacgccugcaucggcagcaucagaaacggcaccuacgaccacaacguguacagagacgaggcccugaacaacagauuccagaucaagggcguggagcugaagagcggcuacaaggacuggauccuguggaucagcuucgccaucagcugcuuccugcugugcguggcccugcugggcuucaucaugugggccugccagaagggcaacaucagaugcaacaucugcaucuga

SEQ ID NO: 173133 - RNA, 1701 nt, Artificial Sequence; identical to SEQ ID NO: 172501
  derived and/or modified CDS sequence (opt4) from hemagglutinin__InfluenzaA__ALA08599

SEQ ID NO: 173134 - RNA, 1701 nt, Artificial Sequence
  derived and/or modified CDS sequence (opt4) from hemagglutinin__InfluenzaA__ALA08600
augaagaccaucaucgcccugagcuacauccugugccugguguucgcccagaagauccccggcaacgacaacagcaccgccacccugugccugggccaccacgccgugcccaacggcaccaucgugaagaccaucaccaacgacagaaucgaggugaccaacgccaccgagcuggugcagaacagcagcaucggcgagaucugcgacagcccccaccagauccuggacggcgagaacugcacccugaucgacgcccugcugggcgacccccagugcgacggcuuccagaacaagaagugggaccuguucguggagagaagcaaggccuacagcaacugcuaccccuacgacgugcccgacuacgccagccugagaagccugguggccagcagcggcacccuggaguucaacaacgagagcuucaacuggaccggcgugacccagaacggcaccagcagcgccugcaucagaagaagcagcagcagcuucuucagcagacugaacuggcugacccaccugaacuacagauaccccgcccugaacgugaccaugcccaacaacgagcaguucgacaagcuguacaucuggggcgugcaccaccccggcaccgacaaggaccagaucagccuguacgcccagagcagcggcagaaucaccgugagcaccaagagaagccagcaggccgugauccccaacaucggcagcagacccagaaucagagacauccccagcagaaucagcaucuacuggaccaucgugaagcccggcgacauccugcugaucaacagcaccggcaaccugaucgcccccagaggcuacuucaagaucagaagcggcaagagcagcaucaugagaagcgacgcccccaucggcaagugcaagagcgagugcaucacccccaacggcagcauccccaacgacaagcccuuccagaacgugaacagaaucaccuacggcgccugccccagauacgugaagcacagcacccugaagcuggccaccggcaugagaaacgugcccgagaagcagaccagaggcaucuucggcgccaucgccggcuucaucgagaacggcugggagggcaugguggacggcugguacggcuucagacaccagaacagcgagggcagaggccaggccgccgaccugaagagcacccaggccgccaucgaccagaucaacggcaagcugaacagacugaucggcaagaccaacgagaaguuccaccagaucgagaaggaguucagcgagguggagggcagaauccaggaccuggagaaguacguggaggacaccaagaucgaccuguggagcuacaacgccgagcugcugguggcccuggagaaccagcacaccaucgaccugaccgacagcgagaugaacaagcuguucgagaagaccaagaagcagcugagagagaacgccgaggacaugggcaacggcugcuucaagaucuaccacaagugcgacaacgccugcaucggcagcaucagaaacggcaccuacgaccacaacguguacagagacgaggcccugaacaacagauuccagaucaagggcguggagcugaagagcggcuacaaggacuggauccuguggaucagcuucgccaucagcugcuuccugcugugcguggcccugcugggcuucaucaugugggccugccagaagggcaacaucagaugcaacaucugcaucuga

SEQ ID NO: 173135 - RNA, 1701 nt, Artificial Sequence; identical to SEQ ID NO: 172501
  derived and/or modified CDS sequence (opt4) from hemagglutinin__InfluenzaA__ALA08601

SEQ ID NO: 173136 - RNA, 1701 nt, Artificial Sequence
  derived and/or modified CDS sequence (opt4) from hemagglutinin__InfluenzaA__ALA08602
augaagaccaucaucgcccugagcuacauccugugccugguguucgcccagaagauccccggcaacgacaacagcaccgccacccugugccugggccaccacgccgugcccaacggcaccaucgugaagaccaucaccaacgacagaaucgaggugaccaacgccaccgagcuggugcagaacagcagcaucggcgagaucugcgacagcccccaccagauccuggacggcgagaacugcacccugaucgacgcccugcugggcgacccccagugcgacgacuuccagaacaagaagugggaccuguucguggagagaagcaaggccuacagcaacugcuaccccuacgacgugcccgacuacgccagccugagaagccugguggccagcagcggcacccuggaguucaacaacgagagcuucaacuggaccggcgugacccagaacggcaccagcagcgccugcaucagaagaagcagcagcagcuucuucagcagacugaacuggcugacccaccugaacuacaccuaccccgcccugaacgugaccaugcccaacaacgagcaguucgacaagcuguacaucuggggcgugcaccaccccggcaccgacaaggaccagaucagccuguacgcccagagcagcggcagaaucaccgugagcaccaagagaagccagcaggccgugauccccaacaucggcagcagacccagaaucagagacauccccagcagaaucagcaucuacuggaccaucgugaagcccggcgacauccugcugaucaacagcaccggcaaccugaucgcccccagaggcuacuucaagaucagaagcggcaagagcagcaucaugagaagcgacgcccccaucggcaagugcaagagcgagugcaucacccccaacggcagcauccccaacgacaagcccuuccagaacgugaacagaaucaccuacggcgccugccccagauacgugaagcacagcacccugaagcuggccaccggcaugagaaacgugcccgagaagcagaccagaggcaucuucggcgccaucgccggcuucaucgagaacggcugggagggcaugguggacggcugguacggcuucagacaccagaacagcgagggcagaggccaggccgccgaccugaagagcacccaggccgccaucgaccagaucaacggcaagcugaacagacugaucggcaagaccaacgagaaguuccaccagaucgagaaggaguucagcgagguggagggcagaauccaggaccuggagaaguacguggaggacaccaagaucgaccuguggagcuacaacgccgagcugcugguggcccuggagaaccagcacaccaucgaccugaccgacagcgagaugaacaagcuguucgagaagaccaagaagcagcugagagagaacgccgaggacaugggcaacggcugcuucaagaucuaccacaagugcgacaacgccugcaucggcagcaucagaaacggcaccuacgaccacaacguguacagagacgaggcccugaacaacagauuccagaucaagggcguggagcugaagagcggcuacaaggacuggauccuguggaucagcuucgccaucagcugcuuccugcugugcguggcccugcugggcuucaucaugugggccugccagaagggcaacaucagaugcaacaucugcaucuga

SEQ ID NO: 173137 - RNA, 1701 nt, Artificial Sequence
  derived and/or modified CDS sequence (opt4) from hemagglutinin__InfluenzaA__ALA08603
augaagaccaucaucgcccugagcuacauccugugccugguguucgcccagaagauccccggcaacgacaacagcaccgccacccugugccugggccaccacgccgugcccaacggcaccaucgugaagaccaucaccaacgacagaaucgaggugaccaacgccaccgagcuggugcagaacagcagcaucggcgagaucugcgacagcccccaccagauccuggacggcgagaacugcacccugaucgacgcccugcugggcgacccccagugcgacggcuuccagaacaagaagugggaccuguucguggagagaagcaaggccuacagcaacugcuaccccuacgacgugcccgacuacgccagccugagaagccugguggccagcagcggcacccuggaguucaacaacgagagcuucaacuggaccggcgugacccagaacggcaccagcagcgccugcaucagaagaagcagcagcagcuucuucagcagacugaacuggcugacccaccugaacuacaucuaccccgcccugaacgugaccaugcccaacaacgagcaguucgacaagcuguacaucuggggcgugcaccaccccggcaccgacaaggaccagaucuuccuguacgcccagagcagcggcagaaucaccgugagcaccaagagaagccagcaggccgugauccccaacaucggcagcagacccagaaucagagacauccccagcagaaucagcaucuacuggaccaucgugaagcccggcgacauccugcugaucaacagcaccggcaaccugaucgcccccagaggcuacuucaagaucagaagcggcaagagcagcaucaugagaagcgacgcccccaucggcaagugcaagagcgagugcaucacccccaacggcagcauccccaacgacaagcccuuccagaacgugaacagaaucaccuacggcgccugccccagauacgugaagcacagcacccugaagcuggccaccggcaugagaaacgugcccgagaagcagaccagaggcaucuucggcgccaucgccggcuucaucgagaacggcugggagggcaugguggacggcugguacggcuucagacaccagaacagcgagggcagaggccaggccgccgaccugaagagcacccaggccgccaucgaccagaucaacggcaagcugaacagacugaucggcaagaccaacgagaaguuccaccagaucgagaaggaguucagcgagguggagggcagaauccaggaccuggagaaguacguggaggacaccaagaucgaccuguggagcuacaacgccgagcugcugguggcccuggagaaccagcacaccaucgaccugaccgacagcgagaugaacaagcuguucgagaagaccaagaagcagcugagagagaacgccgaggacaugggcaacggcugcuucaagaucuaccacaagugcgacaacgccugcaucggcagcaucagaaacggcaccuacgaccacaacguguacagagacgaggcccugaacaacagauuccagaucaagggcguggagcugaagagcggcuacaaggacuggauccuguggaucagcuucgccaucagcugcuuccugcugugcguggcccugcugggcuucaucaugugggccugccagaagggcaacaucagaugcaacaucugcaucuga

SEQ ID NO: 173138 - RNA, 1701 nt, Artificial Sequence; identical to SEQ ID NO: 172501
  derived and/or modified CDS sequence (opt4) from hemagglutinin__InfluenzaA__ALA08605

SEQ ID NO: 173139 - RNA, 1701 nt, Artificial Sequence; identical to SEQ ID NO: 172501
  derived and/or modified CDS sequence (opt4) from hemagglutinin__InfluenzaA__ALA08606

SEQ ID NO: 173140 - RNA, 1701 nt, Artificial Sequence; identical to SEQ ID NO: 173116
  derived and/or modified CDS sequence (opt4) from hemagglutinin__InfluenzaA__ALA08607

SEQ ID NO: 173141 - RNA, 1701 nt, Artificial Sequence
  derived and/or modified CDS sequence (opt4) from hemagglutinin__InfluenzaA__ALA08609
augaagaccaucaucgcccugggcuacauccugugccugguguucgcccagaagauccccggcaacgacaacagcaccgccacccugugccugggccaccacgccgugcccaacggcaccaucgugaagaccaucaccaacgacagaaucgaggugaccaacgccaccgagcuggugcagaacagcagcaucggcgagaucugcgacagcccccacaagauccuggacggcgagaacugcacccugaucgacgcccugcugggcgacccccagugcgacggcuuccagaacaagaagugggaccuguucguggagagaagcaaggccuacagcaacugcuaccccuacgacgugcccgacuacgccagccugagaagccugguggccagcagcggcacccuggaguucaacaacgagagcuucaacuggaccggcgugacccagaacggcaccagcagcgccugcaucagaagaagcagcagcagcuucuucagcagacugaacuggcugacccaccugaacuacaccuaccccgcccugaacgugaccaugcccaacaacgagcaguucgacaagcuguacaucuggggcgugcaccaccccggcaccgacaaggaccagaucuuccuguacgcccagagcagcggcagaaucaccgugagcaccaagagaagccagcaggccgugauccccaacaucggcagcagacccagaaucagagacauccccagcagaaucagcaucuacuggaccaucgugaagcccggcgacauccugcugaucaacagcaccggcaaccugaucgcccccagaggcuacuucaagaucagaagcggcaagagcagcaucaugagaagcgacgcccccaucggcaagugcaagagcgagugcaucacccccaacggcagcauccccaacgacaagcccuuccagaacgugaacagaaucaccuacggcgccugccccagauacgugaagcacagcacccugaagcuggccaccggcaugagaaacgugcccgagaagcagaccagaggcaucuucggcgccaucgccggcuucaucgagaacggcugggagggcaugguggacggcugguacggcuucagacaccagaacagcgagggcagaggccaggccgccgaccugaagagcacccaggccgccaucgaccagaucaacggcaagcugaacagacugaucggcaagaccaacgagaaguuccaccagaucgagaaggaguucagcgagguggagggcagaauccaggaccuggacaaguacguggaggacaccaagaucgaccuguggagcuacaacgccgagcugcugguggcccuggagaaccagcacaccaucgaccugaccgacagcgagaugaacaagcuguucgagaagaccaagaagcagcugagagagaacgccgaggacaugggcaacggcugcuucaagaucuaccacaagugcgacaacgccugcaucggcagcaucagaaacggcaccuacgaccacaacguguacagagacgaggcccugaacaacagauuccagaucaagggcguggagcugaagagcggcuacaaggacuggauccuguggaucagcuucgccaucagcugcuuccugcugugcguggcccugcugggcuucaucaugugggccugccagaagggcaacaucagaugcaacaucugcaucuga

SEQ ID NO: 173142 - RNA, 1701 nt, Artificial Sequence; identical to SEQ ID NO: 173058
  derived and/or modified CDS sequence (opt4) from hemagglutinin__InfluenzaA__ALA08610

SEQ ID NO: 173143 - RNA, 1701 nt, Artificial Sequence
  derived and/or modified CDS sequence (opt4) from hemagglutinin__InfluenzaA__ALA08611
augaagaucaucaucgcccugagcuacauccugugccugguguucgcccagaagauccccggcaacgacaacagcaccgccacccugugccugggccaccacgccgugcccaacggcaccaucgugaagaccaucaccaacgacagaaucgaggugaccaacgccaccgagcuggugcagaacagcagcaucggcgagaucugcgacagcccccacagaauccuggacggcgagaacugcacccugaucgacgcccugcugggcgacccccagugcgacggcuuccagaacaagaagugggaccuguucguggagagaagcaaggccuacagcaacugcuaccccuacgacgugcccgacuacgccagccugagaagccugguggccagcagcggcacccuggaguucaacaacgagagcuucaacuggaccggcgugacccagaacggcaccagcagcgccugcaucagaagaagcagcagcagcuucuucagcagacugaacuggcugacccaccugaacuacaccuaccccgcccugaacgugaccaugcccaacaacgagcaguucgacaagcuguacaucuggggcgugcaccaccccggcaccgacaaggaccagaucuuccuguacgcccagagcagcggcagaaucaccgugagcaccaagagaagccagcaggccgugauccccaacaucggcagcagacccagaaucagagacauccccagcagaaucagcaucuacuggaccaucgugaagcccggcgacauccugcugaucaacagcaccggcaaccugaucgcccccagaggcuacuucaagaucagaagcggcaagagcagcaucaugagaagcgacgcccccaucggcaagugcaagagcgagugcaucacccccaacggcagcauccccaacgacaagcccuuccagaacgugaacagaaucaccuacggcgccugccccagauacgugaagcacagcacccugaagcuggccaccggcaugagaaacgugcccgagaagcagaccagaggcaucuucggcgccaucgccggcuucaucgagaacggcugggagggcaugguggacggcugguacggcuucagacaccagaacagcgagggcagaggccaggccgccgaccugaagagcacccaggccgccaucgaccagaucaacggcaagcugaacagacugaucggcaagaccaacgagaaguuccaccagaucgagaaggaguucagcgagguggagggcagaauccaggaccuggagaaguacguggaggacaccaagaucgaccuguggagcuacaacgccgagcugcugguggcccuggagaaccagcacaccaucgaccugaccgacagcgagaugaacaagcuguucgagaagaccaagaagcagcugagagagaacgccgaggacaugggcaacggcugcuucaagaucuaccacaagugcgacaacgccugcaucggcagcaucagaaacggcaccuacgaccacaacguguacagagacgaggcccugaacaacagauuccagaucaagggcguggagcugaagagcggcuacaaggacuggauccuguggaucagcuucgccaucagcugcuuccugcugugcguggcccugcugggcuucaucaugugggccugccagaagggcaacaucagaugcaacaucugcaucuga

SEQ ID NO: 173144 - RNA, 1701 nt, Artificial Sequence; identical to SEQ ID NO: 173116
  derived and/or modified CDS sequence (opt4) from hemagglutinin__InfluenzaA__ALA08612

SEQ ID NO: 173145 - RNA, 1701 nt, Artificial Sequence; identical to SEQ ID NO: 172501
  derived and/or modified CDS sequence (opt4) from hemagglutinin__InfluenzaA__ALA08614

SEQ ID NO: 173146 - RNA, 1701 nt, Artificial Sequence; identical to SEQ ID NO: 172501
  derived and/or modified CDS sequence (opt4) from hemagglutinin__InfluenzaA__ALA08615

SEQ ID NO: 173147 - RNA, 1701 nt, Artificial Sequence; identical to SEQ ID NO: 172501
  derived and/or modified CDS sequence (opt4) from hemagglutinin__InfluenzaA__ALA08616

SEQ ID NO: 173148 - RNA, 1701 nt, Artificial Sequence; identical to SEQ ID NO: 173041
  derived and/or modified CDS sequence (opt4) from hemagglutinin__InfluenzaA__ALA08617

SEQ ID NO: 173149 - RNA, 1701 nt, Artificial Sequence
  derived and/or modified CDS sequence (opt4) from hemagglutinin__InfluenzaA__ALA08619
augaagaccgugaucgcccugagcuacauccugugccugguguucgcccagaagauccccggcaacgacaacagcaccgccacccugugccugggccaccacgccgugcccaacggcaccaucgugaagaccaucaccaacgacagaaucgaggugaccaacgccaccgagcuggugcagaacagcagcaucggcgagaucugcgacagcccccaccagauccuggacggcgagaacugcacccugaucgacgcccugcugggcgacccccagugcgacggcuuccagaacaagaagugggaccuguucguggagagaagcaaggccuacagcaacugcuaccccuacgacgugcccgacuacgccagccugagaagccugaucgccagcagcggcacccuggaguucaacaacgagagcuucaacuggaccggcgugacccagaacggcaccagcagcgccugcaucagaaagagcagcagcagcuucuucagcagacugaacuggcugacccaccugaacuacaccuaccccgcccugaacgugaccaugcccaacaacgagcaguucgacaagcuguacaucuggggcgugcaccaccccggcaccgacaaggaccagaucuuccuguacgccagaagcagcggcagaaucaccgugagcaccaagagaagccagcaggccgugauccccaacaucggcagcagacccagaaucagagacauccccagcagaaucagcaucuacuggaccaucgugaagcccggcgacauccugcugaucaacagcaccggcaaccugaucgcccccagaggcuacuucaagaucagaagcggcaagagcagcaucaugagaagcgacgcccccaucggcaagugcaagagcgagugcaucacccccaacggcagcauccccaacgagaagcccuuccagaacgugaacagaaucaccuacggcgccugccccagauacgugaagcacagcacccugaagcuggccaccggcaugagaaacgugcccgagaagcagaccagaggcaucuucggcgccaucgccggcuucaucgagaacggcugggagggcaugguggacggcugguacggcuucagacaccagaacagcgagggcagaggccaggccgccgaccugaagagcacccaggccgccaucgaccagaucaacggcaagcugaacagacugaucggcaagaccaacgagaaguuccaccagaucgagaaggaguucagcgagguggagggcagaauccaggaccuggagaaguacguggaggacaccaagaucgaccuguggagcuacaacgccgagcugcugguggcccuggagaaccagcacaccaucgaccugaccgacagcgagaugaacaagcuguucgagaagaccaagaagcagcugagagagaacgccgaggacaugggcaacggcugcuucaagaucuaccacaagugcgacaacgccugcaucggcagcaucagaaacggcaucuacgaccacaacguguacagagacgaggcccugaacaacagauuccagaucaagggcguggagcugaagagcggcuacaaggacuggauccuguggaucagcuucgccaucagcugcuuccugcugugcguggcccugcugggcuucaucaugugggccugccagaagggcaacaucagaugcaacaucugcaucuga

SEQ ID NO: 173150 - RNA, 1701 nt, Artificial Sequence; identical to SEQ ID NO: 173116
  derived and/or modified CDS sequence (opt4) from hemagglutinin__InfluenzaA__ALA08620

SEQ ID NO: 173151 - RNA, 1701 nt, Artificial Sequence; identical to SEQ ID NO: 173107
  derived and/or modified CDS sequence (opt4) from hemagglutinin__InfluenzaA__ALA08621

SEQ ID NO: 173152 - RNA, 1701 nt, Artificial Sequence
  derived and/or modified CDS sequence (opt4) from hemagglutinin__InfluenzaA__ALA08622
augaagaccaucaucgcccugagcuacauccugugccugguguucgcccagaagauccccggcaacgacaacagcaccgccacccugugccugggccaccacgccgugcccaacggcaccaucgugaagaccaucaccaacgacagaaucgaggugaccaacgccaccgagcuggugcagaacagcagcaucggcgagaucugcgacagcccccaccagauccuggacggcgagaacugcacccugaucgacgcccugcugggcgacccccagugcgacggcuuccagaacaagaagugggaccuguucguggagagaagcaaggccuacagcaacugcuaccccuacgacgugcccgacuacgccagccugagaagccugguggccagcagcggcacccuggaguucaacaacgagagcuucaacuggaccggcgugacccagaacggcaccagcagcgccugcaucagaagaagcagcagcagcuucuucagcagacugaacuggcugacccaccugaacuacaaguaccccgcccugaacgugaccaugcccaacaacgagcaguucgacaagcuguacaucuggggcgugcaccaccccggcaccgacaaggaccagaucuuccuguacgcccagagcagcggcagaaucaccgugagcaccaagagaagccagcaggccgugauccccaacaucggcagcagacccagaaucagagacauccccagcagaaucagcaucuacuggaccaucgugaagcccggcgacauccugcugaucaacagcaccggcaaccugaucgcccccagaggcuacuucaagaucagaagcggcaagagcagcaucaugagaagcgacgcccccaucggcaagugcaagagcgagugcaucacccccaacggcagcauccccaacgacaagcccuuccagaacgugaacagaaucaccuacggcgccugccccagauacgugaagcacagcacccugaagcuggccaccggcaugagaaacgugcccgagaagcagaccagaggcaucuucggcgccaucgccggcuucaucgagaacggcugggagggcaugguggacggcugguacggcuucagacaccagaacagcgagggcagaggccaggccgccgaccugaagagcacccaggccgccaucgaccagaucaacggcaagcugaacagacugaucggcaagaccaacgagaaguuccaccagaucgagaaggaguucagcgagguggagggcagaauccaggaccuggagaaguacguggaggacaccaagaucgaccuguggagcuacaacgccgagcugcugguggcccuggagaaccagcacaccaucgaccugaccgacagcgagaugaacaagcuguucgagaagaccaagaagcagcugagagagaacgccgaggacaugggcaacggcugcuucaagaucuaccacaagugcgacaacgccugcaucggcagcaucagaaacggcaccuacgaccacaacguguacagagacgaggcccugaacaacagauuccagaucaagggcguggagcugaagagcggcuacaaggacuggauccuguggaucagcuucgccaucagcugcuuccugcugugcguggcccugcugggcuucaucaugugggccugccagaagggcaacaucagaugcaacaucugcaucuga

SEQ ID NO: 173153 - RNA, 1701 nt, Artificial Sequence; identical to SEQ ID NO: 172501
  derived and/or modified CDS sequence (opt4) from hemagglutinin__InfluenzaA__ALA08623

SEQ ID NO: 173154 - RNA, 1701 nt, Artificial Sequence; identical to SEQ ID NO: 173107
  derived and/or modified CDS sequence (opt4) from hemagglutinin__InfluenzaA__ALA08624

SEQ ID NO: 173155 - RNA, 1701 nt, Artificial Sequence; identical to SEQ ID NO: 172501
  derived and/or modified CDS sequence (opt4) from hemagglutinin__InfluenzaA__ALA08625

SEQ ID NO: 173156 - RNA, 1701 nt, Artificial Sequence; identical to SEQ ID NO: 172501
  derived and/or modified CDS sequence (opt4) from hemagglutinin__InfluenzaA__ALA08626

SEQ ID NO: 173157 - RNA, 1701 nt, Artificial Sequence; identical to SEQ ID NO: 172501
  derived and/or modified CDS sequence (opt4) from hemagglutinin__InfluenzaA__ALA08627

SEQ ID NO: 173158 - RNA, 1701 nt, Artificial Sequence; identical to SEQ ID NO: 173045
  derived and/or modified CDS sequence (opt4) from hemagglutinin__InfluenzaA__ALA08629

SEQ ID NO: 173159 - RNA, 1701 nt, Artificial Sequence
  derived and/or modified CDS sequence (opt4) from hemagglutinin__InfluenzaA__ALA08630
augaagaccaucaucgcccugagcuacauccugugccugguguucgcccagaagauccccggcaacgacaacagcaccgccacccugugccugggccaccacgccgugcccaacggcaccaucgugaagaccaucaccaacgacagaaucgaggugaccaacgccaccgagcuggugcagaacagcagcaucggcgagaucugcgacagcccccaccagauccuggacggcgagaacugcacccugaucgacgcccugcugggcgacccccagugcgacggcuuccagaacaagaagugggaccuguucguggagagaagcaaggccuacagcaacugcuaccccuacgacgugcccgacuacgccagccugagaagccugguggccagcagcggcacccuggaguucaacaacgagagcuucaacuggaccggcgugacccagaacggcaccagcagcgccugcaucagaaagagcagcagcagcuucuucagcagacugaacuggcugacccaccugaacuacaccuaccccgcccugaacgugaccaugcccaacaacgagcaguucgacaagcuguacaucuggggcgugcaccaccccggcaccgacaaggaccagaucuuccuguacgccagaagcagcggcagaaucaccgugagcaccaagagaagccagcaggccgugauccccaacaucggcagcagacccagaaucagagacauccccagcagaaucagcaucuacuggaccaucgugaagcccggcgacauccugcugaucaacagcaccggcaaccugaucgcccccagaggcuacuucaagaucagaagcggcaagagcagcaucaugagaagcgacgcccccaucggcaagugcaagagcgagugcaucacccccaacggcagcauccccaacgacaagcccuuccagaacgugaacagaaucaccuacggcgccugccccagauacgugaagcacagcacccugaagcuggccaccggcaugagaaacgugcccgagaagcagaccagaggcaucuucggcgccaucgccggcuucaucgagaacggcugggagggcaugguggacggcugguacggcuucagacaccagaacagcgagggcagaggccaggccgccgaccugaagagcacccaggccgccaucgaccagaucaacggcaagcugaacagacugaucggcaagaccaacgagaaguuccaccagaucgagaaggaguucagcgagguggagggcagaauccaggaccuggagaaguacguggaggacaccaagaucgaccuguggagcuacaacgccgagcugcugguggcccuggagaaccagcacaccaucgaccugaccgacagcgagaugaacaagcuguucgagaagaccaagaagcagcugagagagaacgccgaggacaugggcaacggcugcuucaagaucuaccacaagugcgacaacgccugcaucggcagcaucagaaacggcaccuacgaccacaacguguacagagacgaggcccugaacaacagauuccagaucaagggcguggagcugaagagcggcuacaaggacuggauccuguggaucagcuucgccaucagcugcuuccugcugugcguggcccugcugggcuucaucaugugggccugccagaagggcaacaucagaugcaacaucugcaucuga

SEQ ID NO: 173160 - RNA, 1701 nt, Artificial Sequence
  derived and/or modified CDS sequence (opt4) from hemagglutinin__InfluenzaA__ALA08631
augaagaccaucaucgcccugagcuacauccugugccugguguucgcccagaagauccccggcaacgacaacagcaccgccacccugugccugggccaccacgccgugcccaacggcaccaucgugaagaccaucaccaacgacagaaucgaggugaccaacgccaccgagcuggugcagaacagcagcaucggcgagaucugcgacagcccccaccagauccuggacggcgagaacugcacccugaucgacgcccugcugggcgacccccagugcgacggcuuccagaacaagaagugggaccuguucguggagagaagcaaggccuacagcaacugcuaccccuacgacgugcccgacuacgccagccugagaagccugguggccagcagcggcacccuggaguucaacaacgagagcuucaacuggaccggcgugacccagaacggcaccagcagcgccugcaucagaagaagcagcagcagcuucuucagcagacugaacuggcugacccaccugaacuacaccuaccccgcccugaacgugaccaugcccaacaaggagcaguucgacaagcuguacaucuggggcgugcaccaccccggcaccgacaaggaccagaucuuccuguacgcccagagcagcggcagaaucaccgugagcaccaagagaagccagcaggccgugauccccaacaucggcagcagacccagaaucagagacauccccagcagaaucagcaucuacuggaccaucgugaagcccggcgacauccugcugaucaacagcaccggcaaccugaucgcccccagaggcuacuucaagaucagaagcggcaagagcagcaucaugagaagcgacgcccccaucggcaagugcaagagcgagugcaucacccccaacggcagcauccccaacgacaagcccuuccagaacgugaacagaaucaccuacggcgccugccccagauacgugaagcacagcacccugaagcuggccaccggcaugagaaacgugcccgagaagcagaccagaggcaucuucggcgccaucgccggcuucaucgagaacggcugggagggcaugguggacggcugguacggcuucagacaccagaacagcgagggcagaggccaggccgccgaccugaagagcacccaggccgccaucgaccagaucaacggcaagcugaacagacugaucggcaagaccaacgagaaguuccaccagaucgagaaggaguucagcgagguggagggcagaauccaggaccuggagaaguacguggaggacaccaagaucgaccuguggagcuacaacgccgagcugcugguggcccuggagaaccagcacaccaucgaccugaccgacagcgagaugaacaagcuguucgagaagaccaagaagcagcugagagagaacgccgaggacaugggcaacggcugcuucaagaucuaccacaagugcgacaacgccugcaucggcagcaucagaaacggcaccuacgaccacaacguguacagagacgaggcccugaacaacagauuccagaucaagggcguggagcugaagagcggcuacaaggacuggauccuguggaucagcuucgccaucagcugcuuccugcugugcguggcccugcugggcuucaucaugugggccugccagaagggcaacaucagaugcaacaucugcaucuga

SEQ ID NO: 173161 - RNA, 1701 nt, Artificial Sequence
  derived and/or modified CDS sequence (opt4) from hemagglutinin__InfluenzaA__ALA08632
augaagaccaucaucgcccugagcuacauccugugccugguguucgcccagaagauccccggcaacgacaacagcaccgccacccugugccugggccaccacgccgugcccaacggcaccaucgugaagaccaucaccaacgacagaaucgaggugaccaacgccaccgagcuggugcagaacagcagcaucggcgagaucugcgacagcccccaccagauccuggacggcgagaacugcacccugaucgacgcccugcugggcgacccccagugcgacggcuuccagaacaagaagugggaccuguucguggagagaagcaaggccuacagcaacugcuaccccuacgacgugcccgacuacgccagccugagaagccugguggccagcagcggcacccuggaguucaacaacgagagcuucaacuggaccggcgugacccagaacggcaccagcagcgccugcaucagaagaagcagcagcagcuucuucagcagacugaacuggcugacccaccugaacuacaccuaccccgcccugaacgugaccaugcccaacaacgagcaguucgacaagcuguacaucuggggcgugcaccaccccggcaccgacaaggaccagaucuuccuguacgcccagagcagcggcagaaucaccgugagcaccaagggcagccagcaggccgugauccccaacgugggcagcagacccagaaucagagacauccccagcagaaucagcaucuacuggaccaucgugaagcccggcgacauccugcugaucaacagcaccggcaaccugaucgcccccagaggcuacuucaagaucagaagcggcaagagcagcaucaugagaagcgacgcccccaucggcaagugcaagagcgagugcaucacccccaacggcagcauccccaacgacaagcccuuccagaacgugaacagaaucaccuacggcgccugccccagauacgugaagcacagcacccugaagcuggccaccggcaugagaaacgugcccgagaagcagaccagaggcaucuucggcgccaucgccggcuucaucgagaacggcugggagggcaugguggacggcugguacggcuucagacaccagaacagcgagggcagaggccaggccgccgaccugaagagcacccaggccgccaucgaccagaucaacggcaagcugaacagacugaucggcaagaccaacgagaaguuccaccagaucgagaaggaguucagcgagguggagggcagaauccaggaccuggagaaguacguggaggacaccaagaucgaccuguggagcuacaacgccgagcugcugguggcccuggagaaccagcacaccaucgaccugaccgacagcgagaugaacaagcuguucgagaagaccaagaagcagcugagagagaacgccgaggacaugggcaacggcugcuucaagaucuaccacaagugcgacaacgccugcaucggcagcaucagaaacggcaccuacgaccacaacguguacagagacgaggcccugaacaacagauuccagaucaagggcguggagcugaagagcggcuacaaggacuggauccuguggaucagcuucgccaucagcugcuuccugcugugcguggcccugcugggcuucaucaugugggccugccagaagggcaacaucagaugcaacaucugcaucuga

SEQ ID NO: 173162 - RNA, 1701 nt, Artificial Sequence; identical to SEQ ID NO: 173058
  derived and/or modified CDS sequence (opt4) from hemagglutinin__InfluenzaA__ALA08634

SEQ ID NO: 173163 - RNA, 1701 nt, Artificial Sequence; identical to SEQ ID NO: 172501
  derived and/or modified CDS sequence (opt4) from hemagglutinin__InfluenzaA__ALA08635

SEQ ID NO: 173164 - RNA, 1701 nt, Artificial Sequence
  derived and/or modified CDS sequence (opt4) from hemagglutinin__InfluenzaA__ALA08636
augaagaccaucaucgcccugagcuacauccugugccugguguucgcccagaagauccccggcaacgacaacagcaccgccacccugugccugggccaccacgccgugcccaacggcaccaucgugaagaccaucaccaacgacagaaucgaggugaccaacgccaccgagcuggugcagaacagcagcaucggcgagaucugcgacagcccccaccagauccuggacggcgagaacugcacccugaucgacgcccugcugggcgacccccagugcgacggcuuccagaacaagaagugggaccuguucguggagagaagcaaggccuacagcaacugcuaccccuacgacgugcccgacuacgccagccugagaagccugguggccagcagcggcacccuggaguucaacaacgagagcuucaacuggaccggcgugacccagaacggcaccagcagcgccugcaucagaagaagcagcagcagcuucuucagcagacugaacuggcugacccaccugaacuacaccuaccccgcccugaacgugaccaugcccaacaacgagcaguucgacaagcuguacaucuggggcauccaccaccccggcaccgacaaggaccagaucuuccuguacgcccagagcagcggcagaaucaccgugagcaccaagagaagccagcaggccgugauccccaacaucggcagcagacccagaaucagagacauccccagcagaaucagcaucuacuggaccaucgugaagcccggcgacauccugcugaucaacagcaccggcaaccugaucgcccccagaggcuacuucaagaucagaagcggcaagagcagcaucaugagaagcgacgcccccaucggcaagugcaagagcgagugcaucacccccaacggcagcauccccaacgacaagcccuuccagaacgugaacagaaucaccuacggcgccugccccagauacgugaagcacagcacccugaagcuggccaccggcaugagaaacgugcccgagaagcagaccagaggcaucuucggcgccaucgccggcuucaucgagaacggcugggagggcaugguggacggcugguacggcuucagacaccagaacagcgagggcagaggccaggccgccgaccugaagagcacccaggccgccaucgaccagaucaacggcaagcugaacagacugaucggcaagaccaacgagaaguuccaccagaucgagaaggaguucagcgagguggagggcagaauccaggaccuggagaaguacguggaggacaccaagaucgaccuguggagcuacaacgccgagcugcugguggcccuggagaaccagcacaccaucgaccugaccgacagcgagaugaacaagcuguucgagaagaccaagaagcagcugagagagaacgccgaggacaugggcaacggcugcuucaagaucuaccacaagugcgacaacgccugcaucggcagcaucagaaacggcaccuacgaccacaacguguacagagacgaggcccugaacaacagauuccagaucaagggcguggagcugaagagcggcuacaaggacuggauccuguggaucagcuucgccaucagcugcuuccugcugugcguggcccugcugggcuucaucaugugggccugccagaagggcaacaucagaugcaacaucugcaucuga

SEQ ID NO: 173165 - RNA, 1701 nt, Artificial Sequence; identical to SEQ ID NO: 173058
  derived and/or modified CDS sequence (opt4) from hemagglutinin__InfluenzaA__ALA08637

SEQ ID NO: 173166 - RNA, 1701 nt, Artificial Sequence
  derived and/or modified CDS sequence (opt4) from hemagglutinin__InfluenzaA__ALA08638
augaagaccaucaucgcccugagcuacauccugugccugguguucgcccagaagauccccggcaacgacaacagcaccgccacccugugccugggccaccacgccgugcccaacggcaccaucgugaagaccaucaccaacgacagaaucgaggugaccaacgccaccgagcuggugcagaacagcagcaucggcgagaucugcgacagcccccaccagauccuggacggcgagaacugcacccugaucgacgcccugcugggcgacccccagugcgacggcuuccagaacaagaagugggaccuguucguggagagaagcaaggccuacagcaacugcuaccccuacgacgugcccgacuacgccagccugagaagccugguggccagcagcggcacccuggaguucaacaacgagagcuucaacuggaccggcgugacccagaacggcaccagcagcgccugcaucagaggcagcaacagcagcuucuucagcagacugaacuggcugacccacagcaacuucaaguaccccgcccugaacgugaccaugcccaacaacgagcaguucgacaagcuguacaucuggggcgugcaccaccccggcaccgacaaggaccagaucuuccuguacgcccagagcagcggcagaaucaccgugagcaccaagagaagccagcaggccgugauccccaacaucggcagcagacccagaaucagagacauccccagcagaaucagcaucuacuggaccaucgugaagcccggcgacauccugcugaucaacagcaccggcaaccugaucgcccccagaggcuacuucaagaucagaagcggcaagagcagcaucaugagaagcgacgcccccaucggcaagugcaagagcgagugcaucacccccaacggcagcauccccaacgacaagcccuuccagaacgugaacagaaucaccuacggcgccugccccagauacgugaagcacagcacccugaagcuggccaccggcaugagaaacgugcccgagaagcagaccagaggcaucuucggcgccaucgccggcuucaucgagaacggcugggagggcaugguggacggcugguacggcuucagacaccagaacagcgagggcagaggccaggccgccgaccugaagagcacccaggccgccaucgaccagaucaacggcaagcugaacagacugaucggcaagaccaacgagaaguuccaccagaucgagaaggaguucagcgagguggagggcagaauccaggaccuggagaaguacguggaggacaccaagaucgaccuguggagcuacaacgccgagcugcugguggcccuggagaaccagcacaccaucgaccugaccgacagcgagaugaacaagcuguucgagaagaccaagaagcagcugagagagaacgccgaggacaugggcaacggcugcuucaagaucuaccacaagugcgacaacgccugcaucggcagcaucagaaacggcaccuacgaccacaacguguacagagacgaggcccugaacaacagauuccagaucaagggcguggagcugaagagcggcuacaaggacuggauccuguggaucagcuucgccaucagcugcuuccugcugugcguggcccugcugggcuucaucaugugggccugccagaagggcaacaucagaugcaacaucugcaucuga

SEQ ID NO: 173167 - RNA, 1701 nt, Artificial Sequence; identical to SEQ ID NO: 173058
  derived and/or modified CDS sequence (opt4) from hemagglutinin__InfluenzaA__ALA08639

SEQ ID NO: 173168 - RNA, 1701 nt, Artificial Sequence; identical to SEQ ID NO: 173058
  derived and/or modified CDS sequence (opt4) from hemagglutinin__InfluenzaA__ALA08640

SEQ ID NO: 173169 - RNA, 1701 nt, Artificial Sequence; identical to SEQ ID NO: 173058
  derived and/or modified CDS sequence (opt4) from hemagglutinin__InfluenzaA__ALA08641

SEQ ID NO: 173170 - RNA, 1701 nt, Artificial Sequence; identical to SEQ ID NO: 173058
  derived and/or modified CDS sequence (opt4) from hemagglutinin__InfluenzaA__ALA08642

SEQ ID NO: 173171 - RNA, 1701 nt, Artificial Sequence; identical to SEQ ID NO: 173058
  derived and/or modified CDS sequence (opt4) from hemagglutinin__InfluenzaA__ALA08643

SEQ ID NO: 173172 - RNA, 1701 nt, Artificial Sequence; identical to SEQ ID NO: 172501
  derived and/or modified CDS sequence (opt4) from hemagglutinin__InfluenzaA__ALA08644

SEQ ID NO: 173173 - RNA, 1701 nt, Artificial Sequence
  derived and/or modified CDS sequence (opt4) from hemagglutinin__InfluenzaA__ALA08645
augaagaccaucaucgcccugagcuacauccugugccugguguucgcccagaagcugcccgagaacgacaacagcaccgccacccugugccugggccaccacgccgugcccaacggcaccaucgugaagaccaucaccagcgacagaaucgaggugaccaacgccaccgagcuggugcagaacagcagcaucggcgagaucugcgacagcccccaccagauccuggacggcaagaacugcacccugaucgacgcccugcugggcgacccccagugcgacggcuuccagaacaagaagugggaccuguucguggagagaagcaaggccuacagcaacugcuaccccuacgacgugcccgacuacgccagccugagaagccugguggccagcagcggcacccuggaguucaacgacgagagcuucaacugggccggcgugacccagaacggcaccagcagcgccugcaucagaggcagcaacagcagcuucuucagcagacugaacuggcugacccacagcaacuucaaguaccccgcccugaacgugaccaugcccaacaacgagcaguucgacaagcuguacaucuggggcgugcaccaccccggcaccgacaaggaccagaucuuccuguacgcccagagcagcggcagaaucaccgugagcaccaagagaagccagcaggccgugauccccaacaucggcagcagacccagaaucagaaacauccccagcagaaucagcaucuacuggaccaucgugaagcccggcgacauccugcugaucaacagcaccggcaaccugaucgcccccagaggcuacuucaagaucagaagcggcaagagcagcaucaugagaagcgacgcccccaucggcaagugcaagagcgagugcaucacccccaacggcagcauccccaacgacaagcccuuccagaacgugaacagaaucaccuacggcgccugccccagauacgugaagcagagcacccugaagcuggccaccggcaugagaaacgugcccgagaagcagaccagaggcaucuucggcgccaucgccggcuucaucgagaacggcugggagggcaugaaggacggcugguacggcuucagacaccagaacagcgagggcagaggccaggccgccgaccugaagagcacccaggccgccaucgaccagaucaacggcaagcugaacagacugaucggcaagaccaacgagaaguuccaccagaucgagaaggaguucagcgagguggagggcagaauccaggaccuggagaaguacguggaggacaccaagaucgacaucuggagcuacaacgccgagcugcugguggcccuggagaaccagcacaccaucgaccugaccgacagcgagaugaacaagcuguucgagaagaccaagaagcagcugagagagaacgccgaggacaugggcaacggcugcuucaagaucuaccacaagugcgacaacgccugcaucggcagcaucagaaacggcaccuacgaccacgacguguacagagacgaggcccugaacaacagauuccagaucaagggcguggagcugaagagcggcuacaaggacuggauccuguggaucagcuucgccaucagcugcuuccugcugugcguggcccugcugggcuucaucaugugggccugccagaagggcaacaucagaugcaacaucugcaucuga

SEQ ID NO: 173174 - RNA, 1701 nt, Artificial Sequence; identical to SEQ ID NO: 172501
  derived and/or modified CDS sequence (opt4) from hemagglutinin__InfluenzaA__ALA08646

SEQ ID NO: 173175 - RNA, 1701 nt, Artificial Sequence; identical to SEQ ID NO: 172501
  derived and/or modified CDS sequence (opt4) from hemagglutinin__InfluenzaA__ALA08647

SEQ ID NO: 173176 - RNA, 1701 nt, Artificial Sequence; identical to SEQ ID NO: 173058
  derived and/or modified CDS sequence (opt4) from hemagglutinin__InfluenzaA__ALA08648

SEQ ID NO: 173177 - RNA, 1701 nt, Artificial Sequence
  derived and/or modified CDS sequence (opt4) from hemagglutinin__InfluenzaA__ALA08650
augaagaccaucaucgcccugagcuacauccugugccugguguucgcccagaagauccccggcaacgacaacagcaccgccacccugugccugggccaccacgccgugcccaacggcaccaucgugaagaccaucaccaacgagagaaucgaggugaccaacgccaccgagcuggugcagaacagcagcaucggcgagaucugcgacagcccccaccagauccuggacggcgagaacugcacccugaucgacgcccugcugggcgacccccagugcgacggcuuccagaacaagaagugggaccuguucguggagagaagcaaggccuacagcaacugcuaccccuacgacgugcccgacuacgccagccugagaagccugguggccagcagcggcacccuggaguucaacaacgagagcuucaacuggaccggcgugacccagaacggcaccagcagcgccugcaucagaagaagcagcagcagcuucuucagcagacugaacuggcugacccaccugaacuacaccuaccccgcccugaacgugaccaugcccaacaacgagcaguucgacaagcuguacaucuggggcgugcaccaccccggcaccgacaaggaccagaucuuccuguacgcccagagcagcggcagaaucaccgugagcaccaagagaagccagcaggccgugauccccaacaucggcagcagacccagaaucagagacauccccagcagaaucagcaucuacuggaccaucgugaagcccggcgacauccugcugaucaacagcaccggcaaccugaucgcccccagaggcuacuucaagaucagaagcggcaagagcagcaucaugagaagcgacgcccccaucggcaagugcaagagcgagugcaucacccccaacggcagcauccccaacgacaagcccuuccagaacgugaacagaaucaccuacggcgccugccccagauacgugaagcacagcacccugaagcuggccaccggcaugagaaacgugcccgagaagcagaccagaggcaucuucggcgccaucgccggcuucaucgagaacggcugggagggcaugguggacggcugguacggcuucagacaccagaacagcgagggcagaggccaggccgccgaccugaagagcacccaggccgccaucgaccagaucaacggcaagcugaacagacugaucggcaagaccaacgagaaguuccaccagaucgagaaggaguucagcgagguggagggcagaauccaggaccuggagaaguacguggaggacaccaagaucgaccuguggagcuacaacgccgagcugcugguggcccuggagaaccagcacaccaucgaccugaccgacagcgagaugaacaagcuguucgagaagaccaagaagcagcugagagagaacgccgaggacaugggcaacggcugcuucaagaucuaccacaagugcgacaacgccugcaucggcagcaucagaaacggcaccuacgaccacaacguguacagagacgaggcccugaacaacagauuccagaucaagggcguggagcugaagagcggcuacaaggacuggauccuguggaucagcuucgccaucagcugcuuccugcugugcguggcccugcugggcuucaucaugugggccugccagaagggcaacaucagaugcaacaucugcaucuga

SEQ ID NO: 173178 - RNA, 1701 nt, Artificial Sequence; identical to SEQ ID NO: 173058
  derived and/or modified CDS sequence (opt4) from hemagglutinin__InfluenzaA__ALA08652

SEQ ID NO: 173179 - RNA, 1701 nt, Artificial Sequence; identical to SEQ ID NO: 172501
  derived and/or modified CDS sequence (opt4) from hemagglutinin__InfluenzaA__ALA08653

SEQ ID NO: 173180 - RNA, 1701 nt, Artificial Sequence
  derived and/or modified CDS sequence (opt4) from hemagglutinin__InfluenzaA__ALA08654
augaagaccaucaucgcccugagcuacauccugugccugguguucgcccagaagauccccggcaacgacaacagcaccgccacccugugccugggccaccacgccgugcccaacggcaccaucgugaagaccaucaccaacgacagaaucgaggugaccaacgccaccgagcuggugcagaacagcagcaucggcgagaucugcgacagcccccaccagauccuggacggcgagaacugcacccugaucgacgcccugcugggcgacccccagugcgacggcuuccagaacaagaagugggaccuguucguggagagaagcaaggccuacagcaacugcuaccccuacgacgugcccgacuacgccagccugagaagccugguggccagcagcggcacccuggaguucaacaacgagagcuucaacuggaccggcgugacccagaacggcaccagcagcgccugcaucagaagaagcagcagcagcuucuucagcagacugaacuggcugacccaccugaacuacaccuaccccgcccugaacgugaccaugcccaacaacgagcaguucgacaagcuguacaucuggggcgugcaccaccccggcaccgacaaggaccagaucuuccuguacgcccagagcagcggcagaaucaccgugagcaccaagagaagccagcaggccgugauccccaacaucggcagcagacccagaaucagagacauccccagcagaaucagcaucuacuggaccaucgugaagcccggcgacauccugcugaucaacagcaccggcaaccugaucgcccccagaggcuacuucaagaucagaagcggcaagagcagcaucaugagaagcgacgcccccaucggcaagugcaagagcgagugcaucacccccaacggcagcauccccaacgacaagcccuuccagaacgugaacagaaucaccuacggcgccugccccagauacgugaagcacagcacccugaagcuggccaccggcaugagaaacgugcccgagaagcagaccagaggcaucuucggcgccaucgccggcuucaucgagaacggcugggagggcaugguggacggcugguacggcuucagacaccagaacagcgagggcagaggccaggccgccgaccugaagagcacccaggccgccaucgaccagaucaacggcaagcugaacagacugaucggcaagaccaacgagaaguuccaccagaucgagaaggaguucagcgagguggagggcagaauccaggaccuggagaaguacguggaggacaccaagaucgaccuguggagcuacaacgccgagcugcugguggcccuggagaaccagcacaccaucgaccugaccgacagcgagaugaacaagcuguucgagaagaccaagaagcagcugagagagaacgccgaggacaugggcaacggcugcuucaagaucuaccacaagugcgacaacgccugcaucggcagcaucagaaacggcaccuacgaccacaacguguacagagacgaggcccugaacaacagauuccagaucaagggcguggagcugaagagcggcuacaaggacuggauccuguggaucagcuucgccaagagcugcuuccugcugugcguggcccugcugggcuucaucaugugggccugccagaagggcaacaucagaugcaacaucugcaucuga

SEQ ID NO: 173181 - RNA, 1701 nt, Artificial Sequence; identical to SEQ ID NO: 173058
  derived and/or modified CDS sequence (opt4) from hemagglutinin__InfluenzaA__ALA08655

SEQ ID NO: 173182 - RNA, 1701 nt, Artificial Sequence; identical to SEQ ID NO: 173058
  derived and/or modified CDS sequence (opt4) from hemagglutinin__InfluenzaA__ALA08656

SEQ ID NO: 173183 - RNA, 1701 nt, Artificial Sequence
  derived and/or modified CDS sequence (opt4) from hemagglutinin__InfluenzaA__ALA08657
augaagaccaucaucgcccugagcuacauccugugccugguguucgcccagaagcugcccgagaacgacaacagcaccgccacccugugccugggccaccacgccgugcccaacggcaccaucgugaagaccaucaccagcgacagaaucgaggugaccaacgccaccgagcuggugcagaacagcagcaucggcgagaucugcgacagcccccaccagauccuggacggcaagaacugcacccugaucgacgcccugcugggcgacccccagugcgacggcuuccagaacaagaagugggaccuguucaucgagagaagcaaggccuacagcaacugcuaccccuacgacgugcccgacuacgccagccugagaagccugguggccagcagcggcacccuggaguucaacgacgagagcuucaacugggccggcgugacccagaacggcaccagcagcgccugcaucagaggcagcaacagcagcuucuucagcagacugaacuggcugacccacagcaacuucaaguaccccgcccugaacgugaccaugcccaacaacgagcaguucgacaagcuguacaucuggggcgugcaccaccccggcaccgacaaggaccagaucuuccuguacgcccagagcagcggcagaaucaccgugagcaccaagagaagccagcaggccgugauccccaacaucggcagcagacccagaaucagaaacauccccagcagaaucagcaucuacuggaccaucgugaagcccggcgacauccugcugaucaacagcaccggcaaccugaucgcccccagaggcuacuucaagaucagaagcggcaagagcagcaucaugagaagcgacgcccccaucggcaagugcaagagcgagugcaucacccccaacggcagcauccccaacgacaagcccuuccagaacgugaacagaaucaccuacggcgccugccccagauacgugaagcagagcacccugaagcuggccaccggcaugagaaacgugcccgagaagcagaccagaggcaucuucggcgccaucgccggcuucaucgagaacggcugggagggcaugaaggacggcugguacggcuucagacaccagaacagcgagggcagaggccaggccgccgaccugaagagcacccaggccgccaucgaccagaucaacggcaagcugaacagacugaucggcaagaccaacgagaaguuccaccagaucgagaaggaguucagcgagguggagggcagaauccaggaccuggagaaguacguggaggacaccaagaucgaccuguggagcuacaacgccgagcugcugguggcccuggagaaccagcacaccaucgaccugaccgacagcgagaugaacaagcuguucgagaagaccaagaagcagcugagagagaacgccgaggacaugggcaacggcugcuucaagaucuaccacaagugcgacaacgccugcaucggcagcaucagaaacggcaccuacgaccacgacguguacagagacgaggcccugaacaacagauuccagaucaagggcguggagcugaagagcggcuacaaggacuggauccuguggaucagcuucgccaucagcugcuuccugcugugcguggcccugcugggcuucaucaugugggccugccagaagggcaacaucagaugcaacaucugcaucuga

SEQ ID NO: 173184 - RNA, 1701 nt, Artificial Sequence; identical to SEQ ID NO: 173058
  derived and/or modified CDS sequence (opt4) from hemagglutinin__InfluenzaA__ALA08658

SEQ ID NO: 173185 - RNA, 1701 nt, Artificial Sequence; identical to SEQ ID NO: 173045
  derived and/or modified CDS sequence (opt4) from hemagglutinin__InfluenzaA__ALA08659

SEQ ID NO: 173186 - RNA, 1701 nt, Artificial Sequence
  derived and/or modified CDS sequence (opt4) from hemagglutinin__InfluenzaA__ALA08660
augaagaccaucaucgcccugagcuacauccugugccugguguucgcccagaagauccccggcaacgacaacagcaccgccacccugugccugggccaccacgccgugcccaacggcaccaucgugaagaccaucaccaacgacagaaucgaggugaccaacgccaccgagcuggugcagaacagcagcaucggcgagaucugcgacagcccccaccagauccuggacggcgagaacugcacccugaucgacgcccugcugggcgacccccagugcgacggcuuccagaacaagaagugggaccuguucguggagagaagcaaggccuacagcaacugcuaccccuacgacgugcccgacuacgccagccugagaagccugguggccagcagcggcacccuggaguucaacaacgagagcuucaacuggaccggcgugacccagaacggcaccagcagcgccugcaucagaagaagcagcagcagcuucuucagcagacugaacuggcugacccaccugaacuacaccuaccccgcccugaacgugaccaugcccaacaacgagcaguucgacaagcuguacaucuggggcgugcaccaccccggcaccgacaaggaccagaucuuccuguacgcccagagcagcggcagaaucaccgugagcaccaagagaagccagcaggccgugauccccaacaucggcagcagacccagaaucagagacauccccagcagaaucagcaucuacuggaccaucgugaagcccggcgacauccugcugaucaacagcaccggcaaccugaucgcccccagaggcuacuucaagaucagaagcggcaagagcagcaucaugagaagcgacgcccccaucggcaagugcaagagcgagugcaucacccccaacggcagcauccccaacgacaagcccuuccagaacgugaacagaaucaccuacggcgccugccccagauacgugaagcacggcacccugaagcuggccaccggcaugagaaacgugcccgagaagcagaccagaggcaucuucggcgccaucgccggcuucaucgagaacggcugggagggcaugguggacggcugguacggcuucagacaccagaacagcgagggcagaggccaggccgccgaccugaagagcacccaggccgccaucgaccagaucaacggcaagcugaacagacugaucggcaagaccaacgagaaguuccaccagaucgagaaggaguucagcgagguggagggcagaauccaggaccuggagaaguacguggaggacaccaagaucgaccuguggagcuacaacgccgagcugcugguggcccuggagaaccagcacaccaucgaccugaccgacagcgagaugaacaagcuguucgagaagaccaagaagcagcugagagagaacgccgaggacaugggcaacggcugcuucaagaucuaccacaagugcgacaacgccugcaucggcagcaucagaaacggcaccuacgaccacaacguguacagagacgaggcccugaacaacagauuccagaucaagggcguggagcugaagagcggcuacaaggacuggauccuguggaucagcuucgccaucagcugcuuccugcugugcguggcccugcugggcuucaucaugugggccugccagaagggcaacaucagaugcaacaucugcaucuga

SEQ ID NO: 173187 - RNA, 1701 nt, Artificial Sequence
  derived and/or modified CDS sequence (opt4) from hemagglutinin__InfluenzaA__ALA08662
augaagaccaucaucgcccugagcuacauccugugccugguguucgcccagaagauccccggcaacgacaacagcaccgccacccugugccugggccaccacgccgugcccaacggcaccaucgugaagaccaucaccaacgacagaaucgaggugaccaacgccaccgagcuggugcagaacagcagcaucggcgagaucugcgacagcccccaccagauccuggacggcgagaacugcacccugaucgacgcccugcugggcgacccccagugcgacggcuuccagaacaagaagugggaccuguucguggagagaagcaaggccuacagcaacugcuaccccuacgacgugcccgacuacgccagccugagaagccugguggccagcagcggcacccuggaguucaacaacgagagcuucaacuggaccggcgugacccagaacggcaccagcagcgccugcaucagaagaagcagcagcagcuucuucagcagacugaacuggcugacccaccugaacuacaccuaccccgcccugaacgugaccaugcccaacaacgagcaguucgacaagcuguacaucuggggcgugcaccaccccggcaccgacaaggaccagaucuuccuguacgcccagagcagcggcagaaucaccgugagcaccaagagaagccagcaggccgugauccccaacaucggcagcagacccagaaucagagacauccccagcagaaucagcaucuacuggaccaucgugaagcccggcgacauccugcugaucaacagcaccggcaaccugaucgcccccagaggcuacuucaagauccugagcggcaagagcagcaucaugagaagcgacgcccccaucggcaagugcaagagcgagugcaucacccccaacggcagcauccccaacgacaagcccuuccagaacgugaacagaaucaccuacggcgccugccccagauacgugaagcacagcacccugaagcuggccaccggcaugagaaacgugcccgagaagcagaccagaggcaucuucggcgccaucgccggcuucaucgagaacggcugggagggcaugguggacggcugguacggcuucagacaccagaacagcgagggcagaggccaggccgccgaccugaagagcacccaggccgccaucgaccagaucaacggcaagcugaacagacugaucggcaagaccaacgagaaguuccaccagaucgagaaggaguucagcgagguggagggcagaauccaggaccuggagaaguacguggaggacagcaagaucgaccuguggagcuacaacgccgagcugcugguggcccuggagaaccagcacaccaucgaccugaccgacagcgagaugaacaagcuguucgagaagaccaagaagcagcugagagagaacgccgaggacaugggcaacggcugcuucaagaucuaccacaagugcgacaacgccugcaucggcagcaucagaaacggcaccuacgaccacaacguguacagagacgaggcccugaacaacagauuccagaucaagggcguggagcugaagagcggcuacaaggacuggauccuguggaucagcuucgccaucagcugcuuccugcugugcguggcccugcugggcuucaucaugugggccugccagaagggcaacaucagaugcaacaucugcaucuga

SEQ ID NO: 173188 - RNA, 1701 nt, Artificial Sequence; identical to SEQ ID NO: 173159
  derived and/or modified CDS sequence (opt4) from hemagglutinin__InfluenzaA__ALA08663

SEQ ID NO: 173189 - RNA, 1701 nt, Artificial Sequence; identical to SEQ ID NO: 173187
  derived and/or modified CDS sequence (opt4) from hemagglutinin__InfluenzaA__ALA08665

SEQ ID NO: 173190 - RNA, 1701 nt, Artificial Sequence
  derived and/or modified CDS sequence (opt4) from hemagglutinin__InfluenzaA__ALA08666
augaagaccaucaucgcccugagcuacauccugugccugguguucgcccagaagcugcccggcaacgacaacagcaccgccacccugugccugggccaccacgccgugcccaacggcaccaucgugaagaccaucaccaacgacagaaucgaggugaccaacgccaccgagcuggugcagaacagcagcaucggcgagaucugcgacagcccccaccagauccuggacggcgagaacugcacccugaucgacgcccugcugggcgacccccagugcgacggcuuccagaacaagaagugggaccuguucguggagagaagcaaggccuacagcaacugcuaccccuacgacgugcccgacuacgccagccugagaagccugguggccagcagcggcacccuggaguucaacaacgagagcuucaacugggccggcgugacccagaacggcaccagcagcgccugcaucagaggcagcaacagcagcuucuucagcagacugaacuggcugacccaccugaacuucaaguaccccgcccugaacgugaccaugcccaacaacgagcaguucgacaagcuguacaucuggggcgugcaccaccccggcaccgacaaggaccagaucuuccuguacgcccagagcagcggcagaaucaccgugagcaccaagagaagccagcaggccgugauccccaacaucggcagcagacccagaaucagaaacauccccagcagaaucagcaucuacuggaccaucgugaagcccggcgacauccugcugaucaacagcaccggcaaccugaucgcccccagaggcuacuucaagaucagaagcggcaagagcagcaucaugagaagcgacgcccccaucggcaagugcaagagcgagugcaucacccccaacggcagcauccccaacgacaagcccuuccagaacgugaacagaaucaccuacggcgccugccccagauacgugaagcagagcacccugaagcuggccaccggcaugagaaacgugcccgagaagcagaccagaggcaucuucggcgccaucgccggcuucaucgagaacggcugggagggcaugguggacggcugguacggcuucagacaccagaacagcgagggcagaggccaggccgccgaccugaagagcacccaggccgccaucgaccagaucaacggcaagcugaacagacugaucggcaagaccaacgagaaguuccaccagaucgagaaggaguucagcgagguggagggcagaauccaggaccuggagaaguacguggaggacaccaagaucgaccuguggagcuacaacgccgagcugcugguggcccuggagaaccagcacaccaucgaccugaccgacagcgagaugaacaagcuguucgagaagaccaagaagcagcugagagagaacgccgaggacaugggcaacggcugcuucaagaucuaccacaagugcgacaacgccugcaucggcagcaucagaaacggcaccuacgaccacgacguguacagagacgaggcccugaacaacagauuccagaucaagggcguggagcugaagagcggcuacaaggacuggauccuguggaucagcuucgccaugagcugcuuccugcugugcguggcccugcugggcuucaucaugugggccugccagaagggcaacaucagaugcaacaucugcaucuga

SEQ ID NO: 173191 - RNA, 1701 nt, Artificial Sequence
  derived and/or modified CDS sequence (opt4) from hemagglutinin__InfluenzaA__ALA08667
augaagaccaucaucgcccugagcuacauccugugccugguguucgcccagaagauccccggcaacgacaacagcaccgccacccugugccugggccaccacgccgugcccaacggcaccaucgugaagaccaucaccaacgacagaaucgaggugaccaacgccaccgagcuggugcagaacagcagcaucggcgagaucugcgacagcccccaccagauccuggacggcgagaacugcacccugaucgacgcccugcugggcgacccccagugcgacggcuuccagaacaagaagugggaccuguucguggagagaagcaaggccuacagcaacugcuaccccuacgacgugcccgacuacgccagccugagaagccugguggccagcagcggcacccuggaguucaacaacgagagcuucaacuggaccggcgugacccagaacggcaccagcagcgccugcaucagaaagagcagcagcagcuucuucagcagacugaacuggcugacccaccugaacuacaaguaccccgcccugaacgugaccaugcccaacaacgagcaguucgacaagcuguacaucuggggcgugcaccaccccggcaccgacaaggaccagaucuuccuguacgccagaagcagcggcagaaucaccgugagcaccaagagaagccagcaggccgugauccccaacaucggcagcagacccagaaucagagacauccccagcagaaucagcaucuacuggaccaucgugaagcccggcgacauccugcugaucaacagcaccggcaaccugaucgcccccagaggcuacuucaagaucagaagcggcaagagcagcaucaugagaagcgacgcccccaucggcaagugcaagagcgagugcaucacccccaacggcagcauccccaacgacaagcccuuccagaacgugaacagaaucaccuacggcgccugccccagauacgugaagcacagcacccugaagcuggccaccggcaugagaaacgugcccgagaagcagaccagaggcaucuucggcgccaucgccggcuucaucgagaacggcugggagggcaugguggacggcugguacggcuucagacaccagaacagcgagggcagaggccaggccgccgaccugaagagcacccaggccgccaucgaccagaucaacggcaagcugaacagacugaucggcaagaccaacgagaaguuccaccagaucgagaaggaguucagcgagguggagggcagaauccaggaccuggagaaguacguggaggacaccaagaucgaccuguggagcuacaacgccgagcugcugguggcccuggagaaccagcacaccaucgaccugaccgacagcgagaugaacaagcuguucgagaagaccaagaagcagcugagagagaacgccgaggacaugggcaacggcugcuucaagaucuaccacaagugcgacaacgccugcaucggcagcaucagaaacggcaccuacgaccacaacguguacagagacgaggcccugaacaacagauuccagaucaagggcguggagcugaagagcggcuacaaggacuggauccuguggaucagcuucgccaucagcugcuuccugcugugcguggcccugcugggcuucaucaugugggccugccagaagggcaacaucagaugcaacaucugcaucuga

SEQ ID NO: 173192 - RNA, 1701 nt, Artificial Sequence
  derived and/or modified CDS sequence (opt4) from hemagglutinin__InfluenzaA__ALA08668
augaagaccaucaucgcccugagcuacauccugugccugguguucgcccagaagauccccggcaacgacaacagcaccgccacccugugccugggccaccacgccgugcccaacggcaccaucgugaagaccaucaccaacgacagaaucgaggugaccaacgccaccgagcuggugcagaacagcagcaucggcgagaucugcgacagcccccaccagauccuggacggcgagaacugcacccugaucgacgcccugcugggcgacccccagugcgacggcuuccagaacaagaagugggaccuguucguggagagaagcaaggccuacagcaacugcuaccccuacgacgugcccgacuacgccagccugagaagccugguggccagcagcggcacccuggaguucaacaacgagagcuucaacuggaccggcgugacccagaacggcaccagcagcgccugcaucagaagaagcagcagcagcuucuucagcagacugaacuggcugacccaccugaacuacaccuaccccgcccugaacgugaccaugcccaacaacgagcaguucgacaagcuguacaucuggggcgugcaccaccccggcaccgacaaggaccagaucuuccuguacgcccagagcagcggcagaaucaccgugagcaccaagagaagccagcaggccgugauccccaacaucggcagcagacccagaaucagagacauccccagcagaaucagcaucuacuggaccaucgugaagcccggcgacauccugcugaucaacagcaccggcaaccugaucgcccccagaggcuacuucaagaucagaagcggcaagagcagcaucaugagaagcgacgcccccaucggcaagugcaagagcgagugcaucacccccaacggcagcauccccaacgacaagcccuuccagaacgugaacagaaucaccuacggcgccugccccagauacgugaagcacagcacccugaagcuggccaccggcaugagaaacgugcccgagaagcagaccagaggcaucuucggcgccaucgccggcuucaucgagaacggcugggagggcaugguggacggcugguacggcuucagacaccagaacagcgagggcagaggccaggccgccgaccugaagagcacccaggccgccaucgaccagaucaacggcaagcugaacagacugaucggcaagaccaacgagaaguuccaccagaucgagaaggaguucagcgagguggagggcagaauccaggaccuggagaaguacguggaggacaccaagaucgaccuguggagcuacaacgccgagcugcugguggcccuggagaaccagcacaccaucgaccugaccgacagcgagaugaacaagcuguucgagaagaccaagaagcagcugagagagaacgccgaggacaugggcaacggcugcuucaagaucuaccacaagugcgacaacgccugcaucggcagcaucagaaacggcaccuacgaccacaacguguacagagacgaggccaucaacaacagauuccagaucaagggcguggagcugaagagcggcuacaaggacuggauccuguggaucagcuucgccaucagcugcuuccugcugugcguggcccugcugggcuucaucaugugggccugccagaagggcaacaucagaugcaacaucugcaucuga

SEQ ID NO: 173193 - RNA, 1701 nt, Artificial Sequence; identical to SEQ ID NO: 173159
  derived and/or modified CDS sequence (opt4) from hemagglutinin__InfluenzaA__ALA08669

SEQ ID NO: 173194 - RNA, 1701 nt, Artificial Sequence; identical to SEQ ID NO: 173052
  derived and/or modified CDS sequence (opt4) from hemagglutinin__InfluenzaA__ALA08670

SEQ ID NO: 173195 - RNA, 1701 nt, Artificial Sequence; identical to SEQ ID NO: 173159
  derived and/or modified CDS sequence (opt4) from hemagglutinin__InfluenzaA__ALA08671

SEQ ID NO: 173196 - RNA, 1701 nt, Artificial Sequence; identical to SEQ ID NO: 173159
  derived and/or modified CDS sequence (opt4) from hemagglutinin__InfluenzaA__ALA08672

SEQ ID NO: 173197 - RNA, 1701 nt, Artificial Sequence; identical to SEQ ID NO: 173052
  derived and/or modified CDS sequence (opt4) from hemagglutinin__InfluenzaA__ALA08673

SEQ ID NO: 173198 - RNA, 1701 nt, Artificial Sequence; identical to SEQ ID NO: 173159
  derived and/or modified CDS sequence (opt4) from hemagglutinin__InfluenzaA__ALA08674

SEQ ID NO: 173199 - RNA, 1701 nt, Artificial Sequence; identical to SEQ ID NO: 172501
  derived and/or modified CDS sequence (opt4) from hemagglutinin__InfluenzaA__ALA08675

SEQ ID NO: 173200 - RNA, 1701 nt, Artificial Sequence; identical to SEQ ID NO: 173159
  derived and/or modified CDS sequence (opt4) from hemagglutinin__InfluenzaA__ALA08676

SEQ ID NO: 173201 - RNA, 1701 nt, Artificial Sequence; identical to SEQ ID NO: 173159
  derived and/or modified CDS sequence (opt4) from hemagglutinin__InfluenzaA__ALA08677

SEQ ID NO: 173202 - RNA, 1701 nt, Artificial Sequence; identical to SEQ ID NO: 173159
  derived and/or modified CDS sequence (opt4) from hemagglutinin__InfluenzaA__ALA08678

SEQ ID NO: 173203 - RNA, 1701 nt, Artificial Sequence; identical to SEQ ID NO: 173159
  derived and/or modified CDS sequence (opt4) from hemagglutinin__InfluenzaA__ALA08679

SEQ ID NO: 173204 - RNA, 1701 nt, Artificial Sequence; identical to SEQ ID NO: 173159
  derived and/or modified CDS sequence (opt4) from hemagglutinin__InfluenzaA__ALA08680

SEQ ID NO: 173205 - RNA, 1701 nt, Artificial Sequence; identical to SEQ ID NO: 173058
  derived and/or modified CDS sequence (opt4) from hemagglutinin__InfluenzaA__ALA08681

SEQ ID NO: 173206 - RNA, 1701 nt, Artificial Sequence; identical to SEQ ID NO: 173137
  derived and/or modified CDS sequence (opt4) from hemagglutinin__InfluenzaA__ALA08682

SEQ ID NO: 173207 - RNA, 1701 nt, Artificial Sequence; identical to SEQ ID NO: 173058
  derived and/or modified CDS sequence (opt4) from hemagglutinin__InfluenzaA__ALA08683

SEQ ID NO: 173208 - RNA, 1701 nt, Artificial Sequence
  derived and/or modified CDS sequence (opt4) from hemagglutinin__InfluenzaA__ALA08684
augaagaccaucaucgcccugagccacauccugugccugguguucgcccagaagauccccggcaacgacaacagcaccgccacccugugccugggccaccacgccgugcccaacggcaccaucgugaagaccaucaccaacgacagaaucgaggugaccaacgccaccgagcuggugcagaacagcagcaucggcgagaucugcgacagcccccaccagauccuggacggcgagaacugcacccugaucgacgcccugcugggcgacccccagugcgacggcuuccagaacaagaagugggaccuguucguggagagaagcaaggccuacagcaacugcuaccccuacgacgugcccgacuacgccagccugagaagccugguggccagcagcggcacccuggaguucaacaacgagagcuucaacuggaccggcgugacccagaacggcaccagcagcgccugcaucagaagaagcagcagcagcuucuucagcagacugaacuggcugacccaccugaacuacaaguaccccgcccugaacgugaccaugcccaacaacgagcaguucgacaagcuguacaucuggggcgugcaccaccccggcaccgacaaggaccagaucuuccuguacgcccagagcagcggcagaaucaccgugagcaccaagggcagccagcaggccgugauccccaacaucggcagcagacccagaaucagagacauccccagcagaaucagcaucuacuggaccaucgugaagcccggcgacauccugcugaucaacagcaccggcaaccugaucgcccccagaggcuacuucaagaucagaagcggcaagagcagcaucaugagaagcgacgcccccaucggcaagugcaagagcgagugcaucacccccaacggcagcauccccaacgacaagcccuuccagaacgugaacagaaucaccuacggcgccugccccagauacgugaagcacagcacccugaagcuggccaccggcaugagaaacgugcccgagaagcagaccagaggcaucuucggcgccaucgccggcuucaucgagaacggcugggagggcaugguggacggcugguacggcuucagacaccagaacagcgagggcagaggccaggccgccgaccugaagagcacccaggccgccaucgaccagaucaacggcaagcugaacagacugaucggcaagaccaacgagaaguuccaccagaucgagaaggaguucagcgagguggagggcagaauccaggaccuggagaaguacguggaggacaccaagaucgaccuguggagcuacaacgccgagcugcugguggcccuggagaaccagcacaccaucgaccugaccgacagcgagaugaacaagcuguucgagaagaccaagaagcagcugagagagaacgccgaggacaugggcaacggcugcuucaagaucuaccacaagugcgacaacgccugcaucggcagcaucagaaacggcaccuacgaccacaacguguacagagacgaggcccugaacaacagauuccagaucaagggcaucgagcugaagagcggcuacaaggacuggauccuguggaucagcuucgccaucagcugcuuccugcugugcguggcccugcugggcuucaucaugugggccugccagaagggcaacaucagaugcaacaucugcaucuga

SEQ ID NO: 173209 - RNA, 1701 nt, Artificial Sequence; identical to SEQ ID NO: 172501
  derived and/or modified CDS sequence (opt4) from hemagglutinin__InfluenzaA__ALA08686

SEQ ID NO: 173210 - RNA, 1701 nt, Artificial Sequence
  derived and/or modified CDS sequence (opt4) from hemagglutinin__InfluenzaA__ALA08687
augaagaccaucaucgcccugagcuacauccugugccugguguucgcccagaagauccccggcaacgacaacagcaccgccacccugugccugggccaccacgccgugcccaacggcaccaucgugaagaccaucaccaacgacagaaucgaggugaccaacgccaccgagcuggugcagaacagcagcaucggcgagaucugcgacagcccccaccagauccuggacggcgagaacugcacccugaucgacgcccugcugggcgacccccagugcgacggcuuccagaacaagaagugggaccuguucguggagagaagcaaggccuacagcaacugcuaccccuacgacgugcccgacuacgccagccugagaagccugaucgccagcagcggcacccuggaguucaacaacgagagcuucaacuggaccggcgugacccagaacggcaccagcagcgccugcaucagaagaagcagcagcagcuucuucagcagacugaacuggcugacccaccugaacuacaccuaccccgcccugaacgugaccaugcccaacaacgagcaguucgacaagcuguacaucuggggcgugcaccaccccggcaccgacaaggaccagaucuuccuguacgcccagagcagcggcagaaucaccgugagcaccaagagaagccagcaggccgugauccccaacaucggcagcagacccagaaucagagacauccccagcagaaucagcaucuacuggaccaucgugaagcccggcgacauccugcugaucaacagcaccggcaaccugaucgcccccagaggcuacuucaagaucagaagcggcaagagcagcaucaugagaagcgacgcccccaucggcaagugcaagagcgagugcaucacccccaacggcagcauccccaacgacaagcccuuccagaacgugaacagaaucaccuacggcgccugccccagauacgugaagcacagcacccugaagcuggccaccggcaugagaaacgugcccgagaagcagaccagaggcaucuucggcgccaucgccggcuucaucgagaacggcugggagggcaugguggacggcugguacggcuucagacaccagaacagcgagggcagaggccaggccgccgaccugaagagcacccaggccgccaucgaccagaucaacggcaagcugaacagacugaucggcaagaccaacgagaaguuccaccagaucgagaaggaguucagcgagguggagggcagaauccaggaccuggagaaguacguggaggacaccaagaucgaccuguggagcuacaacgccgagcugcugguggcccuggagaaccagcacaccaucgaccugaccgacagcgagaugaacaagcuguucgagaagaccaagaagcagcugagagagaacgccgaggacaugggcaacggcugcuucaagaucuaccacaagugcgacaacgccugcaucggcagcaucagaaacggcaccuacgaccacaacguguacagagacgaggcccugaacaacagauuccagaucaagggcguggagcugaagagcggcuacaaggacuggauccuguggaucagcuucgccaucagcugcuuccugcugugcguggcccugcugggcuucaucaugugggccugccagaagggcaacaucagaugcaacaucugcaucuga

SEQ ID NO: 173211 - RNA, 1701 nt, Artificial Sequence; identical to SEQ ID NO: 173152
  derived and/or modified CDS sequence (opt4) from hemagglutinin__InfluenzaA__ALA08688

SEQ ID NO: 173212 - RNA, 1701 nt, Artificial Sequence; identical to SEQ ID NO: 172501
  derived and/or modified CDS sequence (opt4) from hemagglutinin__InfluenzaA__ALE31612

SEQ ID NO: 173213 - RNA, 1701 nt, Artificial Sequence
  derived and/or modified CDS sequence (opt4) from hemagglutinin__InfluenzaA__ALE31613
augaagaccaucaucgcccugagcuacauccugugccugguguucgcccagaagauccccggcaacgacaacagcaccgccacccugugccugggccaccacgccgugcccaacggcaccaucgugaagaccaucaccaacgacagaaucgaggugaccaacgccaccgagcuggugcagaacagcagcaucggcgagaucugcgacagcccccaccagauccuggacggcgagaacugcacccugaucgacgcccugcugggcgacccccagugcgacggcuuccagaacaagaagugggaccuguucguggagagaagcaaggccuacagcaacugcuaccccuacgacgugcccgacuacgccagccugagaagccugguggccagcagcggcacccuggaguucaacaacgagagcuucaacuggaccggcgugacccagaacggcaccagcagcgccugcaucagaagaagcagcagcagcuucuucagcagacugaacuggcugacccaccugaacuacaccuaccccgcccugaacgugaccaugcccaacaacgagcaguucgacaagcuguacaucuggggcgugcaccaccccggcaccgacaaggaccagaucuuccuguacgcccagagcagcggcagaaucaccgugagcaccaagggcagccagcaggccgugauccccaacaucggcagcagacccagaaucagagacauccccagcagaaucagcaucuacuggaccaucgugaagcccggcgacauccugcugaucagcagcaccggcaaccugaucgcccccagaggcuacuucaagaucagaagcggcaagagcagcaucaugagaagcgacgcccccaucggcaagugcaagagcgagugcaucacccccaacggcagcauccccaacgacaagcccuuccagaacgugaacagaaucaccuacggcgccugccccagauacgugaagcacagcacccugaagcuggccaccggcaugagaaacgugcccgagaagcagaccagaggcaucuucggcgccaucgccggcuucaucgagaacggcugggagggcaugguggacggcugguacggcuucagacaccagaacagcgagggcagaggccaggccgccgaccugaagagcacccaggccgccaucgaccagaucaacggcaagcugaacagacugaucggcaagaccaacgagaaguuccaccagaucgagaaggaguucagcgagguggagggcagaauccaggaccuggagaaguacguggaggacaccaagaucgaccuguggagcuacaacgccgagcugcugguggcccuggagaaccagcacaccaucgaccugaccgacagcgagaugaacaagcuguucgagaagaccaagaagcagcugagagagaacgccgaggacaugggcaacggcugcuucaagaucuaccacaagugcgacaacgccugcaucggcagcaucagaaacggcaccuacgaccacaacguguacagagacgaggcccugaacaacagauuccagaucaagggcguggagcugaagagcggcuacaaggacuggauccuguggaucagcuucgccaucagcugccugcugcugugcguggcccugcugggcuucaucaugugggccugccagaagggcaacaucagaugcaacaucugcaucuga

SEQ ID NO: 173214 - RNA, 1701 nt, Artificial Sequence
  derived and/or modified CDS sequence (opt4) from hemagglutinin__InfluenzaA__ALE31614
augaagaccaucaucgcccugagcuacauccugugccugguguucgcccagaagauccccggcaacgacaacagcaccgccacccugugccugggccaccacgccgugcccaacggcaccaucgugaagaccaucaccaacgacagaaucgaggugaccaacgccaccgagcuggugcagaacagcagcaucggcaagaucugcgacagcccccaccagauccuggacggcgagaacugcacccugaucgacgcccugcugggcgacccccagugcgacggcuuccagaacaagaagugggaccuguucguggagagaagcaaggccuacagcaacugcuaccccuacgacgugcccgacuacgccagccugagaagccugguggccagcagcggcacccuggaguucaacaacgagagcuucaacuggaccggcgugacccagaacggcaccagcagcgccugcaucagaagaagcagcagcagcuucuucagcagacugaacuggcugacccaccugaacuacaccuaccccgcccugaacgugaccaugcccaacaacgagcaguucgacaagcuguacaucuggggcgugcaccaccccggcaccgacaaggaccagaucuuccuguacgcccagagcagcggcagaaucaccgugagcaccaagagaagccagcaggccgugauccccaacaucggcagcagacccagaaucagagacauccccagcagaaucagcaucuacuggaccaucgugaagcccggcgacauccugcugaucaacagcaccggcaaccugaucgcccccagaggcuacuucaagaucagaagcggcaagagcagcaucaugagaagcgacgcccccaucggcaagugcaagagcgagugcaucacccccaacggcagcauccccaacgacaagcccuuccagaacgugaacagaaucaccuacggcgccugccccagauacgugaagcacagcacccugaagcuggccaccggcaugagaaacgugcccgagaagcagaccagaggcaucuucggcgccaucgccggcuucaucgagaacggcugggagggcaugguggacggcugguacggcuucagacaccagaacagcgagggcagaggccaggccgccgaccugaagagcacccaggccgccaucgaccagaucaacggcaagcugaacagacugaucggcaagaccaacgagaaguuccaccagaucgagaaggaguucagcgagguggagggcagaauccaggaccuggagaaguacguggaggacaccaagaucgaccuguggagcuacaacgccgagcugcugguggcccuggagaaccagcacaccaucgaccugaccgacagcgagaugaacaagcuguucgagaagaccaagaagcagcugagagagaacgccgaggacaugggcaacggcugcuucaagaucuaccacaagugcgacaacgccugcaucggcagcaucagaaacggcaccuacgaccacaacguguacagagacgaggcccugaacaacagauuccagaucaagggcguggagcugaagagcggcuacaaggacuggauccuguggaucagcuucgccaucagcugcuuccugcugugcguggcccugcugggcuucaucaugugggccugccagaagggcaacaucagaugcaacaucugcaucuga

SEQ ID NO: 173215 - RNA, 1701 nt, Artificial Sequence
  derived and/or modified CDS sequence (opt4) from hemagglutinin__InfluenzaA__ALE31615
augaagaccaucaucgcccugagcuacauccugugccugguguucgcccagaagcugcccggcaacgacaacagcaccgccacccugugccugggccaccacgccgugcccaacggcaccaucgugaagaccaucaccaacgacagaaucgaggugaccaacgccaccgagcuggugcagaacagcagcaucggcgagaucugcgacagcccccaccagauccuggacggcgagaacugcacccugaucgacgcccugcugggcgacccccagugcgacggcuuccagaacaagaagugggaccuguucguggagagaagcaaggccuacagcaacugcuaccccuacgacgugcccgacuacgccagccugagaagccugguggccagcagcggcacccuggaguucaacaacgagagcuucaacugggccggcgugacccagaacggcaccagcagcgccugcaucagaggcagcaacagcagcuucuucagcagacugaacuggcugacccaccugaacuucaaguaccccgcccugaacgugaccaugcccaacaacgagcaguucgacaagcuguacaucuggggcgugcaccaccccggcaccgacaaggaccagaucuuccuguacgcccagagcagcggcagaaucaccgugagcaccaagagaagccagcaggccgugauccccaacaucggcagcagacccagaaucagaaacauccccagcagaaucagcaucuacuggaccaucgugaagcccggcgacauccugcugaucaacagcaccggcaaccugaucgcccccagaggcuacuucaagaucagaagcggcaagagcagcaucaugagaagcgacgcccccaucggcaagugcaagagcgagugcaucacccccaacggcagcauccccaacgacaagcccuuccagaacgugaacagaaucaccuacggcgccugccccagauacgugaagcagagcacccugaagcuggccaccggcaugagaaacgugcccgagaagcagaccagaggcaucuucggcgccaucgccggcuucaucgagaacggcugggagggcaugguggacggcugguacggcuucagacaccagaacagcgagggcagaggccaggccgccgaccugaagagcacccaggccgccaucgaccagaucaacggcaagcugaacagacugaucggcaagaccaacgagaaguuccaccagaucgagaaggaguucagcgagguggagggcagaauccaggaccuggagaaguacguggaggacaccaagaucgaccuguggagcuacaacgccgagcugcugguggcccuggagaaccagcacaccaucgaccugaccgacagcgagaugaacaagcuguucgagaagaccaagaagcagcugagagagaacgccgaggacaugggcaacggcugcuucaagaucuaccacaagugcgacaacgccugcaucgagagcaucagaaacggcaccuacgaccacgacguguacagagacgaggcccugaacaacagauuccagaucaagggcguggagcugaagagcggcuacaaggacuggauccuguggaucagcuucgccaucagcugcuuccugcugugcguggcccugcugggcuucaucaugugggccugccagaagggcaacaucagaugcaacaucugcaucuga

SEQ ID NO: 173216 - RNA, 1701 nt, Artificial Sequence; identical to SEQ ID NO: 172501
  derived and/or modified CDS sequence (opt4) from hemagglutinin__InfluenzaA__ALE31616

SEQ ID NO: 173217 - RNA, 1701 nt, Artificial Sequence; identical to SEQ ID NO: 172501
  derived and/or modified CDS sequence (opt4) from hemagglutinin__InfluenzaA__ALE31617

SEQ ID NO: 173218 - RNA, 1701 nt, Artificial Sequence; identical to SEQ ID NO: 172501
  derived and/or modified CDS sequence (opt4) from hemagglutinin__InfluenzaA__ALE31618

SEQ ID NO: 173219 - RNA, 1701 nt, Artificial Sequence; identical to SEQ ID NO: 173159
  derived and/or modified CDS sequence (opt4) from hemagglutinin__InfluenzaA__ALE31619

SEQ ID NO: 173220 - RNA, 1701 nt, Artificial Sequence; identical to SEQ ID NO: 172501
  derived and/or modified CDS sequence (opt4) from hemagglutinin__InfluenzaA__ALE31620

SEQ ID NO: 173221 - RNA, 1701 nt, Artificial Sequence
  derived and/or modified CDS sequence (opt4) from hemagglutinin__InfluenzaA__ALE31622
augaagaccaucaucgcccugagcuacauccugugccugguguucgcccagaagauccccggcaacgacaacagcaccgccacccugugccugggccaccacgccgugcccaacggcaccaucgugaagaccaucaccaacgacagaaucgaggugaccaacgccaccgagcuggugcagaacagcagcaucggcgagaucugcgacagcccccaccagauccuggacggcgagaacugcacccugaucgacgcccugcugggcgacccccagugcgacggcuuccagaacaagaagugggaccuguucguggagagaagcaaggccuacagcaacugcuaccccuacgacgugcccgacuacgccagccugagaagccugguggccagcagcggcacccuggaguucaacaacgagagcuucaacuggaccggcgugacccagaacggcaccagcagcgccugcaucagaagaagcagcagcagcuucuucagcagacugaacuggcugacccaccugaacuacaccuaccccgcccugaacgugaccaugcccaacaacgagcaguucgacaagcuguacaucuggggcgugcaccaccccggcaccgacaaggaccagaucuuccuguacgcccagagcagcggcagaaucaccgugagcaccaagagaagccagcaggccgugauccccaacaucggcagcagacccagaaucagagacauccccagcagaaucagcaucuacuggaccaucgugaagcccggcgacauccugcugaucaacagcaccggcaaccugaucgcccccagaggcuacuucaagaucagaagcggcaagagcagcaucaugagaagcgacgugcccaucggcaagugcaagagcgagugcaucacccccaacggcagcauccccaacgacaagcccuuccagaacgugaacagaaucaccuacggcgccugccccagauacgugaagcacagcacccugaagcuggccaccggcaugagaaacgugcccgagaagcagaccagaggcaucuucggcgccaucgccggcuucaucgagaacggcugggagggcaugguggacggcugguacggcuucagacaccagaacagcgagggcagaggccaggccgccgaccugaagagcacccaggccgccaucgaccagaucaacggcaagcugaacagacugaucggcaagaccaacgagaaguuccaccagaucgagaaggaguucagcgagguggagggcagaauccaggaccuggagaaguacguggaggacaccaagaucgaccuguggagcuacaacgccgagcugcugguggcccuggagaaccagcacaccaucgaccugaccgacagcgagaugaacaagcuguucgagaagaccaagaagcagcugagagagaacgccgaggacaugggcaacggcugcuucaagaucuaccacaagugcgacaacgccugcaucggcagcaucagaaacggcaccuacgaccacaacguguacagagacgaggcccugaacaacagauuccagaucaagggcguggagcugaagagcggcuacaaggacuggauccuguggaucagcuucgccaucagcugcuuccugcugugcguggcccugcugggcuucaucaugugggccugccagaagggcaacaucagaugcaacaucugcaucuga

SEQ ID NO: 173222 - RNA, 1701 nt, Artificial Sequence; identical to SEQ ID NO: 172501
  derived and/or modified CDS sequence (opt4) from hemagglutinin__InfluenzaA__ALE31623

SEQ ID NO: 173223 - RNA, 1701 nt, Artificial Sequence; identical to SEQ ID NO: 172501
  derived and/or modified CDS sequence (opt4) from hemagglutinin__InfluenzaA__ALE31625

SEQ ID NO: 173224 - RNA, 1701 nt, Artificial Sequence; identical to SEQ ID NO: 172501
  derived and/or modified CDS sequence (opt4) from hemagglutinin__InfluenzaA__ALE31626

SEQ ID NO: 173225 - RNA, 1701 nt, Artificial Sequence; identical to SEQ ID NO: 172501
  derived and/or modified CDS sequence (opt4) from hemagglutinin__InfluenzaA__ALE31627

SEQ ID NO: 173226 - RNA, 1701 nt, Artificial Sequence; identical to SEQ ID NO: 172501
  derived and/or modified CDS sequence (opt4) from hemagglutinin__InfluenzaA__ALE31628

SEQ ID NO: 173227 - RNA, 1701 nt, Artificial Sequence; identical to SEQ ID NO: 172501
  derived and/or modified CDS sequence (opt4) from hemagglutinin__InfluenzaA__ALE31629

SEQ ID NO: 173228 - RNA, 1701 nt, Artificial Sequence; identical to SEQ ID NO: 172501
  derived and/or modified CDS sequence (opt4) from hemagglutinin__InfluenzaA__ALE31632

SEQ ID NO: 173229 - RNA, 1701 nt, Artificial Sequence
  derived and/or modified CDS sequence (opt4) from hemagglutinin__InfluenzaA__ALE31634
augaagaccaucaucgcccugagcuacauccugugccuggugcuggcccagaagauccccggcaacgacaacagcaccgccacccugugccugggccaccacgccgugcccaacggcaccaucgugaagaccaucaccaacgacagaaucgaggugaccaacgccaccgagcuggugcagaacagcagcaucggcgagaucugcgacagcccccaccagauccuggacggcgagaacugcacccugaucgacgcccugcugggcgacccccagugcgacggcuuccagaacaagaagugggaccuguucguggagagaagcaaggccuacagcaacugcuaccccuacgacgugcccgacuacgccagccugagaagccugguggccagcagcggcacccuggaguucaacaacgagagcuucaacuggaccggcgugacccagaacggcaccagcagcgccugcaucagaagaagcagcagcagcuucuucagcagacugaacuggcugacccaccugaacuacaccuaccccgcccugaacgugaccaugcccaacaacgagcaguucgacaagcuguacaucuggggcgugcaccaccccggcaccgacaaggaccagaucuuccuguacgcccagagcagcggcagaaucaccgugagcaccaagagaagccagcaggccgugauccccaacaucggcagcagacccagaaucagagacauccccagcagaaucagcaucuacuggaccaucgugaagcccggcgacauccugcugaucaacagcaccggcaaccugaucgcccccagaggcuacuucaagaucagaagcggcaagagcagcaucaugagaagcgacgcccccaucggcaagugcaagagcgagugcaucacccccaacggcagcauccccaacgacaagcccuuccagaacgugaacagaaucaccuacggcgccugccccagauacgugaagcacagcacccugaagcuggccaccggcaugagaaacgugcccgagaagcagaccagaggcaucuucggcgccaucgccggcuucaucgagaacggcugggagggcaugguggacggcugguacggcuucagacaccagaacagcgagggcagaggccaggccgccgaccugaagagcacccaggccgccaucgaccagaucaacggcaagcugaacagacugaucggcaagaccaacgagaaguuccaccagaucgagaaggaguucagcgagguggagggcagaauccaggaccuggagaaguacguggaggacaccaagaucgaccuguggagcuacaacgccgagcugcugguggcccuggagaaccagcacaccaucgaccugaccgacagcgagaugaacaagcuguucgagaagaccaagaagcagcugagagagaacgccgaggacaugggcaacggcugcuucaagaucuaccacaagugcgacaacgccugcaucggcagcaucagaaacggcaccuacgaccacaacguguacagagacgaggcccugaacaacagauuccagaucaagggcguggagcugaagagcggcuacaaggacuggauccuguggaucagcuucgccaucagcugcuuccugcugugcguggcccugcugggcuucaucaugugggccugccagaagggcaacaucagaugcaacaucugcaucuga

SEQ ID NO: 173230 - RNA, 1701 nt, Artificial Sequence; identical to SEQ ID NO: 172501
  derived and/or modified CDS sequence (opt4) from hemagglutinin__InfluenzaA__ALE31635

SEQ ID NO: 173231 - RNA, 1701 nt, Artificial Sequence; identical to SEQ ID NO: 172501
  derived and/or modified CDS sequence (opt4) from hemagglutinin__InfluenzaA__ALE31636

SEQ ID NO: 173232 - RNA, 1701 nt, Artificial Sequence
  derived and/or modified CDS sequence (opt4) from hemagglutinin__InfluenzaA__ALE31638
augaagaccaucaucgcccugagcuacauccugugccugguguucgcccagaagauccccggcaacgacaacagcaccgccacccugugccugggccaccacgccgugcccaacggcaccaucgugaagaccaucaccaacgacagaaucgaggugaccaacgccaccgagcuggugcagaacagcagcaucggcgagaucugcgacagcccccaccagauccuggacggcgagaacugcacccugaucgacgcccugcugggcgacccccagugcgacggcuuccagaacaagaagugggaccuguucguggagagaagcaaggccuacagcaacugcuaccccuacgacgugcccgacuacgccagccugagaagccugguggccagcagcggcacccuggaguucaacaacgagagcuucaacuggaccggcgugacccagaacggcaccagcagcgccugcaucagaagaagcagcagcagcuucuucagcagacugaacuggcugacccaccugaacuacaccuaccccgcccugaacgugaccaugcccaacaacgagcaguucgacaagcuguacaucuggggcgugcaccaccccggcaccgacaaggaccagaucuuccuguacgcccagagcagcggcagaaucaccgugagcaccaagagaagccagcaggccgugauccccaacaucggcagcagacccagaaucagagacauccccagcagaaucagcaucuacuggaccaucgugaagcccggcgacauccugcugaucaacagcaccggcaaccugaucgcccccagaggcuacuucaagaucagaagcggcaagagcagcaucaugagaagcgacgcccccaucggcaagugcaagagcgagugcaucacccccaacggcagcauccccaacggcaagcccuuccagaacgugaacagaaucaccuacggcgccugccccagauacgugaagcacagcacccugaagcuggccaccggcaugagaaacgugcccgagaagcagaccagaggcaucuucggcgccaucgccggcuucaucgagaacggcugggagggcaugguggacggcugguacggcuucagacaccagaacagcgagggcagaggccaggccgccgaccugaagagcacccaggccgccaucgaccagaucaacggcaagcugaacagacugaucggcaagaccaacgagaaguuccaccagaucgagaaggaguucagcgagguggagggcagaauccaggaccuggagaaguacguggaggacaccaagaucgaccuguggagcuacaacgccgagcugcugguggcccuggagaaccagcacaccaucgaccugaccgacagcgagaugaacaagcuguucgagaagaccaagaagcagcugagagagaacgccgaggacaugggcaacggcugcuucaagaucuaccacaagugcgacaacgccugcaucggcagcaucagaaacggcaccuacgaccacaacguguacagagacgaggcccugaacaacagauuccagaucaagggcguggagcugaagagcggcuacaaggacuggauccuguggaucagcuucgccaucagcugcuuccugcugugcguggcccugcugggcuucaucaugugggccugccagaagggcaacaucagaugcaacaucugcaucuga

SEQ ID NO: 173233 - RNA, 1701 nt, Artificial Sequence; identical to SEQ ID NO: 172501
  derived and/or modified CDS sequence (opt4) from hemagglutinin__InfluenzaA__ALE31639

SEQ ID NO: 173234 - RNA, 1701 nt, Artificial Sequence; identical to SEQ ID NO: 173052
  derived and/or modified CDS sequence (opt4) from hemagglutinin__InfluenzaA__ALE31640

SEQ ID NO: 173235 - RNA, 1701 nt, Artificial Sequence; identical to SEQ ID NO: 173058
  derived and/or modified CDS sequence (opt4) from hemagglutinin__InfluenzaA__ALE31641

SEQ ID NO: 173236 - RNA, 1701 nt, Artificial Sequence; identical to SEQ ID NO: 173058
  derived and/or modified CDS sequence (opt4) from hemagglutinin__InfluenzaA__ALE31642

SEQ ID NO: 173237 - RNA, 1701 nt, Artificial Sequence
  derived and/or modified CDS sequence (opt4) from hemagglutinin__InfluenzaA__ALE31643
augaagaccaucaucgcccugagcuacauccugugccugguguucgcccagaagcugcccgagaacgacaacagcaccgccacccugugccugggccaccacgccgugcccaacggcaccaucgugaagaccaucaccagcgacagaaucgaggugaccaacgccaccgagcuggugcagaacagcagcaucggcgagaucugcgacagcccccaccagauccuggacggcaagaacugcacccugaucgacgcccugcugggcgacccccagugcgacggcuuccagaacaagaagugggaccuguucguggagagaagcaccgccuacagcaacugcuaccccuacgacgugcccgacuacgccagccugagaagccugguggccagcagcggcacccuggaguucaacgacgagagcuucaacugggccggcgugacccagaacggcaccagcagcgccugcaucagaggcagcaacagcagcuucuucagcagacugaacuggcugacccacagcaacuucaaguaccccgcccugaacgugaccaugcccaacaacgagcaguucgacaagcuguacaucuggggcgugcaccaccccggcaccgacaaggaccagaucuuccuguacgcccagagcagcggcagaaucaccgugagcaccaagagaagccagcaggccgugauccccaacaucggcagcagacccagaaucagaaacauccccagcagaaucagcaucuacuggaccaucgugaagcccggcgacauccugcugaucaacagcaccggcaaccugaucgcccccagaggcuacuucaagaucagaagcggcaagagcagcaucaugagaagcgacgcccccaucggcaagugcaagagcgagugcaucacccccaacggcagcauccccaacgacaagcccuuccagaacgugaacagaaucaccuacggcgccugccccagauacgugaagcagagcacccugaagcuggccaccggcaugagaaacgugcccgagaagcagaccagaggcaucuucggcgccaucgccggcuucaucgagaacggcugggagggcaugaaggacggcugguacggcuucagacaccagaacagcgagggcagaggccaggccgccgaccugaagagcacccaggccgccaucgaccagaucaacggcaagcugaacagacugaucggcaagaccaacgagaaguuccaccagaucgagaaggaguucagcgagguggagggcagaauccaggaccuggagaaguacguggaggacaccaagaucgaccuguggagcuacaacgccgagcugcugguggcccuggagaaccagcacaccaucgaccugaccgacagcgagaugaacaagcuguucgagaagaccaagaagcagcugagagagaacgccgaggacaugggcaacggcugcuucaagaucuaccacaagugcgacaacgccugcaucggcagcaucagaaacggcaccuacgaccacgacguguacagagacgaggcccugaacaacagauuccagaucaagggcguggagcugaagagcggcuacaaggacuggauccuguggaucagcuucgccaucagcugcuuccugcugugcguggcccugcugggcuucaucaugugggccugccagaagggcaacaucagaugcaacaucugcaucuga

SEQ ID NO: 173238 - RNA, 1701 nt, Artificial Sequence; identical to SEQ ID NO: 172501
  derived and/or modified CDS sequence (opt4) from hemagglutinin__InfluenzaA__ALE31644

SEQ ID NO: 173239 - RNA, 1701 nt, Artificial Sequence; identical to SEQ ID NO: 172501
  derived and/or modified CDS sequence (opt4) from hemagglutinin__InfluenzaA__ALE31645

SEQ ID NO: 173240 - RNA, 1701 nt, Artificial Sequence; identical to SEQ ID NO: 172501
  derived and/or modified CDS sequence (opt4) from hemagglutinin__InfluenzaA__ALE31646

SEQ ID NO: 173241 - RNA, 1701 nt, Artificial Sequence; identical to SEQ ID NO: 173058
  derived and/or modified CDS sequence (opt4) from hemagglutinin__InfluenzaA__ALE31647

SEQ ID NO: 173242 - RNA, 1701 nt, Artificial Sequence
  derived and/or modified CDS sequence (opt4) from hemagglutinin__InfluenzaA__ALE31648
augaagaccaucaucgcccugagcuacauccugugccugguguucgcccagaagauccccggcaacgacaacagcaccgccacccugugccugggccaccacgccgugcccaacggcaccaucgugaagaccaucaccaacgacagaaucgaggugaccaacgccaccgagcuggugcagaacagcagcaucggcgagaucugcgacagcccccaccagauccuggacggcgagaacugcacccugaucgacgcccugcugggcgacccccagugcgacggcuuccagaacaagaagugggaccuguucguggagagaagcaaggccuacagcaacugcuaccccuacgacgugcccgacuacgccagccugagaagccugguggccagcagcggcacccuggaguucaacaacgagagcuucaacuggaccggcgugacccagaacggcaccagcagcgccugcaucagaagaagcagcagcagcuucuucagcagacugaacuggcugacccaccugaacuacaccuaccccgcccugaacgugaccaugcccaacaacgagcaguucgacaagcuguacaucuggggcgugcaccaccccggcaccgacaaggaccagaucuuccuguacgcccagcccagcggcagaaucaccgugagcaccaagagaagccagcaggccgugauccccaacaucggcagcagacccagaaucagagacauccccagcagaaucagcaucuacuggaccaucgugaagcccggcgacauccugcugaucaacagcaccggcaaccugaucgcccccagaggcuacuucaagaucagaagcggcaagagcagcaucaugagaagcgacgcccccaucggcaagugcaagagcgagugcaucacccccaacggcagcauccccaacgacaagcccuuccagaacgugaacagaaucaccuacggcgccugccccagauacgugaagcacagcacccugaagcuggccaccggcaugagaaacgugcccgagaagcagaccagaggcaucuucggcgccaucgccggcuucaucgagaacggcugggagggcaugguggacggcugguacggcuucagacaccagaacagcgagggcagaggccaggccgccgaccugaagagcacccaggccgccaccgaccagaucaacggcaagcugaacagacugaucggcaagaccaacgagaaguuccaccagaucgagaaggaguucagcgagguggagggcagaauccaggaccuggagaaguacguggaggacaccaagaucgaccuguggagcuacaacgccgagcugcugguggcccuggagaaccagcacaccaucgaccugaccgacagcgagaugaacaagcuguucgagaagaccaagaagcagcugagagagaacgccgaggacaugggcaacggcugcuucaagaucuaccacaagugcgacaacgccugcaucggcagcaucagaaacggcaccuacgaccacaacguguacagagacgaggcccugaacaacagauuccagaucaagggcguggagcugaagagcggcuacaaggacuggauccuguggaucagcuucgccaucagcugcuuccugcugugcguggcccugcugggcuucaucaugugggccugccagaagggcaacaucagaugcaacaucugcaucuga

SEQ ID NO: 173243 - RNA, 1701 nt, Artificial Sequence; identical to SEQ ID NO: 172501
  derived and/or modified CDS sequence (opt4) from hemagglutinin__InfluenzaA__ALE31649

SEQ ID NO: 173244 - RNA, 1701 nt, Artificial Sequence; identical to SEQ ID NO: 173058
  derived and/or modified CDS sequence (opt4) from hemagglutinin__InfluenzaA__ALE31650

SEQ ID NO: 173245 - RNA, 1701 nt, Artificial Sequence
  derived and/or modified CDS sequence (opt4) from hemagglutinin__InfluenzaA__ALE31652
augaagaccaucaucgcccugagcuacauccugugccugguguucgcccagaagauccccggcaacgacaacagcaccgccacccugugccugggccaccacgccgugcccaacggcaccaucgugaagaccaucaccaacgacagaaucgaggugaccaacgccaccgagcuggugcagaacagcagcaucggcgagaucugcgacagcccccaccagauccuggacggcgagaacugcacccugaucgacgcccugcugggcgacccccagugcgacggcuuccagaacaagaagugggaccuguucguggagagaagcaaggccuacagcaacugcuaccccuacgacgugcccgacuacgccagccugagaagccugguggccagcagcggcacccuggaguucaacaacgagagcuucaacuggaccggcgugacccagaacggcaccagcagcgccugcaucagaagaagcagcagcagcuucuucagcagacugaacuggcugacccaccugaacuacaaguaccccgcccugaacgugaccaugcccaacaacgagcaguucgacaagcuguacaucuggggcgugcaccaccccggcaccgacaaggaccagaucagccuguacgcccagagcagcggcagaaucaccgugagcaccaagagaagccagcaggccgugauccccaacaucggcagcagacccagaaucagagacauccccagcagaaucagcaucuacuggaccaucgugaagcccggcgacauccugcugaucaacagcaccggcaaccugaucgcccccagaggcuacuucaagaucagaagcggcaagagcagcaucaugagaagcgacgcccccaucggcaagugcaagagcgagugcaucacccccaacggcagcauccccaacgacaagcccuuccagaacgugaacagaaucaccuacggcgccugccccagauacgugaagcacagcacccugaagcuggccaccggcaugagaaacgugcccgagaagcagaccagaggcaucuucggcgccaucgccggcuucaucgagaacggcugggagggcaugguggacggcugguacggcuucagacaccagaacagcgagggcagaggccaggccgccgaccugaagagcacccaggccgccaucgaccagaucaacggcaagcugaacagacugaucggcaagaccaacgagaaguuccaccagaucgagaaggaguucagcgagguggagggcagaauccaggaccuggagaaguacguggaggacaccaagaucgaccuguggagcuacaacgccgagcugcugguggcccuggagaaccagcacaccaucgaccugaccgacagcgagaugaacaagcuguucgagaagaccaagaagcagcugagagagaacgccgaggacaugggcaacggcugcuucaagaucuaccacaagugcgacaacgccugcaucggcagcaucagaaacggcaccuacgaccacaacguguacagagacgaggcccugaacaacagauuccagaucaagggcguggagcugaagagcggcuacaaggacuggauccuguggaucagcuucgccaucagcugcuuccugcugugcguggcccugcugggcuucaucaugugggccugccagaagggcaacaucagaugcaacaucugcaucuga

SEQ ID NO: 173246 - RNA, 1701 nt, Artificial Sequence; identical to SEQ ID NO: 173152
  derived and/or modified CDS sequence (opt4) from hemagglutinin__InfluenzaA__ALE31653

SEQ ID NO: 173247 - RNA, 1701 nt, Artificial Sequence; identical to SEQ ID NO: 172501
  derived and/or modified CDS sequence (opt4) from hemagglutinin__InfluenzaA__ALE31654

SEQ ID NO: 173248 - RNA, 1701 nt, Artificial Sequence; identical to SEQ ID NO: 172501
  derived and/or modified CDS sequence (opt4) from hemagglutinin__InfluenzaA__ALE31655

SEQ ID NO: 173249 - RNA, 1701 nt, Artificial Sequence
  derived and/or modified CDS sequence (opt4) from hemagglutinin__InfluenzaA__ALE31656
augaagaccaucaucgcccugagcuacauccugugccugguguucgcccagaagauccccggcaacgacaacagcaccgccacccugugccugggccaccacgccgugcccaacggcaccaucgugaagaccaucaccaacgacagaaucgaggugaccaacgccaccgagcuggugcagaacagcagcaucggcgagaucugcgacagcccccaccagauccuggacggcgagaacugcacccugaucgacgcccugcugggcgacccccagugcgacggcuuccagaacaagaagugggacaucuucguggagagaagcaaggccuacagcaacugcuaccccuacgacgugcccgacuacgccagccugagaagccugguggccagcagcggcacccuggaguucaacaacgagagcuucaacuggaccggcgugacccagaacggcaccagcagcgccugcaucagaagaagcagcagcagcuucuucagcagacugaacuggcugacccaccugaacuacaccuaccccgcccugaacgugaccaugcccaacaacgagcaguucgacaagcuguacaucuggggcgugcaccaccccggcaccgacaaggaccagaucuuccuguacgcccagagcagcggcagaaucaccgugagcaccaagagaagccagcaggccgugauccccaacaucggcagcagacccagaaucagagacauccccagcagaaucagcaucuacuggaccaucgugaagcccggcgacauccugcugaucaacagcaccggcaaccugaucgcccccagaggcuacuucaagaucagaagcggcaagagcagcaucaugagaagcgacgcccccaucggcaagugcaagagcgagugcaucacccccaacggcagcauccccaacgacaagcccuuccagaacgugaacagaaucaccuacggcgccugccccagauacgugaagcacagcacccugaagcuggccaccggcaugagaaacgugcccgagaagcagaccagaggcaucuucggcgccaucgccggcuucaucgagaacggcugggagggcaugauggacggcugguacggcuucagacaccagaacagcgagggcagaggccaggccgccgaccugaagagcacccaggccgccaucgaccagaucaacggcaagcugaacagacugaucggcaagaccaacgagaaguuccaccagaucgagaaggaguucagcgagguggagggcagaauccaggaccuggagaaguacguggaggacaccaagaucgaccuguggagcuacaacgccgagcugcugguggcccuggagaaccagcacaccaucgaccugaccgacagcgagaugaacaagcuguucgagaagaccaagaagcagcugagagagaacgccgaggacaugggcaacggcugcuucaagaucuaccacaagugcgacaacgccugcaucggcagcaucagaaacggcaccuacgaccacaacguguacagagacgaggcccugaacaacagauuccagaucaagggcguggagcugaagagcggcuacaaggacuggauccuguggaucagcuucgccaucagcugcuuccugcugugcguggcccugcugggcuucaucaugugggccugccagaagggcaacaucagaugcaacaucugcaucuga

SEQ ID NO: 173250 - RNA, 1701 nt, Artificial Sequence
  derived and/or modified CDS sequence (opt4) from hemagglutinin__InfluenzaA__ALE31657
augaagaccaucaucgcccugagcuacauccugugccuggugagcgcccagaagauccccggcaacgacaacagcaccgccacccugugccugggccaccacgccgugcccaacggcaccaucgugaagaccaucaccaacgacagaaucgaggugaccaacgccaccgagcuggugcagaacagcagcaucggcgagaucugcgacagcccccaccagauccuggacggcgagaacugcacccugaucgacgcccugcugggcgacccccagugcgacggcuuccagaacaagaagugggaccuguucguggagagaagcaaggccuacagcaacugcuaccccuacgacgugcccgacuacgccagccugagaagccugguggccagcagcggcacccuggaguucaacaacgagagcuucaacuggaccggcgugacccagaacggcaccagcagcgccugcaucagaagaagcagcagcagcuucuucagcagacugaacuggcugacccaccugaacuacaccuaccccgcccugaacgugaccaugcccaacaacgagcaguucgacaagcuguacaucuggggcgugcaccaccccggcaccgacaaggaccagaucuuccuguacgcccagagcagcggcagaaucaccgugagcaccaagagaagccagcaggccgugauccccaacaucggcagcagacccagaaucagagacauccccagcagaaucagcaucuacuggaccaucgugaagcccggcgacauccugcugaucaacagcaccggcaaccugaucgcccccagaggcuacuucaagaucagaagcggcaagagcagcaucaugagaagcgacgcccccaucggcaagugcaagagcgagugcaucacccccaacggcagcauccccaacgacaagcccuuccagaacgugaacagaaucaccuacggcgccugccccagauacgugaagcacagcacccugaagcuggccaccggcaugagaaacgugcccgagaagcagaccagaggcaucuucggcgccaucgccggcuucaucgagaacggcugggagggcaugguggacggcugguacggcuucagacaccagaacagcgagggcagaggccaggccgccgaccugaagagcacccaggccgccaucgaccagaucaacggcaagcugaacagacugaucggcaagaccaacgagaaguuccaccagaucgagaaggaguucagcgagguggagggcagaauccaggaccuggagaaguacguggaggacaccaagaucgaccuguggagcuacaacgccgagcugcugguggcccuggagaaccagcacaccaucgaccugaccgacagcgagaugaacaagcuguucgagaagaccaagaagcagcugagagagaacgccgaggacaugggcaacggcugcuucaagaucuaccacaagugcgacaacgccugcaucggcagcaucagaaacggcaccuacgaccacaacguguacagagacgaggcccugaacaacagauuccagaucaagggcguggagcugaagagcggcuacaaggacuggauccuguggaucagcuucgccaucagcugcuuccugcugugcguggcccugcugggcuucaucaugugggccugccagaagggcaacaucagaugcaacaucugcaucuga

SEQ ID NO: 173251 - RNA, 1701 nt, Artificial Sequence; identical to SEQ ID NO: 172501
  derived and/or modified CDS sequence (opt4) from hemagglutinin__InfluenzaA__ALE31658

SEQ ID NO: 173252 - RNA, 1701 nt, Artificial Sequence; identical to SEQ ID NO: 173116
  derived and/or modified CDS sequence (opt4) from hemagglutinin__InfluenzaA__ALE31659

SEQ ID NO: 173253 - RNA, 1701 nt, Artificial Sequence; identical to SEQ ID NO: 173045
  derived and/or modified CDS sequence (opt4) from hemagglutinin__InfluenzaA__ALE31660

SEQ ID NO: 173254 - RNA, 1701 nt, Artificial Sequence
  derived and/or modified CDS sequence (opt4) from hemagglutinin__InfluenzaA__ALE31661
augaagaccaucaucgcccugagcuacauccugugccugguguucgcccagaagauccccggcaacgacaacagcaccgccacccugugccugggccaccacgccgugcccaacggcaccaucgugaagaccaucaccaacgacagaaucgaggugaccaacgccaccgagcuggugcagaacagcagcaucggcgagaucugcgacagcccccaccagauccuggacggcgagaacugcacccugaucgacgcccugcugggcgacccccagugcgacggcuuccagaacaagaagugggaccuguucguggagagaagcaaggccuacagcaacugcuaccccuacgacgugcccgacuacgccagccugagaagccugguggccagcagcggcacccuggaguucaacaacgagagcuucaacuggaccggcgugacccagaacggcaccagcagcgccugcaucagaagaagcagcagcagcuucuucagcagacugaacuggcugacccaccugaacuacaccuaccccgcccugaacgugaccaugcccaacaacgagcaguucgacaagcuguacaucuggggcgugcaccaccccggcaccgacaaggaccagaucuuccuguacgcccagagcagcggcagaaucaccgugagcaccaagaagagccagcaggccgugauccccaacaucggcagcagacccagaaucagagacauccccagcagaaucagcaucuacuggaccaucgugaagcccggcgacauccugcugaucaacagcaccggcaaccugaucgcccccagaggcuacuucaagaucagaagcggcaagagcagcaucaugagaagcgacgcccccaucggcaagugcaagagcgagugcaucacccccaacggcagcauccccaacgacaagcccuuccagaacgugaacagaaucaccuacggcgccugccccagauacgugaagcacagcacccugaagcuggccaccggcaugagaaacgugcccgagaagcagaccagaggcaucuucggcgccaucgccggcuucaucgagaacggcugggagggcaugguggacggcugguacggcuucagacaccagaacagcgagggcagaggccaggccgccgaccugaagagcacccaggccgccaucgaccagaucaacggcaagcugaacagacugaucggcaagaccaacgagaaguuccaccagaucgagaaggaguucagcgagguggagggcagaauccaggaccuggagaaguacguggaggacaccaagaucgaccuguggagcuacaacgccgagcugcugguggcccuggagaaccagcacaccaucgaccugaccgacagcgagaugaacaagcuguucgagaagaccaagaagcagcugagagagaacgccgaggacaugggcaacggcugcuucaagaucuaccacaagugcgacaacgccugcaucggcagcaucagaaacggcaccuacgaccacaacguguacagagacgaggcccugaacaacagauuccagaucaagggcguggagcugaagagcggcuacaaggacuggauccuguggaucagcuucgccaucagcugcuuccugcugugcguggcccugcugggcuucaucaugugggccugccagaagggcaacaucagaugcaacaucugcaucuga

SEQ ID NO: 173255 - RNA, 1701 nt, Artificial Sequence
  derived and/or modified CDS sequence (opt4) from hemagglutinin__InfluenzaA__ALE31662
augaagaccaucaucgcccugagcuacauccugugccugguguucgcccagaagauccccggcaacgacaacagcaccgccacccugugccugggccaccacgccgugcccaacggcaccaucgugaagaccaucgccaacgacagaaucgaggugaccaacgccaccgagcuggugcagaacagcagcaucggcgagaucugcgacagcccccaccagauccuggacggcgagaacugcacccugaucgacgcccugcugggcgacccccagugcgacggcuuccagaacaagaagugggaccuguucguggagagaagcaaggccuacagcaacugcuaccccuacgacgugcccgacuacgccagccugagaagccugguggccagcagcggcacccuggaguucaacaacgagagcuucaacuggaccggcgugacccagaacggcaccagcagcgccugcaucagaagaagcagcagcagcuucuucagcagacugaacuggcugacccaccugaacuacaccuaccccgcccugaacgugaccaugcccaacaacgagcaguucgacaagcuguacaucuggggcgugcaccaccccggcaccgacaaggaccagaucuuccuguacgcccagagcagcggcagaaucaccgugagcaccaagggcagccagcaggccgugauccccaacaucggcagcagacccagaaucagagacauccccagcagaaucagcaucuacuggaccaucgugaagcccggcgacauccugcugaucaacagcaccggcaaccugaucgcccccagaggcuacuucaagaucagaagcggcaagagcagcaucaugagaagcgacgcccccaucggcaagugcaagagcgagugcaucacccccaacggcagcauccccaacgacaagcccuuccagaacgugaacagaaucaccuacggcgccugccccagauacgugaagcacagcacccugaagcuggccaccggcaugagaaacgugcccgagaagcagaccagaggcaucuucggcgccaucgccggcuucaucgagaacggcugggagggcaugguggacggcugguacggcuucagacaccagaacagcgagggcagaggccaggccgccgaccugaagagcacccaggccgccaucgaccagaucaacggcaagcugaacagacugaucggcaagaccaacgagaaguuccaccagaucgagaaggaguucagcgagguggagggcagaauccaggaccuggagaaguacguggaggacaccaagaucgaccuguggagcuacaacgccgagcugcugguggcccuggagaaccagcacaccaucgaccugaccgacagcgagaugaacaagcuguucgagaagaccaagaagcagcugagagagaacgccgaggacaugggcaacggcugcuucaagaucuaccacaagugcgacaacgccugcaucggcagcaucagaaacggcaccuacgaccacaacguguacagagacgaggcccugaacaacagauuccagaucaagggcguggagcugaagagcggcuacaaggacuggauccuguggaucagcuucgccaucagcugccugcugcugugcguggcccugcugggcuucaucaugugggccugccagaagggcaacaucagaugcaacaucugcaucuga

SEQ ID NO: 173256 - RNA, 1701 nt, Artificial Sequence; identical to SEQ ID NO: 172487
  derived and/or modified CDS sequence (opt4) from hemagglutinin__InfluenzaA__ALE31663

SEQ ID NO: 173257 - RNA, 1701 nt, Artificial Sequence
  derived and/or modified CDS sequence (opt4) from hemagglutinin__InfluenzaA__ALE31666
augaagaccaucaucgcccugagcuacauccugugccugguguucgcccagaagauccccggcaacgacaacagcaccgccacccugugccugggccaccacgccgugcccaacggcaccaucgugaagaccaucaccaacgacagaaucgaggugaccaacgccaccgagcuggugcagaacagcagcaucggcgagaucugcgacagcccccaccagauccuggacggcgagaacugcacccugaucgacgcccugcugggcgacccccagugcgacggcuuccagaacaagaagugggaccuguucguggagagaagcaaggccuacagcaacugcuaccccuacgacgugcccgacuacgccagccugagaagccugguggccagcagcggcacccuggaguucaacaacgagagcuucaacuggaccggcgugacccagaacggcaccagcagcgccugcaucagaaagagcagcagcagcuucuucagcagacugaacuggcugacccaccugaaguacaccuaccccgcccugaacgugaccaugcccaacaacgagcaguucgacaagcuguacaucuggggcgugcaccaccccggcaccgacaaggaccagaucuuccuguacgccagaagcagcggcagaaucaccgugagcaccaagagaagccagcaggccgugauccccaacaucggcagcagacccagaaucagagacauccccagcagaaucagcaucuacuggaccaucgugaagcccggcgacauccugcugaucaacagcaccggcaaccugaucgcccccagaggcuacuucaagaucagaagcggcaagagcagcaucaugagaagcgacgcccccaucggcaagugcaagagcgagugcaucacccccaacggcagcauccccaacgacaagcccuuccagaacgugaacagaaucaccuacggcgccugccccagauacgugaagcacagcacccugaagcuggccaccggcaugagaaacgugcccgagaagcagaccagaggcaucuucggcgccaucgccggcuucaucgagaacggcugggagggcaugguggacggcugguacggcuucagacaccagaacagcgagggcagaggccaggccgccgaccugaagagcacccaggccgccaucgaccagaucaacggcaagcugaacagacugaucggcaagaccaacgagaaguuccaccagaucgagaaggaguucagcgagguggagggcagaauccaggaccuggagaaguacguggaggacaccaagaucgaccuguggagcuacaacgccgagcugcugguggcccuggagaaccagcacaccaucgaccugaccgacagcgagaugaacaagcuguucgagaagaccaagaagcagcugagagagaacgccgaggacaugggcaacggcugcuucaagaucuaccacaagugcgacaacgccugcaucggcagcaucagaaacggcaccuacgaccacaacguguacagagacgaggcccugaacaacagauuccagaucaagggcguggagcugaagagcggcuacaaggacuggauccuguggaucagcuucgccaucagcugcuuccugcugugcguggcccugcugggcuucaucaugugggccugccagaagggcaacaucagaugcaacaucugcaucuga

SEQ ID NO: 173258 - RNA, 1701 nt, Artificial Sequence
  derived and/or modified CDS sequence (opt4) from hemagglutinin__InfluenzaA__ALE31667
augaagaccaucaucgcccugagcuacauccugugccugguguucgcccagaagauccccggcaacgacaacagcaccgccacccugugccugggccaccacgccgugcugaacggcaccaucgugaagaccaucaccaacgacagaaucgaggugaccaacgccaccgagcuggugcagaacagcagcaucggcgagaucugcgacagcccccaccagauccuggacggcgagaacugcacccugaucgacgcccugcugggcgacccccagugcgacggcuuccagaacaagaagugggaccuguucguggagagaagcaaggccuacagcaacugcuaccccuacgacgugcccgacuacgccagccugagaagccugguggccagcagcggcacccuggaguucaacaacgagagcuucaacuggaccggcgugacccagaacggcaccagcagcgccugcaucagaaagagcagcagcagcuucuucagcagacugaacuggcugacccaccugaacuacaccuaccccgcccugaacgugaccaugcccaacaacgagcaguucgacaagcuguacaucuggggcgugcaccaccccggcaccgacaaggaccagaucuuccuguacgccagaagcagcggcagaaucaccgugagcaccaagagaagccagcaggccgugauccccaacaucggcagcagacccagaaucagagacauccccagcagaaucagcaucuacuggaccaucgugaagcccggcgacauccugcugaucaacagcaccggcaaccugaucgcccccagaggcuacuucaagaucagaagcggcaagagcagcaucaugagaagcgacgcccccaucggcaagugcaagagcgagugcaucacccccaacggcagcauccccaacgacaagcccuuccagaacgugaacagaaucaccuacggcgccugccccagauacgugaagcacagcacccugaagcuggccaccggcaugagaaacgugcccgagaagcagaccagaggcaucuucggcgccaucgccggcuucaucgagaacggcugggagggcaugguggacggcugguacggcuucagacaccagaacagcgagggcagaggccaggccgccgaccugaagagcacccaggccgccaucgaccagaucaacggcaagcugaacagacugaucggcaagaccaacgagaaguuccaccagaucgagaaggaguucagcgagguggagggcagaauccaggaccuggagaaguacguggaggacaccaagaucgaccuguggagcuacaacgccgagcugcugguggcccuggagaaccagcacaccaucgaccugaccgacagcgagaugaacaagcuguucgagaagaccaagaagcagcugagagagaacgccgaggacaugggcaacggcugcuucaagaucuaccacaagugcgacaacgccugcaucggcagcaucagaaacggcaccuacgaccacaacguguacagagacgaggcccugaacaacagauuccagaucaagggcguggagcugaagagcggcuacaaggacuggauccuguggaucagcuucgccaucagcugcuuccugcugugcguggcccugcugggcuucaucaugugggccugccagaagggcaacaucagaugcaacaucugcaucuga

SEQ ID NO: 173259 - RNA, 1701 nt, Artificial Sequence; identical to SEQ ID NO: 172501
  derived and/or modified CDS sequence (opt4) from hemagglutinin__InfluenzaA__ALE31668

SEQ ID NO: 173260 - RNA, 1701 nt, Artificial Sequence; identical to SEQ ID NO: 172501
  derived and/or modified CDS sequence (opt4) from hemagglutinin__InfluenzaA__ALE31669

SEQ ID NO: 173261 - RNA, 1701 nt, Artificial Sequence
  derived and/or modified CDS sequence (opt4) from hemagglutinin__InfluenzaA__ALE31670
augaagaccaucaucgcccugagcuacauccugugccugguguucgcccagaagcugcccgagaacgacaacagcaccgccacccugugccugggccaccacgccgugcccaacggcaccaucgugaagaccaucaccagcgacagaaucgaggugaccaacgccaccgagcuggugcagaacagcagcaucggcgagaucugcgacagcccccaccagauccuggacggcaagaacugcacccugaucgacgcccugcugggcgacccccagugcgacggcuuccagaacaagaagugggaccuguucguggagagaagcaaggccuacagcaacugcuaccccuacgacgugcccgacuacgccagccugagaagccugguggccagcagcggcacccuggaguucaacgacgagagcuucaacugggccggcgugacccagaacggcaccagcagcgccugcaucagaggcagcaacagcagcuucuucagcagacugaacuggcugacccacagcaacuucaaguaccccgcccugaacgugaccaugcccaacaacgagcaguucgacaagcuguacaucuggggcgugcaccaccccggcaccgacaaggaccagaucuuccuguacgcccagagcagcggcagaaucaccgugagcaccaagagaagccagcaggccgugauccccaacaucggcagcagacccagaaucagaaacauccccagcagaaucagcaucuacuggaccaucgugaagcccggcgacauccugcugaucaacagcaccggcaaccugaucgcccccagaggcuacuucaagaucagaagcggcaagagcagcaucaugagaagcgacgcccccaucggcaagugcaagagcgagugcaucacccccaacggcagcauccccaacgacaagcccuuccagaacgugaacagaaucaccuacggcgccugccccagauacgugaagcagagcacccugaagcuggccaccggcaugagaaacgugcccgagaagcagaccagaggcaucuucggcgccaucgccggcuucaucgagaacggcugggagggcaugaaggacggcugguacggcuucagacaccagaacagcgagggcagaggccaggccgccgaccugaagagcacccaggccgccaucgaccagaucaacggcaagcugaacagacugaucggcaagaccaacgagaaguuccaccagaucgagaaggaguucagcgagguggagggcagaauccaggaccuggagaaguacguggaggacaccaagaucgaccuguggagcuacaacgccgagcugcugguggcccuggagaaccagcacaccaucgaccugaccgacagcgagaugaacaagcuguucgagaagaccaagaagcagaugagagagaacgccgaggacaugggcaacggcugcuucaagaucuaccacaagugcgacaacgccugcaucggcagcaucagaaacggcaccuacgaccacgacguguacagagacgaggcccugaacaacagauuccagaucaagggcguggagcugaagagcggcuacaaggacuggauccuguggaucagcuucgccaucagcugcuuccugcugugcguggcccugcugggcuucaucaugugggccugccagaagggcaacaucagaugcaacaucugcaucuga

SEQ ID NO: 173262 - RNA, 1701 nt, Artificial Sequence; identical to SEQ ID NO: 172501
  derived and/or modified CDS sequence (opt4) from hemagglutinin__InfluenzaA__ALE31671

SEQ ID NO: 173263 - RNA, 1701 nt, Artificial Sequence; identical to SEQ ID NO: 172501
  derived and/or modified CDS sequence (opt4) from hemagglutinin__InfluenzaA__ALE31672

SEQ ID NO: 173264 - RNA, 1701 nt, Artificial Sequence; identical to SEQ ID NO: 173058
  derived and/or modified CDS sequence (opt4) from hemagglutinin__InfluenzaA__ALE31673

SEQ ID NO: 173265 - RNA, 1701 nt, Artificial Sequence
  derived and/or modified CDS sequence (opt4) from hemagglutinin__InfluenzaA__ALE31674
augaagaccaucaucgcccugagcuacauccugugccugguguucgcccagaagauccccggcaacgacaacagcaccgccacccugugccugggccaccacgccgugcccaacggcaccaucgugaagaccaucaccaacgacagaaucgaggugaccaacgccaccgagcuggugcagaacagcagcaucggcgagaucugcgacagcccccaccagauccuggacggcgagaacugcacccugaucgacgcccugcugggcgacccccagugcgacggcuuccagaacaagaagugggaccuguucguggagagaagcaaggccuacagcaacugcuaccccuacgacgugcccgacuacgccagccugagaagccugguggccagcagcggcacccuggaguucaacaacgagagcuucaacuggaccggcgugacccagaacggcaccagcagcgccugcaucagaagaagcagcagcagcuucuucagcagacugaacuggcugacccaccugaacuacaccuaccccgcccugaacgugaccaugcccaacaacgagcaguucgacaagcuguacaucuggggcgugcaccaccccggcaccgacaaggaccagaucuuccuguacgcccacagcagcggcagaaucaccgugagcaccaagagaagccagcaggccgugauccccaacaucggcagcagacccagaaucagagacauccccagcagaaucagcaucuacuggaccaucgugaagcccggcgacauccugcugaucaacagcaccggcaaccugaucgcccccagaggcuacuucaagaucagaagcggcaagagcagcaucaugagaagcgacgcccccaucggcaagugcaagagcgagugcaucacccccaacggcagcauccccaacgacaagcccuuccagaacgugaacagaaucaccuacggcgccugccccagauacgugaagcacagcacccugaagcuggccaccggcaugagaaacgugcccgagaagcagaccagaggcaucuucggcgccaucgccggcuucaucgagaacggcugggagggcaugguggacggcugguacggcuucagacaccagaacagcgagggcagaggccaggccgccgaccugaagagcacccaggccgccaucgaccagaucaacggcaagcugaacagacugaucggcaagaccaacgagaaguuccaccagaucgagaaggaguucagcgagguggagggcagaauccaggaccuggagaaguacguggaggacaccaagaucgaccuguggagcuacaacgccgagcugcugguggcccuggagaaccagcacaccaucgaccugaccgacagcgagaugaacaagcuguucgagaagaccaagaagcagcugagagagaacgccgaggacaugggcaacggcugcuucaagaucuaccacaagugcgacaacgccugcaucggcagcaucagaaacggcaccuacgaccacaacguguacagagacgaggcccugaacaacagauuccagaucaagggcguggagcugaagagcggcuacaaggacuggauccuguggaucagcuucgccaucagcugcuuccugcugugcguggcccugcugggcuucaucaugugggccugccagaagggcaacaucagaugcaacaucugcaucuga

SEQ ID NO: 173266 - RNA, 1701 nt, Artificial Sequence
  derived and/or modified CDS sequence (opt4) from hemagglutinin__InfluenzaA__ALE31675
augaagaccaucaucgcccugagcuacauccugugccugguguucgcccagaagauccccggcaacgacaacagcaccgccacccugugccugggccaccacgccgugcccaacggcaccaucgugaagaccaucaccaacgacagaaucgaggugaccaacgccaccgagcuggugcagaacagcagcaucggcgagaucugcaacagcccccaccagauccuggacggcgagaacugcacccugaucgacgcccugcugggcgacccccagugcgacggcuuccagaacaagaagugggaccuguucguggagagaagcaaggccuacagcaacugcuaccccuacgacgugcccgacuacgccagccugagaagccugguggccagcagcggcacccuggaguucaacaacgagagcuucaacuggaccggcgugacccagaacggcaccagcagcgccugcaucagaagaagcagcagcagcuucuucagcagacugaacuggcugacccaccugaacuacaccuaccccgcccugaacgugaccaugcccaacaacgagcaguucgacaagcuguacaucuggggcgugcaccaccccggcaccgacaaggaccagaucuuccuguacgcccagagcagcggcagaaucaccgugagcaccaagggcagccagcaggccgugauccccaacaucggcagcagacccagaaucagagacauccccagcagaaucagcaucuacuggaccaucgugaagcccggcgacauccugcugaucaacagcaccggcaaccugaucgcccccagaggcuacuucaagaucagaagcggcaagagcagcaucaugagaagcgacgcccccaucggcaagugcaagagcgagugcaucacccccaacggcagcauccccaacgacaagcccuuccagaacgugaacagaaucaccuacggcgccugccccagauacgugaagcacagcacccugaagcuggccaccggcaugagaaacgugcccgagaagcagaccagaggcaucuucggcgccaucgccggcuucaucgagaacggcugggagggcaugguggacggcugguacggcuucagacaccagaacagcgagggcagaggccaggccgccgaccugaagagcacccaggccgccaucgaccagaucaacggcaagcugaacagacugaucggcaagaccaacgagaaguuccaccagaucgagaaggaguucagcgagguggagggcagaauccaggaccuggagaaguacguggaggacaccaagaucgaccuguggagcuacaacgccgagcugcugguggcccuggagaaccagcacaccaucgaccugaccgacagcgagaugaacaagcuguucgagaagaccaagaagcagcugagagagaacgccgaggacaugggcaacggcugcuucaagaucuaccacaagugcgacaacgccugcaucggcagcaucagaaacggcaccuacgaccacaacguguacagagacgaggcccugaacaacagauuccagaucaagggcguggagcugaagagcggcuacaaggacuggauccuguggaucagcuucgccaucagcugcuuccugcugugcguggcccugcugggcuucaucaugugggccugccagaagggcaacaucagaugcaacaucugcaucuga

SEQ ID NO: 173267 - RNA, 1701 nt, Artificial Sequence
  derived and/or modified CDS sequence (opt4) from hemagglutinin__InfluenzaA__ALE31676
augaagaccaucaucgcccugagcuacauccugugccugguguucgcccagaagauccccggcaacgacaacagcaccgccacccugugccugggccaccacgccgugcccaacggcaccaucgugaagaccaucaccaacgacagaaucgaggugaccaacgccaccgagcuggugcagaacagcagcaucggcgagaucugcgacagcccccaccagauccuggacggcgagaacugcacccugaucgacgcccugcugggcgacccccagugcgacggcuuccagaacaagaagugggaccuguucguggagagaagcaaggccuacagcaacugcuaccccuacgacgugcccgacuacgccagccugagaagccugguggccagcagcggcacccuggaguucaacaacgagagcuucaacuggaccggcgugacccagaacggcaccagcagcgccugcaucagaagaagcagcagcagcuucuucagcagacugaacuggcugacccaccugaacuacaccuaccccgcccugaacgugaccaugcccaacaacgagcaguucgacaagcuguacaucuggggcgugcaccaccccggcaccgacaaggaccagaucuuccuguacgcccagagcagcggcagaaucaccgugagcaccaagagaagccagcaggccgugauccccaacaucggcagcagacccaagaucagagacauccccagcagaaucagcaucuacuggaccaucgugaagcccggcgacauccugcugaucaacagcaccggcaaccugaucgcccccagaggcuacuucaagauccugagcggcaagagcagcaucaugagaagcgacgcccccaucggcaagugcaagagcgagugcaucacccccaacggcagcauccccaacgacaagcccuuccagaacgugaacagaaucaccuacggcgccugccccagauacgugaagcacagcacccugaagcuggccaccggcaugagaaacgugcccgagaagcagaccagaggcaucuucggcgccaucgccggcuucaucgagaacggcugggagggcaugguggacggcugguacggcuucagacaccagaacagcgagggcagaggccaggccgccgaccugaagagcacccaggccgccaucgaccagaucaacggcaagcugaacagacugaucggcaagaccaacgagaaguuccaccagaucgagaaggaguucagcgagguggagggcagaauccaggaccuggagaaguacguggaggacagcaagaucgaccuguggagcuacaacgccgagcugcugguggcccuggagaaccagcacaccaucgaccugaccgacagcgagaugaacaagcuguucgagaagaccaagaagcagcugagagagaacgccgaggacaugggcaacggcugcuucaagaucuaccacaagugcgacaacgccugcaucggcagcaucagaaacggcaccuacgaccacaacguguacagagacgaggcccugaacaacagauuccagaucaagggcguggagcugaagagcggcuacaaggacuggauccuguggaucagcuucgccaucagcugcuuccugcugugcguggcccugcugggcuucaucaugugggccugccagaagggcaacaucagaugcaacaucugcaucuga

SEQ ID NO: 173268 - RNA, 1701 nt, Artificial Sequence; identical to SEQ ID NO: 173159
  derived and/or modified CDS sequence (opt4) from hemagglutinin__InfluenzaA__ALE31677

SEQ ID NO: 173269 - RNA, 1701 nt, Artificial Sequence; identical to SEQ ID NO: 172501
  derived and/or modified CDS sequence (opt4) from hemagglutinin__InfluenzaA__ALE31678

SEQ ID NO: 173270 - RNA, 1701 nt, Artificial Sequence; identical to SEQ ID NO: 172501
  derived and/or modified CDS sequence (opt4) from hemagglutinin__InfluenzaA__ALE31679

SEQ ID NO: 173271 - RNA, 1701 nt, Artificial Sequence; identical to SEQ ID NO: 173117
  derived and/or modified CDS sequence (opt4) from hemagglutinin__InfluenzaA__ALE31680

SEQ ID NO: 173272 - RNA, 1701 nt, Artificial Sequence; identical to SEQ ID NO: 173116
  derived and/or modified CDS sequence (opt4) from hemagglutinin__InfluenzaA__ALE31681

SEQ ID NO: 173273 - RNA, 1701 nt, Artificial Sequence; identical to SEQ ID NO: 172501
  derived and/or modified CDS sequence (opt4) from hemagglutinin__InfluenzaA__ALE31682

SEQ ID NO: 173274 - RNA, 1701 nt, Artificial Sequence; identical to SEQ ID NO: 172501
  derived and/or modified CDS sequence (opt4) from hemagglutinin__InfluenzaA__ALE31683

SEQ ID NO: 173275 - RNA, 1701 nt, Artificial Sequence; identical to SEQ ID NO: 172501
  derived and/or modified CDS sequence (opt4) from hemagglutinin__InfluenzaA__ALE31684

SEQ ID NO: 173276 - RNA, 1701 nt, Artificial Sequence; identical to SEQ ID NO: 172501
  derived and/or modified CDS sequence (opt4) from hemagglutinin__InfluenzaA__ALE31685

SEQ ID NO: 173277 - RNA, 1701 nt, Artificial Sequence; identical to SEQ ID NO: 172501
  derived and/or modified CDS sequence (opt4) from hemagglutinin__InfluenzaA__ALE31686

SEQ ID NO: 173278 - RNA, 1701 nt, Artificial Sequence
  derived and/or modified CDS sequence (opt4) from hemagglutinin__InfluenzaA__ALE31687
augaagaccaucaucgcccugagcuacauccugugccugguguucgcccagaagauccccggcaacgacaacagcaccgccacccugugccugggccaccacgccgugcccaacggcaccaucgugaagaccaucaccaacgacagaaucgaggugaccaacgccaccgagcuggugcagaacagcagcaucggcgagaucugcgacagcccccaccagauccuggacggcgagaacugcacccugaucgacgcccugcugggcgacccccagugcgacggcuuccagaacaagaagugggaccuguucguggagagaagcaaggccuacagcaacugcuaccccuacgacgugcccgacuacgccagccugagaagccugguggccagcagcggcacccuggaguucaacaacgagagcuucaacuggaccggcgugacccagaacggcaccagcagcgccugcaucagaagaagcagcagcagcuucuucagcagacugaacuggcugacccaccugaacuacaccuaccccgcccugaacgugaccaugcccaacaacgagcaguucgacaagcuguacaucuggggcgugcaccaccccggcaccgacaaggaccagaucuuccuguacgcccagagcagcggcagaaucaccgugagcaccaagagaagccagcaggccgugauccccaacaucggcagcagacccagaaucagagacauccccagcagaaucagcaucuacuggaccaucgugaagcccggcgacauccugcugaucaacagcaccggcaaccugaucgcccccagaggcuacuucaagaucagaagcggcaagagcagcaucaugagaagcgacgcccccaucggcaagugcaagagcgagugcaucacccccaacggcagcauccccaacgacaagcccuuccagaacgugaacagaaucaccuacggcgccugccccagauacgugaagcacagcacccugaagcuggccaccggcaugagaaacgugcccgagaagcagaccagaggcaucuucggcgccaucgccggcuucaucgagaacggcugggagggcaugguggacggcugguacggcuucagacaccagaacagcgagggcagaggccaggccgccgaccugaagagcacccaggccgccaucgaccagaucaacggcaagcugaacagacugaucggcaagaccaacgagaaguuccaccagaucgagaaggaguucagcgagguggagggcagaauccaggaccuggagaaguacguggaggacaccaagaucgaccuguggagcuacaacgccgagcugcugguggcccuggagaaccagcacaccaucgaccugaccgacagcgagaugaacaagcuguucgagaagaccaagaagcagcugagagagaacgccgaggacaugggcaacggcugcuucaagaucuaccacaagugcgacaacgccugcaucgagagcaucagaaacggcaccuacgaccacaacguguacagagacgaggcccugaacaacagauuccagaucaagggcguggagcugaagagcggcuacaaggacuggauccuguggaucagcuucgccaucagcugcuuccugcugugcguggcccugcugggcuucaucaugugggccugccagaagggcaacaucagaugcaacaucugcaucuga

SEQ ID NO: 173279 - RNA, 1701 nt, Artificial Sequence
  derived and/or modified CDS sequence (opt4) from hemagglutinin__InfluenzaA__ALE31688
augaagaccaccaucgcccugagcuacauccugugccugguguucgcccagaagcugcccgagaacgacaacagcaccgccacccugugccugggccaccacgccgugcccaacggcaccaucgugaagaccaucaccagcgacagaaucgaggugaccaacgccaccgagcuggugcagaacagcagcaucggcgagaucugcgacagcccccaccagauccuggacggcaagaacugcacccugaucgacgcccugcugggcgacccccagugcgacggcuuccagaacaagaagugggaccuguucguggagagaagcaaggccuacagcaacugcuaccccuacgacgugcccgacuacgccagccugagaagccugguggccagcagcggcacccuggaguucaacgacgagagcuucaacugggccggcgugacccagaacggcaccagcagcgccugcaucagaggcagcaacagcagcuucuucagcagacugaacuggcugacccacagcaacuucaaguaccccgcccugaacgugaccaugcccaacaacgagcaguucgacaagcuguacaucuggggcgugcaccaccccggcaccgacaaggaccagaucuuccuguacgcccagagcagcggcagaaucaccgugagcaccaagagaagccagcaggccgugauccccaacaucggcagcagacccagaaucagaaacauccccagcagaaucagcaucuacuggaccaucgugaagcccggcgacauccugcugaucaacagcaccggcaaccugaucgcccccagaggcuacuucaagaucagaagcggcaagagcagcaucaugagaagcgacgcccccaucggcaagugcaagagcgagugcaucacccccaacggcagcauccccaacgacaagcccuuccagaacgugaacagaaucaccuacggcgccugccccagauacgugaagcagagcacccugaagcuggccaccggcaugagaaacgugcccgagaagcagaccagaggcaucuucggcgccaucgccggcuucaucgagaacggcugggagggcaugaaggacggcugguacggcuucagacaccagaacagcgagggcagaggccaggccgccgaccugaagagcacccaggccgccaucgaccagaucaacggcaagcugaacagacugaucggcaagaccaacgagaaguuccaccagaucgagaaggaguucagcgagguggagggcagaauccaggaccuggagaaguacguggaggacaccaagaucgaccuguggagcuacaacgccgagcugcugguggcccuggagaaccagcacaccaucgaccugaccgacagcgagaugaacaagcuguucgagaagaccaagaagcagcugagagagaacgccgaggacaugggcaacggcugcuucaagaucuaccacaagugcgacaacgccugcaucggcagcaucagaaacggcaccuacgaccacgacguguacagagacgaggcccugaacaacagauuccagaucaagggcguggagcugaagagcggcuacaaggacuggauccuguggaucagcuucgccaucagcugcuuccugcugugcguggcccugcugggcuucaucaugugggccugccagaagggcaacaucagaugcaacaucugcaucuga

SEQ ID NO: 173280 - RNA, 1701 nt, Artificial Sequence; identical to SEQ ID NO: 172501
  derived and/or modified CDS sequence (opt4) from hemagglutinin__InfluenzaA__ALE31689

SEQ ID NO: 173281 - RNA, 1701 nt, Artificial Sequence
  derived and/or modified CDS sequence (opt4) from hemagglutinin__InfluenzaA__ALE31690
augaagaccaucaucgcccugagcugcauccugugccugguguucgcccagaagcugcccggcaacgacaacagcaccgccacccugugccugggccaccacgccgugcccaacggcaccaucgugaagaccaucaccaacgacagaaucgaggugaccaacgccaccgagcuggugcagaacagcagcaucggcgagaucugcgacagcccccaccagauccuggacggcgagaacugcacccugaucgacgcccugcugggcgacccccagugcgacggcuuccagaacaagaagugggaccuguucguggagagaagcaaggccuacagcaacugcuaccccuacgacgugcccgacuacgccagccugagaagccugguggccagcagcggcacccuggaguucaacaacgagagcuucaacugggccggcgugacccagaacggcaccagcagcagcugcaucagaggcagcaacagcagcuucuucagcagacugaacuggcugacccaccugaacagcaaguaccccgcccugaacgugaccaugcccaacaacgagcaguucgacaagcuguacaucuggggcgugcaccaccccggcaccgacaaggaccagaucuuccuguacgcccagagcagcggcagaaucaccgugagcaccaagagaagccagcaggccgugauccccaacaucggcagcagacccagaaucagagacauccccagcagaaucagcaucuacuggaccaucgugaagcccggcgacauccugcugaucaacagcaccggcaaccugaucgcccccagaggcuacuucaagaucagaagcggcaagagcagcaucaugagaagcgacgcccccaucggcaagugcaagagcgagugcaucacccccaacggcagcauccccaacgacaagcccuuccagaacgugaacagaaucaccuacggcgccugccccagauacgugaagcagagcacccugaagcuggccaccggcaugagaaacgugcccgagagacagaccagaggcaucuucggcgccaucgccggcuucaucgagaacggcugggagggcaugguggacggcugguacggcuucagacaccagaacagcgagggcagaggccaggccgccgaccugaagagcacccaggccgccaucgaccagaucaacggcaagcugaacagacugaucggcaagaccaacgagaaguuccaccagaucgagaaggaguucagcgagguggagggcagaauccaggaccuggagaaguacguggaggacaccaagaucgaccuguggagcuacaacgccgagcugcugguggcccuggagaaccagcacaccaucgaccugaccgacagcgagaugaacaagcuguucgagaagaccaagaagcagcugagagagaacgccgaggacaugggcaacggcugcuucaagaucuaccacaagugcgacaacgccugcaucggcagcaucagaaacggcaccuacgaccacaacguguacagagacgaggcccugaacaacagauuccagaucaagggcguggagcugaagagcggcuacaaggacuggauccuguggaucagcuucgccaucagcugcuuccugcugugcguggcccugcugggcuucaucaugugggccugccagaagggcaacaucagaugcaacaucugcaucuga

SEQ ID NO: 173282 - RNA, 1701 nt, Artificial Sequence; identical to SEQ ID NO: 170054
  derived and/or modified CDS sequence (opt4) from hemagglutinin__InfluenzaA__ALE31691

SEQ ID NO: 173283 - RNA, 1701 nt, Artificial Sequence
  derived and/or modified CDS sequence (opt4) from hemagglutinin__InfluenzaA__ALE31692
augaagaccaucaucgcccugagcuacauccugugccugguguucgcccagaagauccccggcaacgacaacagcaccgccacccugugccugggccaccacgccgugcccaacggcaccaucgugaagaccaucaccaacgacagaaucgaggugaccaacgccaccgagcuggugcagaacagcagcaucggcgagaucugcgacagcccccaccagauccuggacggcgagaacugcacccugaucgacgcccugcugggcgacccccagugcgacggcuuccagaacaagaagugggaccuguucguggagagaagcaaggccuacagcaacugcuaccccuacgacgugcccgacuacgccagccugagaagccugguggccagcagcggcacccuggaguucaacaacgagagcuucaacuggaccggcgugacccagaacggcaccagcagcgccugcaucagaaagagcagcagcagcuucuucagcagacugaacuggcugacccaccugaacuacaccuaccccgcccugaacgugaccaugcccaacaacgagcaguucgacaagcuguacaucuggggcgugcaccaccccggcaccgacaaggaccagaucuuccuguacgccagaagcagcggcagaaucaccgugagcaccaagagaagccagcaggccgugauccccaacaucggcuacagacccagaaucagagacauccccagcagaaucagcaucuacuggaccaucgugaagcccggcgacauccugcugaucaacagcaccggcaaccugaucgcccccagaggcuacuucaagaucagaagcggcaagagcagcaucaugagaagcgacgcccccaucggcaagugcaagagcgagugcaucacccccaacggcagcauccccaacgacaagcccuuccagaacgugaacagaaucaccuacggcgccugccccagauacgugaagcacagcacccugaagcuggccaccggcaugagaaacgugcccgagaagcagaccagaggcaucuucggcgccaucgccggcuucaucgagaacggcugggagggcaugguggacggcugguacggcuucagacaccagaacagcgagggcagaggccaggccgccgaccugaagagcacccaggccgccaucgaccagaucaacggcaagcugaacagacugaucggcaagaccaacgagaaguuccaccagaucgagaaggaguucagcgagguggagggcagaauccaggaccuggagaaguacguggaggacaccaagaucgaccuguggagcuacaacgccgagcugcugguggcccuggagaaccagcacaccaucgaccugaccgacagcgagaugaacaagcuguucgagaagaccaagaagcagcugagagagaacgccgaggacaugggcaacggcugcuucaagaucuaccacaagugcgacaacgccugcaucggcagcaucagaaacggcaccuacgaccacaacguguacagagacgaggcccugaacaacagauuccagaucaagggcguggagcugaagagcggcuacaaggacuggauccuguggaucagcuucgccaucagcugcuuccugcugugcguggcccugcugggcuucaucaugugggccugccagaagggcaacaucagaugcaacaucugcaucuga

SEQ ID NO: 173284 - RNA, 1701 nt, Artificial Sequence; identical to SEQ ID NO: 173283
  derived and/or modified CDS sequence (opt4) from hemagglutinin__InfluenzaA__ALE31693

SEQ ID NO: 173285 - RNA, 1701 nt, Artificial Sequence; identical to SEQ ID NO: 172501
  derived and/or modified CDS sequence (opt4) from hemagglutinin__InfluenzaA__ALE31694

SEQ ID NO: 173286 - RNA, 1701 nt, Artificial Sequence; identical to SEQ ID NO: 173283
  derived and/or modified CDS sequence (opt4) from hemagglutinin__InfluenzaA__ALE31695

SEQ ID NO: 173287 - RNA, 1701 nt, Artificial Sequence; identical to SEQ ID NO: 173159
  derived and/or modified CDS sequence (opt4) from hemagglutinin__InfluenzaA__ALE31696

SEQ ID NO: 173288 - RNA, 1701 nt, Artificial Sequence; identical to SEQ ID NO: 173283
  derived and/or modified CDS sequence (opt4) from hemagglutinin__InfluenzaA__ALE31697

SEQ ID NO: 173289 - RNA, 1701 nt, Artificial Sequence
  derived and/or modified CDS sequence (opt4) from hemagglutinin__InfluenzaA__ALE31698
augaagaccaucaucgcccugagcuacauccugugcaugguguucgcccagaagauccccggcaacgacaacagcaccgccacccugugccugggccaccacgccgugcccaacggcaccaucgugaagaccaucaccaacgacagaaucgaggugaccaacgccaccgagcuggugcagaacagcagcaucggcgagaucugcgacagcccccaccagauccuggacggcgagaacugcacccugaucgacgcccugcugggcgacccccagugcgacggcuuccagaacaagaagugggaccuguucguggagagaagcaaggccuacagcaacugcuaccccuacgacgugcccgacuacgccagccugagaagccugguggccagcagcggcacccuggaguucaacaacgagagcuucaacuggaccggcgugacccagaacggcaccagcagcgccugcaucagaagaagcagcagcagcuucuucagcagacugaacuggcugacccaccugaacuacaccuaccccgcccugaacgugaccaugcccaacaacgagcaguucgacaagcuguacaucuggggcgugcaccaccccggcaccgacaaggaccagaucuuccuguacgcccagagcagcggcagaaucaccgugagcaccaagagaagccagcaggccgugauccccaacaucggcagcagacccagaaucagagacauccccagcagaaucagcaucuacuggaccaucgugaagcccggcgacauccugcugaucaacagcaccggcaaccugaucgcccccagaggcuacuucaagaucagaagcggcaagagcagcaucaugagaagcgacgcccccaucggcaagugcaagagcgagugcaucacccccaacggcagcauccccaacgacaagcccuuccagaacgugaacagaaucaccuacggcgccugccccagauacgugaagcacagcacccugaagcuggccaccggcaugagaaacgugcccgagaagcagaccagaggcaucuucggcgccaucgccggcuucaucgagaacggcugggagggcaugguggacggcugguacggcuucagacaccagaacagcgagggcagaggccaggccgccgaccugaagagcacccaggccgccaucgaccagaucaacggcaagcugaacagacugaucggcaagaccaacgagaaguuccaccagaucgagaaggaguucagcgagguggagggcagaauccaggaccuggagaaguacguggaggacaccaagaucgaccuguggagcuacaacgccgagcugcugguggcccuggagaaccagcacaccaucgaccugaccgacagcgagaugaacaagcuguucgagaagaccaagaagcagcugagagagaacgccgaggacaugggcaacggcugcuucaagaucuaccacaagugcgacaacgccugcaucggcagcaucagaaacggcaccuacgaccacaacguguacagagacgaggcccugaacaacagauuccagaucaagggcguggagcugaagagcggcuacaaggacuggauccuguggaucagcuucgccaucagcugcuuccugcugugcguggcccugcugggcuucaucaugugggccugccagaagggcaacaucagaugcaacaucugcaucuga

SEQ ID NO: 173290 - RNA, 1701 nt, Artificial Sequence
  derived and/or modified CDS sequence (opt4) from hemagglutinin__InfluenzaA__ALE31699
augaagaccaucaucgcccugagcuacauccugugccugguguucgcccagaagauccccggcaacgacaacagcaccgccacccugugccugggccaccacgccgugcccaacggcaccaucgugaagaccaucaccaacgacagaaucgaggugaccaacgccaccgagcuggugcagaacagcagcaucggcgagaucugcgacagcccccaccagauccuggacggcgagaacugcacccugaucgacgcccugcugggcgacccccagugcgacggcuuccagaacaagaagugggaccuguucguggagagaagcaaggccuacagcaacugcuaccccuacgacgugcccaacuacgccagccugagaagccugguggccagcagcggcacccuggaguucaacaacgagagcuucaacuggaccggcgugacccagaacggcaccagcagcgccugcaucagaagaagcagcagcagcuucuucagcagacugaacuggcugacccaccugaacuacgccuaccccgcccugaacgugaccaugcccaacaacgagcaguucgacaagcuguacaucuggggcgugcaccaccccggcaccgacaaggaccagaucuuccuguacgcccagagcagcggcagaaucaccgugagcaccaagagaagccagcaggccgugauccccaacaucggcagcagacccagaaucagagacauccccagcagaaucagcaucuacuggaccaucgugaagcccggcgacauccugcugaucaacagcaccggcaaccugaucgcccccagaggcuacuucaagaucagaagcggcaagagcagcaucaugagaagcgacgcccccaucggcaagugcaagagcgagugcaucacccccaacggcagcauccccaacgacaagcccuuccagaacgugaacagaaucaccuacggcgccugccccagauacgugaagcacagcacccugaagcuggccaccggcaugagaaacgugcccgagaagcagaccagaggcaucuucggcgccaucgccggcuucaucgagaacggcugggagggcaugguggacggcugguacggcuucagacaccagaacagcgagggcagaggccaggccgccgaccugaagagcacccaggccgccaucgaccagaucaacggcaagcugaacagacugaucggcaagaccaacgagaaguuccaccagaucgagaaggaguucagcgagguggagggcagaauccaggaccuggagaaguacguggaggacaccaagaucgaccuguggagcuacaacgccgagcugcugguggcccuggagaaccagcacaccaucgaccugaccgacagcgagaugaacaagcuguucgagaagaccaagaagcagcugagagagaacgccgaggacaugggcaacggcugcuucaagaucuaccacaagugcgacaacgccugcaucggcagcaucagaaacggcaccuacgaccacaacguguacagagacgaggcccugaacaacagauuccagaucaagggcguggagcugaagagcggcuacaaggacuggauccuguggaucagcuucgccaucagcugcuuccugcugugcguggcccugcugggcuucaucaugugggccugccagaagggcaacaucagaugcaacaucugcaucuga

SEQ ID NO: 173291 - RNA, 1701 nt, Artificial Sequence; identical to SEQ ID NO: 172501
  derived and/or modified CDS sequence (opt4) from hemagglutinin__InfluenzaA__ALE31700

SEQ ID NO: 173292 - RNA, 1701 nt, Artificial Sequence; identical to SEQ ID NO: 172501
  derived and/or modified CDS sequence (opt4) from hemagglutinin__InfluenzaA__ALE31701

SEQ ID NO: 173293 - RNA, 1701 nt, Artificial Sequence; identical to SEQ ID NO: 173058
  derived and/or modified CDS sequence (opt4) from hemagglutinin__InfluenzaA__ALE31702

SEQ ID NO: 173294 - RNA, 1701 nt, Artificial Sequence; identical to SEQ ID NO: 172501
  derived and/or modified CDS sequence (opt4) from hemagglutinin__InfluenzaA__ALE31703

SEQ ID NO: 173295 - RNA, 1701 nt, Artificial Sequence; identical to SEQ ID NO: 172501
  derived and/or modified CDS sequence (opt4) from hemagglutinin__InfluenzaA__ALE31704

SEQ ID NO: 173296 - RNA, 1701 nt, Artificial Sequence; identical to SEQ ID NO: 173058
  derived and/or modified CDS sequence (opt4) from hemagglutinin__InfluenzaA__ALE31705

SEQ ID NO: 173297 - RNA, 1701 nt, Artificial Sequence
  derived and/or modified CDS sequence (opt4) from hemagglutinin__InfluenzaA__ALE31706
augaagaccaucaucgcccugagcuacauccugugccugguguucgcccagaagauccccggcaacgacaacagcaccgccacccugugccugggccaccacgccgugcccaacggcaccaucgugaagaccaucaccaacgacagaaucgaggugaccaacgccaccgagcuggugcagaacagcagcaucggcgagaucugcgacagcccccaccagauccuggacggcgagaacugcacccugaucgacgcccugcugggcgacccccagugcgacggcuuccagaacaagaagugggaccuguucguggagagaagcaaggccuacagcaacugcuaccccuacgacgugcccgacuacgccagccugagaagccugguggccagcagcggcacccuggaguucaacaacgagagcuucaacuggaccggcgugacccagaacggcaccagcagcgccugcaucagaagaagcagcagcagcuucuucagcagacugaacuggcugacccaccugaacuacaccuaccccgcccugaacgugaccaugcccaacaacgagcaguucgacaagcuguacaucuggggcgugcaccaccccggcaccgacaaggaccagaucuuccuguacgcccagagcagcggcagaaucaccgugagcaccaagggcagccagcaggccgugauccccaacaucggcagcagacccagaaucagagacauccccagcagaaucagcaucuacuggaccaucgugaagcccggcgacauccugcugaucaacagcaccggcaaccugaucgcccccagaggcuacuucaagaucagaagcggcaagagcagcaucaugagaagcgacgcccccaucggcaagugcaagagcgagugcaucacccccaacggcagcauccccaacgacaagcccuuccagaacgugaacagaaucaccuacggcgccugccccagauacgugaagcacagcacccugaagcuggccaccggcaugagaaacgugcccgagaagcagaccagaggcaucuucggcgccaucgccggcuucaucgagaacggcugggagggcaugguggacggcugguacggcuucagacaccagaacagcgagggcagaggccaggccgccgaccugaagagcacccaggccgccaucgaccagaucaacggcaagcugaacagacugaucggcaagaccaacgagaaguuccaccagaucgagaaggaguucagcgagguggagggcagaauccaggaccuggagaaguacguggaggacaccaagaucgaccuguggagcuacaacgccgagcugcugguggcccuggagaaccagcacaccaucgaccugaccgacagcgagaugaacaagcuguucgagaagaccaagaagcagcugagagagaacgccgaggacaugggcaacggcugcuucaagaucuaccacaagugcgacaacgccugcaucggcagcaucagaaacggcaccuacgaccacaacguguacagagacgaggcccugaacaacagauuccagaucaagggcguggagcugaagagcggcuacaaggacuggauccuguggaucagcuucgccaucagcugccugcugcugugcguggcccugcugggcuucaucaugugggccugccagaagggcaacaucagaugcaacaucugcaucuga

SEQ ID NO: 173298 - RNA, 1701 nt, Artificial Sequence; identical to SEQ ID NO: 173187
  derived and/or modified CDS sequence (opt4) from hemagglutinin__InfluenzaA__ALE31707

SEQ ID NO: 173299 - RNA, 1701 nt, Artificial Sequence; identical to SEQ ID NO: 173187
  derived and/or modified CDS sequence (opt4) from hemagglutinin__InfluenzaA__ALE31708

SEQ ID NO: 173300 - RNA, 1701 nt, Artificial Sequence; identical to SEQ ID NO: 172487
  derived and/or modified CDS sequence (opt4) from hemagglutinin__InfluenzaA__ALE31709

SEQ ID NO: 173301 - RNA, 1701 nt, Artificial Sequence
  derived and/or modified CDS sequence (opt4) from hemagglutinin__InfluenzaA__ALE31710
augaagaccaucaucgcccugagcuacauccugugccugguguucgcccagaagauccccggcaacgacaacagcaccgccacccugugccugggccaccacgccgugcccaacggcaccaucgugaagaccaucaccaacgacagaaucgaggugaccaacgccaccgagcuggugcagaacagcagcaucggcgagaucugcgacagcccccaccagauccuggacggcgagaacugcacccugaucgacgcccugcugggcgacccccagugcgacggcuuccagaacaagaagugggaccuguucguggagagaagcaaggccuacagcaacugcuaccccuacgacgugcccgacuacgccagccugagaagccugguggccagcagcggcacccuggaguucaacaacgagagcuucaacuggaccggcgugacccagaacggcaccagcagcgccugcaucagaagaagcagcagcagcuucuucagcagacugaacuggcugacccaccugaacuacaccuaccccgcccugaacgugaccaugcccaacaacgagcaguucgacaagcuguacaucuggggcgugcaccaccccggcaccgacaaggaccagaucuuccuguacgcccagagcagcggcagaaucaccgugagcaccaagagaagccagcaggccgugauccccaacaucggcagcagacugagaaucagagacauccccagcagaaucagcaucuacuggaccaucgugaagcccggcgacauccugcugaucaacagcaccggcaaccugaucgcccccagaggcuacuucaagauccugagcggcaagagcagcaucaugagaagcgacgcccccaucggcaagugcaagagcgagugcaucacccccaacggcagcauccccaacgacaagcccuuccagaacgugaacagaaucaccuacggcgccugccccagauacgugaagcacagcacccugaagcuggccaccggcaugagaaacgugcccgagaagcagaccagaggcaucuucggcgccaucgccggcuucaucgagaacggcugggagggcaugguggacggcugguacggcuucagacaccagaacagcgagggcagaggccaggccgccgaccugaagagcacccaggccgccaucgaccagaucaacggcaagcugaacagacugaucggcaagaccaacgagaaguuccaccagaucgagaaggaguucagcgagguggagggcagaauccaggaccuggagaaguacguggaggacagcaagaucgaccuguggagcuacaacgccgagcugcugguggcccuggagaaccagcacaccaucgaccugaccgacagcgagaugaacaagcuguucgagaagaccaagaagcagcugagagagaacgccgaggacaugggcaacggcugcuucaagaucuaccacaagugcgacaacgccugcaucggcagcaucagaaacggcaccuacgaccacaacguguacagagacgaggcccugaacaacagauuccagaucaagggcguggagcugaagagcggcuacaaggacuggauccuguggaucagcuucgccaucagcugcuuccugcugugcguggcccugcugggcuucaucaugugggccugccagaagggcaacaucagaugcaacaucugcaucuga

SEQ ID NO: 173302 - RNA, 1701 nt, Artificial Sequence; identical to SEQ ID NO: 173187
  derived and/or modified CDS sequence (opt4) from hemagglutinin__InfluenzaA__ALE31711

SEQ ID NO: 173303 - RNA, 1701 nt, Artificial Sequence; identical to SEQ ID NO: 173045
  derived and/or modified CDS sequence (opt4) from hemagglutinin__InfluenzaA__ALE31712

SEQ ID NO: 173304 - RNA, 1701 nt, Artificial Sequence
  derived and/or modified CDS sequence (opt4) from hemagglutinin__InfluenzaA__ALE31713
augaagaccaucaucgcccugagcuacauccugugccugguguucgcccagaagauccccggcaacgacaacagcaccgccacccugugccugggccaccacgccgugcccaacggcaccaucgugaagaccaucaccaacgacagaaucgaggugaccaacgccaccgagcuggugcagaacagcagcaucggcgagaucugcgacagcccccaccagauccuggacggcgagaacugcacccugaucgacgcccugcugggcgacccccagugcgacggcuuccagaacaagaagugggaccuguucguggagagaagcaaggccuacagcaacugcuaccccuacgacgugcccgacuacgccagccugagaagccugguggccagcagcggcacccuggaguucaacaacgagagcuucaacuggaccggcgugacccagaacggcaccagcagcgccugcaucagaaagagcagcagcagcuucuucagcagacugaacuggcugacccaccugaacuacaccuaccccgcccugaacgugaccaugcccaacaacgagcaguucgacaagcuguacaucuggggcauccaccaccccggcaccgacaaggaccagaucuuccuguacgccagaagcagcggcagaaucaccgugagcaccaagagaagccagcaggccgugauccccaacaucggcagcagacccagaaucagagacauccccagcagaaucagcaucuacuggaccaucgugaagcccggcgacauccugcugaucaacagcaccggcaaccugaucgcccccagaggcuacuucaagaucagaagcggcaagagcagcaucaugagaagcgacgcccccaucggcaagugcaagagcgagugcaucacccccaacggcagcauccccaacgacaagcccuuccagaacgugaacagaaucaccuacggcgccugccccagauacgugaagcacagcacccugaagcuggccaccggcaugagaaacauccccgagaagcagaccaagggcaucuucggcgccaucgccggcuucaucgagaacggcugggagggcaugguggacggcugguacggcuucagacaccagaacagcgagggcagaggccaggccgccgaccugaagagcacccaggccgccaucgaccagaucaacggcaagcugaacagacugaucggcaagaccaacgagaaguuccaccagaucgagaaggaguucagcgagguggagggcagaauccaggaccuggagaaguacguggaggacaccaagaucgaccuguggagcuacaacgccgagcugcugguggcccuggagaaccagcacaccaucgaccugaccgacagcgagaugaacaagcuguucgagaagaccaagaagcagcugagagagaacgccgaggacaugggcaacggcugcuucaagaucuaccacaagugcgacaacgccugcaucggcagcaucagaaacggcaccuacgaccacaacguguacagagacgaggcccugaacaacagauuccagaucaagggcguggagcugaagagcggcuacaaggacuggauccuguggaucagcuucgccaccagcugcuuccugcugugcguggcccugcugggcuucaucaugugggccugccagaagggcaacaucagaugcaacaucugcaucuga

SEQ ID NO: 173305 - RNA, 1701 nt, Artificial Sequence; identical to SEQ ID NO: 173159
  derived and/or modified CDS sequence (opt4) from hemagglutinin__InfluenzaA__ALE31714

SEQ ID NO: 173306 - RNA, 1701 nt, Artificial Sequence; identical to SEQ ID NO: 173159
  derived and/or modified CDS sequence (opt4) from hemagglutinin__InfluenzaA__ALE31715

SEQ ID NO: 173307 - RNA, 1701 nt, Artificial Sequence; identical to SEQ ID NO: 173187
  derived and/or modified CDS sequence (opt4) from hemagglutinin__InfluenzaA__ALE31716

SEQ ID NO: 173308 - RNA, 1701 nt, Artificial Sequence
  derived and/or modified CDS sequence (opt4) from hemagglutinin__InfluenzaA__ALE31717
augaagaccaucaucgcccugagcuacauccugugccugguguucgcccagaagauccccggcaacgacaacagcaccgccacccugugccugggccaccacgccgugcccaacggcaccaucgugaagaccaucaccaacgacagaaucgaggugaccaacgccaccgagcuggugcagaacagcagcaucggcgagaucugcgacagcccccaccagauccuggacggcgagaacugcacccugaucgacgcccugcugggcgacccccagugcgacggcuuccagaacaagaagugggaccuguucguggagagaagcaaggccuacagcaacugcuaccccuacgacgugcccgacuacgccagccugagaagccugguggccagcagcggcacccuggaguucaacaacgagagcuucaacuggaccggcgugacccagaacggcaccagcagcgccugcaucagaaagagcagcagcagcuucuucagcagacugaacuggcugacccaccugaacuacaaguaccccgcccugaacgugaccaugcccaacaacgagcaguucgacaagcuguacaucuggggcgugcaccaccccggcaccgacaaggaccagaucuuccuguacgccagaagcagcggcagaaucaccgugagcaccaagaccagccagcaggccgugauccccaacaucggcagcagacccagaaucagagacauccccagcagaaucagcaucuacuggaccaucgugaagcccggcgacauccugcugaucaacagcaccggcaaccugaucgcccccagaggcuacuucaagaucagaagcggcaagagcagcaucaugagaagcgacgcccccaucggcaagugcaagagcgagugcaucacccccaacggcagcauccccaacgacaagcccuuccagaacgugaacagaaccaccuacggcgccugccccagauacgugaagcacagcacccugaagcuggccaccggcaugagaaacgugcccgagaagcagaccagaggcaucuucggcgccaucgccggcuucaucgagaacggcugggagggcaugguggacggcugguacggcuucagacaccagaacagcgagggcagaggccaggccgccgaccugaagagcacccaggccgccaucgaccagaucaacggcaagcugaacagacugaucggcaagaccaacgagaaguuccaccagaucgagaaggaguucagcgagguggagggcagaauccaggaccuggagaaguacguggaggacaccaagaucgaccuguggagcuacaacgccgagcugcugguggcccuggagaaccagcacaccaucgaccugaccgacagcgagaugaacaagcuguucgagaagaccaagaagcagcugagagagaacgccgaggacaugggcaacggcugcuucaagaucuaccacaagugcgacaacgccugcaucggcagcaucagaaacggcaccuacgaccacaacguguacagagacgaggcccugaacaacagauuccagaucaagggcguggagcugaagagcggcuacaaggacuggauccuguggaucagcuucgccaucagcugcuuccugcugugcguggcccugcugggcuucaucaugugggccugccagaagggcaacaucagaugcaacaucugcaucuga

SEQ ID NO: 173309 - RNA, 1701 nt, Artificial Sequence; identical to SEQ ID NO: 173159
  derived and/or modified CDS sequence (opt4) from hemagglutinin__InfluenzaA__ALE31718

SEQ ID NO: 173310 - RNA, 1701 nt, Artificial Sequence
  derived and/or modified CDS sequence (opt4) from hemagglutinin__InfluenzaA__ALE31719
augaagaccaucaucgcccugagcuacauccugugccugguguucgcccagaagauccccggcaacgacaacagcaccgccacccugugccugggccaccacgccgugcccaacggcaccaucgugaagaccaucaccaacgacagaaucgaggugaccaacgccaccgagcuggugcagaacagcagcaucggcgagaucugcgacagcccccaccagauccuggacggcgagaacugcacccugaucgacgcccugcugggcgacccccagugcgacggcuuccagaacaagaagugggaccuguucguggagagaagcaaggccuacagcaacugcuaccccuacgacgugcccgacuacgccagccugagaagccugguggccagcagcggcacccuggaguucaacaacgagagcuucaacuggaccggcgugacccagaacggcaccagcagcgccugcaucagaaagagcagcagcagcuucuucagcagacugaacuggcugacccaccugaacuacaccuaccccgcccugaacgugaccaugcccaacaacgagcaguucgacaagcuguacaucuggggcgugcaccaccccggcaccgacaaggaccagaucuuccuguacgccagaagcagcggcagaaucaccgugagcaccaagagaagccagcaggccgugauccccaacaucggcagcagacccagaaucagagacauccccagcagaaucagcaucuacuggaccaucgugaagcccggcgacauccugcugaucaacagcaccggcaaccugaucgcccccagaggcuacuucaagaucagaagcggcaagagcagcaucaugagaagcgacgcccccaucggcaagugcaagagcgagugcaucacccccaacggcagcauccccaacgacaagcccuuccagaacgugaacagaaucaccuacggcgccugccccagauacgugaagcacagcacccugaagcuggccaccggcaugagaaacauccccgagaagcagaccagaggcaucuucggcgccaucgccggcuucaucgagaacggcugggagggcaugguggacggcugguacggcuucagacaccagaacagcgagggcagaggccaggccgccgaccugaagagcacccaggccgccaucgaccagaucaacggcaagcugaacagacugaucggcaagaccaacgagaaguuccaccagaucgagaaggaguucagcgagguggagggcagaauccaggaccuggagaaguacguggaggacaccaagaucgaccuguggagcuacaacgccgagcugcugguggcccuggagaaccagcacaccaucgaccugaccgacagcgagaugaacaagcuguucgagaagaccaagaagcagcugagagagaacgccgaggacaugggcaacggcugcuucaagaucuaccacaagugcgacaacgccugcaucggcagcaucagaaacggcaccuacgaccacaacguguacagagacgaggcccugaacaacagauuccagaucaagggcguggagcugaagagcggcuacaaggacuggauccuguggaucagcuucgccaucagcugcuuccugcugugcguggcccugcugggcuucaucaugugggccugccagaagggcaacaucagaugcaacaucugcaucuga

SEQ ID NO: 173311 - RNA, 1701 nt, Artificial Sequence; identical to SEQ ID NO: 173045
  derived and/or modified CDS sequence (opt4) from hemagglutinin__InfluenzaA__ALE31720

SEQ ID NO: 173312 - RNA, 1701 nt, Artificial Sequence; identical to SEQ ID NO: 173058
  derived and/or modified CDS sequence (opt4) from hemagglutinin__InfluenzaA__ALE31721

SEQ ID NO: 173313 - RNA, 1701 nt, Artificial Sequence; identical to SEQ ID NO: 173281
  derived and/or modified CDS sequence (opt4) from hemagglutinin__InfluenzaA__ALE31722

SEQ ID NO: 173314 - RNA, 1701 nt, Artificial Sequence
  derived and/or modified CDS sequence (opt4) from hemagglutinin__InfluenzaA__ALE31723
augaagaccaucaucgcccugagcuacauccugugccugguguucgcccagaagauccccggcaacgacaacagcaccgccacccugugccugggccaccacgccgugcccaacggcaccaucgugaagaccaucaccaacgacagaaucgaggugaccaacgccaccgagcuggugcagaacagcagcaucggcgagaucugcgacagcccccaccagauccuggacggcgagaacugcacccugaucgacgcccugcugggcgacccccagugcgacggcuuccagaacaagaagugggaccuguucguggagagaagcaaggccuacagcaacugcuaccccuacgacgugcccgacuacgccagccugagaagccugguggccagcagcggcacccuggaguucaacaacgagagcuucaacuggaccggcgugacccagaacggcaccagcagcgccugcaucagaaagagcagcagcagcuucuucagcagacugaacuggcugacccaccugaacuacaccuaccccgcccugaacgugaccaugcccaacaacgagcaguucgacaagcuguacaucuggggcgugcaccaccccggcaccgacaaggaccagaucuuccuguacgccagaagcagcggcagaaucaccgugagcaccaagagaagccagcaggccgugauccccaacaucggcagcagacccagaaucagagacauccccagcagaaucagcaucuacuggaccaucgugaagcccggcgacauccugcugaucaacagcaccggcaaccugaucgcccccagaggcuacuucaagaucagaagcggcaagagcagcaucaugagaagcgacgcccccaucggcaagugcaagagcgagugcaccacccccaacggcagcauccccaacgacaagcccuuccagaacgugaacagaaucaccuacggcgccugccccagauacgugaagcacagcacccugaagcuggccaccggcaugagaaacgugcccgagaagcagaccagaggcaucuucggcgccaucgccggcuucaucgagaacggcugggagggcaugguggacggcugguacggcuucagacaccagaacagcgagggcagaggccaggccgccgaccugaagagcacccaggccgccaucgaccagaucaacggcaagcugaacagacugaucggcaagaccaacgagaaguuccaccagaucgagaaggaguucagcgagguggagggcagaauccaggaccuggagaaguacguggaggacaccaagaucgaccuguggagcuacaacgccgagcugcugguggcccuggagaaccagcacaccaucgaccugaccgacagcgagaugaacaagcuguucgagaagaccaagaagcagcugagagagaacgccgaggacaugggcaacggcugcuucaagaucuaccacaagugcgacaacgccugcaucggcagcaucagaaacggcaccuacgaccacaacguguacagagacgaggcccugaacaacagauuccagaucaagggcguggagcugaagagcggcuacaaggacuggauccuguggaucagcuucgccaucagcugcuuccugcugugcguggcccugcugggcuucaucaugugggccugccagaagggcaacaucagaugcaacaucugcaucuga

SEQ ID NO: 173315 - RNA, 1701 nt, Artificial Sequence; identical to SEQ ID NO: 172501
  derived and/or modified CDS sequence (opt4) from hemagglutinin__InfluenzaA__ALE31724

SEQ ID NO: 173316 - RNA, 1701 nt, Artificial Sequence; identical to SEQ ID NO: 172501
  derived and/or modified CDS sequence (opt4) from hemagglutinin__InfluenzaA__ALE31725

SEQ ID NO: 173317 - RNA, 1701 nt, Artificial Sequence; identical to SEQ ID NO: 172501
  derived and/or modified CDS sequence (opt4) from hemagglutinin__InfluenzaA__ALE31726

SEQ ID NO: 173318 - RNA, 1701 nt, Artificial Sequence; identical to SEQ ID NO: 172501
  derived and/or modified CDS sequence (opt4) from hemagglutinin__InfluenzaA__ALE31727

SEQ ID NO: 173319 - RNA, 1701 nt, Artificial Sequence
  derived and/or modified CDS sequence (opt4) from hemagglutinin__InfluenzaA__ALE31728
augaagaccaucaucgcccugagcuacauccugugccugguguucgcccagaagauccccggcaacgacaacagcaccgccacccugugccugggccaccacgccgugcccaacggcaccaucgugaagaccaucaccaacgacagaaucgaggugaccaacgccaccgagcuggugcagaacagcagcaucggcgagaucugcgacagcccccaccagauccuggacggcgagaacugcacccugaucgacgcccugcugggcgacccccagugcgacggcuuccagaacaagaagugggaccuguucguggagagaagcaaggccuacagcaacugcuaccccuacgacgugcccgacuacgccagccugagaagccugguggccagcagcggcacccuggaguucaacaacgagagcuucaacuggaccggcgugacccagaacggcaccagcagcgccugcaucagaagaagcagcagcagcuucuucagcagacugaacuggcugacccaccugaacuacaccuaccccgcccugaacgugaccauccccaacaacgagcaguucgacaagcuguacaucuggggcgugcaccaccccggcaccgacaaggaccagaucuuccuguacgcccagagcagcggcagaaucaccgugagcaccaagagaagccagcaggccgugauccccaacaucggcagcagacccagaaucagagacauccccagcagaaucagcaucuacuggaccaucgugaagcccggcgacauccugcugaucaacagcaccggcaaccugaucgcccccagaggcuacuucaagaucagaagcggcaagagcagcaucaugagaagcgacgcccccaucggcaagugcaagagcgagugcaucacccccaacggcagcauccccaacgacaagcccuuccagaacgugaacagaaucaccuacggcgccugccccagauacgugaagcacagcacccugaagcuggccaccggcaugagaaacgugcccgagaagcagaccagaggcaucuucggcgccaucgccggcuucaucgagaacggcugggagggcaugguggacggcugguacggcuucagacaccagaacagcgagggcagaggccaggccgccgaccugaagagcacccaggccgccaucgaccagaucaacggcaagcugaacagacugaucggcaagaccaacgagaaguuccaccagaucgagaaggaguucagcgagguggagggcagaauccaggaccuggagaaguacguggaggacaccaagaucgaccuguggagcuacaacgccgagcugcugguggcccuggagaaccagcacaccaucgaccugaccgacagcgagaugaacaagcuguucgagaagaccaagaagcagcugagagagaacgccgaggacaugggcaacggcugcuucaagaucuaccacaagugcgacaacgccugcaucggcagcaucagaaacggcaccuacgaccacaacguguacagagacgaggcccugaacaacagauuccagaucaagggcguggagcugaagagcggcuacaaggacuggauccuguggaucagcuucgccaucagcugcuuccugcugugcguggcccugcugggcuucaucaugugggccugccagaagggcaacaucagaugcaacaucugcaucuga

SEQ ID NO: 173320 - RNA, 1701 nt, Artificial Sequence
  derived and/or modified CDS sequence (opt4) from hemagglutinin__InfluenzaA__ALE31729
augaagaccaucaucgcccugagcuacauccugugccugguguucgcccagaagauccccggcaacgacaacagcaccgccacccugugccugggccaccacgccgugcccaacggcaccaucgugaagaccaucaccaacgacagaaucgaggugaccaacgccaccgagcuggugcagaacagcagcaucggcgagaucugcgacagcccccaccagaucaucgacggcgagaacugcacccugaucgacgcccugcugggcgacccccagugcgacggcuuccagaacaagaagugggaccuguucguggagagaagcaaggccuacagcaacugcuaccccuacgacgugcccgacuacgccagccugagaagccugguggccagcagcggcacccuggaguucaacaacgagagcuucaacuggaccggcgugacccagaacggcaccagcagcgccugcaucagaagaagcagcagcagcuucuucagcagacugaacuggcugacccaccugaacuacaccuaccccgcccugaacgugaccaugcccaacaacgagcaguucgacaagcuguacaucuggggcgugcaccaccccggcaccgacaaggaccagaucuuccuguacgcccagagcagcggcagaaucaccgugagcaccaagagaagccagcaggccgugauccccaacaucggcagcagacccagaaucagagacauccccagcagaaucagcaucuacuggaccaucgugaagcccggcgacauccugcugaucaacagcaccggcaaccugaucgcccccagaggcuacuucaagaucagaagcggcaagagcagcaucaugagaagcgacgcccccaucggcaagugcaagagcgagugcaucacccccaacggcagcauccccaacgacaagcccuuccagaacgugaacagaaucaccuacggcgccugccccagauacgugaagcacagcacccugaagcuggccaccggcaugagaaacgugcccgagaagcagaccagaggcaucuucggcgccaucgccggcuucaucgagaacggcugggagggcaugguggacggcugguacggcuucagacaccagaacagcgagggcagaggccaggccgccgaccugaagagcacccaggccgccaucgaccagaucaacggcaagcugaacagacugaucggcaagaccaacgagaaguuccaccagaucgagaaggaguucagcgagguggagggcagaauccaggaccuggagaaguacguggaggacaccaagaucgaccuguggagcuacaacgccgagcugcugguggcccuggagaaccagcacaccaucgaccugaccgacagcgagaugaacaagcuguucgagaagaccaagaagcagcugagagagaacgccgaggacaugggcaacggcugcuucaagaucuaccacaagugcgacaacgccugcaucggcagcaucagaaacggcaccuacgaccacaacguguacagagacgaggcccugaacaacagauuccagaucaagggcguggagcugaagagcggcuacaaggacuggauccuguggaucagcuucgccaucagcugcuuccugcugugcguggcccugcugggcuucaucaugugggccugccagaagggcaacaucagaugcaacaucugcaucuga

SEQ ID NO: 173321 - RNA, 1701 nt, Artificial Sequence; identical to SEQ ID NO: 172501
  derived and/or modified CDS sequence (opt4) from hemagglutinin__InfluenzaA__ALE31730

SEQ ID NO: 173322 - RNA, 1701 nt, Artificial Sequence
  derived and/or modified CDS sequence (opt4) from hemagglutinin__InfluenzaA__ALE31731
augaagaccaucaucgcccugagcuacauccugugccagguguucgcccagaagauccccggcaacgacaacagcaccgccacccugugccugggccaccacgccgugcccaacggcaccaucgugaagaccaucaccaacgacagaaucgaggugaccaacgccaccgagcuggugcagaacagcagcaucggcgagaucugcgacagcccccaccagauccuggacggcgagaacugcacccugaucgacgcccugcugggcgacccccagugcgacggcuuccagaacaagaagugggaccuguucguggagagaagcaaggccuacagcaacugcuaccccuacgacgugcccgacuacgccagccugagaagccugguggccagcagcggcacccuggaguucaacaacgagagcuucaacuggaccggcgugacccagaacggcaccagcagcgccugcaucagaaagagcagcagcagcuucuucagcagacugaacuggcugacccaccugaacuacaccuaccccgcccugaacgugaccaugcccaacaacgagcaguucgacaagcuguacaucuggggcgugcaccaccccggcaccgacaaggaccagaucuuccuguacgccagaagcagcggcagaaucaccgugagcaccaagagaagccagcaggccgugauccccaacaucggcagcagacccagaaucagagacauccccagcagaaucagcaucuacuggaccaucgugaagcccggcgacauccugcugaucaacagcaccggcaaccugaucgcccccagaggcuacuucaagaucagaagcggcaagagcagcaucaugagaagcgacgcccccaucggcaagugcaagagcgagugcaucacccccaacggcagcauccccaacgacaagcccuuccagaacgugaacagaaucaccuacggcgccugccccagauacgugaagcacagcacccugaagcuggccaccggcaugagaaacgugcccgagaagcagaccagaggcaucuucggcgccaucgccggcuucaucgagaacggcugggagggcaugguggacggcugguacggcuucagacaccagaacagcgagggcagaggccaggccgccgaccugaagagcacccaggccgccaucgaccagaucaacggcaagcugaacagacugaucggcaagaccaacgagaaguuccaccagaucgagaaggaguucagcgagguggagggcagaauccaggaccuggagaaguacguggaggacaccaagaucgaccuguggagcuacaacgccgagcugcugguggcccuggagaaccagcacaccaucgaccugaccgacagcgagaugaacaagcuguucgagaagaccaagaagcagcugagagagaacgccgaggacaugggcaacggcugcuucaagaucuaccacaagugcgacaacgccugcaucggcagcaucagaaacggcaccuacgaccacaacguguacagagacgaggcccugaacaacagauuccagaucaagggcguggagcugaagagcggcuacaaggacuggauccuguggaucagcuucgccaucagcugcuuccugcugugcguggcccugcugggcuucaucaugugggccugccagaagggcaacaucagaugcaacaucugcaucuga

SEQ ID NO: 173323 - RNA, 1701 nt, Artificial Sequence; identical to SEQ ID NO: 173159
  derived and/or modified CDS sequence (opt4) from hemagglutinin__InfluenzaA__ALE31732

SEQ ID NO: 173324 - RNA, 1701 nt, Artificial Sequence; identical to SEQ ID NO: 173159
  derived and/or modified CDS sequence (opt4) from hemagglutinin__InfluenzaA__ALE31733

SEQ ID NO: 173325 - RNA, 1701 nt, Artificial Sequence
  derived and/or modified CDS sequence (opt4) from hemagglutinin__InfluenzaA__ALE31734
augaagaccaucaucgcccugagcuacauccugugccugguguucgcccagaagauccccggcaacgacaacagcaccgccacccugugccugggccaccacgccgugcccaacggcaccaucgugaagaccaucaccaacgacagaaucgaggugaccaacgccaccgagcuggugcagaacagcagcaucggcgagaucugcgacagcccccaccagauccuggacggcgagaacugcacccugaucgacgcccugcugggcgacccccagugcgacggcuuccagaacaagaagugggaccuguucguggagagaagcaaggccuacagcaacugcuaccccuacgacgugcccgacuacgccagccugagaagccugguggccagcagcggcacccuggaguucaacaacgagagcuucaacuggaccggcgugacccagaacggcaccagcagcgccugcaucagaaagagcagcagcagcuucuucagcagacugaacuggcugacccaccugaaguacaccuaccccgcccugaacgugaccaugcccaacaacgagcaguucgacaagcuguacaucuggggcgugcaccaccccggcaccgacaaggaccagaucuuccuguacgccagaagcagcggcagaaucaccgugagcaccaagagaagccagcaggccgugauccccaacaucggcuucagacccagaaucagagacauccccagcagaaucagcaucuacuggaccaucgugaagcccggcgacauccugcugaucaacagcaccggcaaccugaucgcccccagaggcuacuucaagaucagaagcggcaagagcagcaucaugagaagcgacgcccccaucggcaagugcaagagcgagugcaucacccccaacggcagcauccccaacgacaagcccuuccagaacgugaacagaaucaccuacggcgccugccccagauacgugaagcacagcacccugaagcuggccaccggcaugagaaacgugcccgagaagcagaccagaggcaucuucggcgccaucgccggcuucaucgagaacggcugggagggcaugguggacggcugguacggcuucagacaccagaacagcgagggcagaggccaggccgccgaccugaagagcacccaggccgccaucgaccagaucaacggcaagcugaacagacugaucggcaagaccaacgagaaguuccaccagaucgagaaggaguucagcgagguggagggcagaauccaggaccuggagaaguacguggaggacaccaagaucgaccuguggagcuacaacgccgagcugcugguggcccuggagaaccagcacaccaucgaccugaccgacagcgagaugaacaagcuguucgagaagaccaagaagcagcugagagagaacgccgaggacaugggcaacggcugcuucaagaucuaccacaagugcgacaacgccugcaucggcagcaucagaaacggcaccuacgaccacaacguguacagagacgaggcccugaacaacagauuccagaucaagggcguggagcugaagagcggcuacaaggacuggauccuguggaucagcuucgccaucagcugcuuccugcugugcguggcccugcugggcuucaucaugugggccugccagaagggcaacaucagaugcaacaucugcaucuga

SEQ ID NO: 173326 - RNA, 1701 nt, Artificial Sequence; identical to SEQ ID NO: 173159
  derived and/or modified CDS sequence (opt4) from hemagglutinin__InfluenzaA__ALE31735

SEQ ID NO: 173327 - RNA, 1701 nt, Artificial Sequence; identical to SEQ ID NO: 173058
  derived and/or modified CDS sequence (opt4) from hemagglutinin__InfluenzaA__ALE31736

SEQ ID NO: 173328 - RNA, 1701 nt, Artificial Sequence; identical to SEQ ID NO: 173058
  derived and/or modified CDS sequence (opt4) from hemagglutinin__InfluenzaA__ALE31737

SEQ ID NO: 173329 - RNA, 1701 nt, Artificial Sequence
  derived and/or modified CDS sequence (opt4) from hemagglutinin__InfluenzaA__ALE31738
augaagaccaucaucgcccugagcuacauccugugccugguguucgcccagaagauccccggcaacgacaacagcaccgccacccugugccugggccaccacgccgugcccaacggcaccaucgugaagaccaucaccaacgacagaaucgaggugaccaacgccaccgagcuggugcagaacagcagcaucggcgagaucugcgacagcccccaccagauccuggacggcgagaacugcacccugaucgacgcccugcugggcgacccccagugcgacggcuuccagaacaagaagugggaccuguucguggagagaagcaaggccuacagcaacugcuaccccuacgacgugcccgacuacgccagccugagaagccugguggccagcagcggcacccuggaguucaacaacgagagcuucaacuggaccggcgugacccagaacggcaccagcagcgccugcaucagaagaagcagcagcagcuucuucagcagacugaacuggcugacccaccugaacuacaaguaccccgcccugaacgugaccaugcccaacaacgagcaguucgacaagcuguacaucuggggcgugcaccaccccggcaccgacaaggaccagaucuuccuguacgcccagagcagcggcagaaucaccgugagcaccaagggcagccagcaggccgugauccccaacaucggcagcagacccagaaucagagacauccccagcagaaucagcaucuacuggaccaucgugaagcccggcgacauccugcugaucaacagcaccggcaaccugaucgcccccagaggcuacuucaagaucagaagcggcaagagcagcaucaugagaagcgacgcccccaucggcaagugcaagagcgagugcaucacccccaacggcagcauccccaacgacaagcccuuccagaacgugaacagaaucaccuacggcgccugccccagauacgugaagcacagcacccugaagcuggccaccggcaugagaaacgugcccgagaagcagaccagaggcaucuucggcgccaucgccggcuucaucgagaacggcugggagggcaugguggacggcugguacggcuucagacaccagaacagcgagggcagaggccaggccgccgaccugaagagcacccaggccgccaucgaccagaucaacggcaagcugaacagacugaucggcaagaccaacgagaaguuccaccagaucgagaaggaguucagcgagguggagggcagaauccaggaccuggagaaguacguggaggacaccaagaucgaccuguggagcuacaacgccgagcugcugguggcccuggagaaccagcacaccaucgaccugaccgacagcgagaugaacaagcuguucgagaagaccaagaagcagcugagagagaacgccgaggacaugggcaacggcugcuucaagaucuaccacaagugcgacaacgccugcaucggcagcaucagaaacggcaccuacgaccacaacguguacagagacgaggcccugaacaacagauuccagaucaagggcguggagcugaagagcggcuacaaggacuggauccuguggaucagcuucgccaucagcugcuuccugcugugcguggcccugcugggcuucaucaugugggccugccagaagggcaacaucagaugcaacaucugcaucuga

SEQ ID NO: 173330 - RNA, 1701 nt, Artificial Sequence; identical to SEQ ID NO: 172501
  derived and/or modified CDS sequence (opt4) from hemagglutinin__InfluenzaA__ALE31739

SEQ ID NO: 173331 - RNA, 1701 nt, Artificial Sequence
  derived and/or modified CDS sequence (opt4) from hemagglutinin__InfluenzaA__ALE31741
augaagaccaucaucgcccugagcuacauccugugccugguguucgcccagaagcugcccgagaacgacaacagcaccgccacccugugccugggccaccacgccgugcccaacggcaccaucgugaagaccaucaccagcgacagaaucgaggugaccaacgccaccgagcuggugcagaacagcagcaucagcgagaucugcgacagcccccaccagauccuggacggcaagaacugcacccugaucgacgcccugcugggcgacccccagugcgacggcuuccagaacaagaagugggaccuguucguggagagaagcaaggccuacagcaacugcuaccccuacgacgugcccgacuacgccagccugagaagccugguggccagcagcggcacccuggaguucaacgacgagagcuucaacugggccggcgugacccagaacggcaccagcagcgccugcaucagaggcagcaacagcagcuucuucagcagacugaacuggcugacccacagcaacuucaaguaccccgcccugaacgugaccaugcccaacaacgagcaguucgacaagcuguacaucuggggcgugcaccaccccggcaccgacaaggaccagaucuuccuguacgcccagagcagcggcagaaucaccgugagcaccaagagaagccagcaggccgugauccccaacaucggcagcagacccagaaucagaaacauccccagcagaaucagcaucuacuggaccaucgugaagcccggcgacauccugcugaucaacagcaccggcaaccugaucgcccccagaggcuacuucaagaucagaagcggcaagagcagcaucaugagaagcgacgcccccaucggcaagugcaagagcgagugcaucacccccaacggcagcauccccaacgacaagcccuuccagaacgugaacagaaucaccuacggcgccugccccagauacgugaagcagagcacccugaagcuggccaccggcaugagaaacgugcccgagaagcagaccagaggcaucuucggcgccaucgccggcuucaucgagaacggcugggagggcaugaaggacggcugguacggcuucagacaccagaacagcgagggcagaggccaggccgccgaccugaagagcacccaggccgccaucgaccagaucaacggcaagcugaacagacugaucggcaagaccaacgagaaguuccaccagaucgagaaggaguucagcgagguggagggcagaauccaggaccuggagaaguacguggaggacaccaagaucgaccuguggagcuacaacgccgagcugcugguggcccuggagaaccagcacaccaucgaccugaccgacagcgagaugaacaagcuguucgagaagaccaagaagcagcugagagagaacgccgaggacaugggcaacggcugcuucaagaucuaccacaagugcgacaacgccugcaucggcagcaucagaaacggcaccuacgaccacgacguguacagagacgaggcccugaacaacagauuccagaucaagggcguggagcugaagagcggcuacaaggacuggauccuguggaucagcuucgccaucagcugcuuccugcugugcguggcccugcugggcuucaucaugugggccugccagaagggcaacaucagaugcaacaucugcaucuga

SEQ ID NO: 173332 - RNA, 1701 nt, Artificial Sequence
  derived and/or modified CDS sequence (opt4) from hemagglutinin__InfluenzaA__ALE31742
augaagaccaucaucgcccugagcuacauccugugccugggcuucgcccagaagauccccggcaacgacaacagcaccgccacccugugccugggccaccacgccgugcccaacggcaccaucgugaagaccaucaccaacgacagaaucgaggugaccaacgccaccgagcuggugcagaacagcagcaucggcgagaucugcgacagcccccaccagauccuggacggcgagaacugcacccugaucgacgcccugcugggcgacccccagugcgacggcuuccagaacaagaagugggaccuguucguggagagaagcaaggccuacagcaacugcuaccccuacgacgugcccgacuacgccagccugagaagccugguggccagcagcggcacccuggaguucaacaacgagagcuucaacuggaccggcgugacccagaacggcaccagcagcgccugcaucagaagaagcagcagcagcuucuucagcagacugaacuggcugacccaccugaacuacaccuaccccgcccugaacgugaccaugcccaacaacgagcaguucgacaagcuguacaucuggggcgugcaccaccccggcaccgacaaggaccagaucuuccuguacgcccagagcagcggcagaaucaccgugagcaccaagagaagccagcaggccgugauccccaacaucggcagcagacccagaaucagagacauccccagcagaaucagcaucuacuggaccaucgugaagcccggcgacauccugcugaucaacagcaccggcaaccugaucgcccccagaggcuacuucaagaucagaagcggcaagagcagcaucaugagaagcgacgcccccaucggcaagugcaagagcgagugcaucacccccaacggcagcauccccaacgacaagcccuuccagaacgugaacagagugaccuacggcgccugccccagauacgugaagcacagcacccugaagcuggccaccggcaugagaaacgugcccgagaagcagaccagaggcaucuucggcgccaucgccggcuucaucgagaacggcugggagggcaugguggacggcugguacggcuucagacaccagaacagcgagggcagaggccaggccgccgaccugaagagcacccaggccgccaucgaccagaucaacggcaagcugaacagacugaucggcaagaccaacgagaaguuccaccagaucgagaaggaguucagcgagguggagggcagaauccaggaccuggagaaguacguggaggacaccaagaucgaccuguggagcuacaacgccgagcugcugguggcccuggagaaccagcacaccaucgaccugaccgacagcgagaugaacaagcuguucgagaagaccaagaagcagcugagagagaacgccgaggacaugggcaacggcugcuucaagaucuaccacaagugcgacaacgccugcaucggcagcaucagaaacggcaccuacgaccacaacguguacagagacgaggcccugaacaacagauuccagaucaagggcguggagcugaagagcggcuacaaggacuggauccuguggaucagcuucgccaucagcugcuuccugcugugcguggcccugcugggcuucaucaugugggccugccagaagggcaacaucagaugcaacaucugcaucuga

SEQ ID NO: 173333 - RNA, 1701 nt, Artificial Sequence; identical to SEQ ID NO: 173058
  derived and/or modified CDS sequence (opt4) from hemagglutinin__InfluenzaA__ALE31743

SEQ ID NO: 173334 - RNA, 1701 nt, Artificial Sequence; identical to SEQ ID NO: 172501
  derived and/or modified CDS sequence (opt4) from hemagglutinin__InfluenzaA__ALE31744

SEQ ID NO: 173335 - RNA, 1701 nt, Artificial Sequence
  derived and/or modified CDS sequence (opt4) from hemagglutinin__InfluenzaA__ALE31745
augaagaccaucaucgcccugagcuacauccugugccugguguucgcccagaagcugcccggcaacgacaacagcaccgccacccugugccugggccaccacgccgugcccaacggcaccaucgugaagaccaucaccaacgacagaaucgaggugaccaacgccaccgagcuggugcagaacagcagcaucggcgagaucugcgacagcccccaccagauccuggacggcaagaacugcacccugaucgacgcccugcugggcgacccccagugcgacggcuuccagaacaagagaugggaccuguucguggagagaagcaaggccuacagcaacugcuaccccuacgacgugcccgacuacgccagccugagaagccugguggccagcagcggcacccuggaguucaacgacgagagcuucaacugggccggcgugacccagaacggcaccagcagcgccugcaucagaggcagcaacagcagcuucuucagcagacugaacuggcugacccacagcaacuucaaguaccccgcccugaacgugaccaugcccaacaacgagcaguucgacaagcuguacaucuggggcgugcaccaccccggcaccgacaaggaccagaucuuccuguacgcccagagcagcggcagaaucaccgugagcaccaagagaagccagcaggccgugauccccaacaucggcagcagacugagaaucagaaacauccccagcagaaucagcaucuacuggaccaucgugaagcccggcgacauccugcugaucaacagcaccggcaaccugaucgcccccagaggcuacuucaagauccagagcggcaagagcagcaucaugagaagcgacgcccccaucggcaagugcaagagcgagugcaucacccccaacggcagcauccccaacgacaagcccuuccagaacgugaacaagaucaccuacggcgccugccccagauacgugaagcagagcacccugaagcuggccaccggcaugagaaacgugcccgagaagcagaccagaggcaucuucggcgccaucgccggcuucaucgagaacggcugggagggcaugaaggacggcugguacggcuucagacaccagaacagcgagggcagaggccaggccgccgaccugaagagcacccaggccgccaucgaccagaucaacggcaagcugaacagacugaucggcaagaccaacgagaaguuccaccagaucgagaaggaguucagcgagguggagggcagaauccaggaccuggagaaguacguggaggacaccaagaucgaccuguggagcuacaacgccgagcugcugguggcccuggagaaccagcacaccaucgaccugaccgacagcgagaugaacaagcuguucgagaagaccaagaagcagcugagagagaacgccgaggacaugggcaacggcugcuucaagaucuaccacaagugcgacaacgccugcaucggcagcaucagaaacggcaccuacgaccacgacguguacagagacgaggcccugaacaacagauuccagaucaagggcguggagcugaagagcggcuacaaggacuggauccuguggaucagcuucgccaucagcugcuuccugcugugcguggcccugcugggcuucaucaugugggccugccagaagggcaacaucagaugcaacaucugcaucuga

SEQ ID NO: 173336 - RNA, 1701 nt, Artificial Sequence
  derived and/or modified CDS sequence (opt4) from hemagglutinin__InfluenzaA__ALE31747
augaagaccaucaucgcccugagcuacauccugugccugguguucgcccagaagcugcccggcaacgacaacagcaccgccacccugugccugggccaccacgccgugcccaacggcaccaucgugaagaccaucaccaacgacagaaucgaggugaccaacgccaccgagcuggugcagaacagcagcaucggcgagaucugcgacagcccccaccagauccuggacggcaagaacugcacccugaucgacgcccugcugggcgacccccagugcgacggcuuccagaacaagagaugggaccuguucguggagagaagcaaggccuacagcaacugcuaccccuacgacgugcccgacuacgccagccugagaagccugguggccagcagcggcacccuggaguucaacgacgagagcuucaacugggccggcgugacccagaacggcaccagcagcgccugcaucagaggcagcaacagcagcuucuucagcagacugaacuggcugacccacagcaacuucaaguaccccgcccugaacgugaccaugcccaacaacgagcaguucgacaagcuguacaucuggggcgugcaccaccccggcaccgacaaggaccagaucuuccuguacgcccagagcagcggcagaaucaccgugagcaccaagagaagccagcaggccgugauccccaacaucggcagcagacccagaaucagaaacauccccagcagaaucagcaucuacuggaccaucgugaagcccggcgacauccugcugaucaacagcaccggcaaccugaucgcccccagaggcuacuucaagauccagagcggcaagagcagcaucaugagaagcgacgcccccaucggcaagugcaagagcgagugcaucacccccaacggcagcauccccaacgacaagcccuuccagaacgugaacagaaucaccuacggcgccugccccagauacgugaagcagagcacccugaagcuggccaccggcaugagaaacgugcccgagaagcagaccagaggcaucuucggcgccaucgccggcuucaucgagaacggcugggagggcaugaaggacggcugguacggcuucagacaccagaacagcgagggcagaggccaggccgccgaccugaagagcacccaggccgccaucgaccagaucaacggcaagcugaacagacugaucggcaagaccaacgagaaguuccaccagaucgagaaggaguucagcgagguggagggcagagugcaggaccuggagaaguacguggaggacaccaagaucgaccuguggagcuacaacgccgagcugcugguggcccuggagaaccagcacaccaucgaccugaccgacagcgagaugaacaagcuguucgagaagaccaagaagcagcugagagagaacgccgaggacaugggcaacggcugcuucaagaucuaccacaagugcgacaacgccugcaucggcagcaucagaaacggcaccuacgaccacgacguguacagagacgaggcccugaacaacagauuccagaucaagggcguggagcugaagagcggcuacaaggacuggauccuguggaucagcuucgccaucagcugcuuccugcugugcguggcccugcugggcuucaucaugugggccugccagaagggcaacaucagaugcaacaucugcaucuga

SEQ ID NO: 173337 - RNA, 1701 nt, Artificial Sequence; identical to SEQ ID NO: 173058
  derived and/or modified CDS sequence (opt4) from hemagglutinin__InfluenzaA__ALE31748

SEQ ID NO: 173338 - RNA, 1701 nt, Artificial Sequence; identical to SEQ ID NO: 172501
  derived and/or modified CDS sequence (opt4) from hemagglutinin__InfluenzaA__ALE31749

SEQ ID NO: 173339 - RNA, 1701 nt, Artificial Sequence; identical to SEQ ID NO: 173045
  derived and/or modified CDS sequence (opt4) from hemagglutinin__InfluenzaA__ALE31750

SEQ ID NO: 173340 - RNA, 1701 nt, Artificial Sequence
  derived and/or modified CDS sequence (opt4) from hemagglutinin__InfluenzaA__ALE31751
augaagaccaucaucgcccugagcuacauccugugccugguguucgcccagaagauccccggcaacgacaacagcaccgccacccugugccugggccaccacgccgugcccaacggcaccaucgugaagaccaucaccaacgacagaaucgaggugaccaacgccaccgagcuggugcagaacagcagcaucggcgagaucugcgacagcccccaccagauccuggacggcgagaacugcacccugaucgacgcccugcugggcgacccccagugcgacggcuuccagaacaagaagugggaccuguucguggagagaagcaaggccuacagcaacugcuaccccuacgacgugcccgacuacgccagccugagaagccugguggccagcagcggcacccuggaguucaacaacgagagcuucaacuggaccggcgugacccagaacggcaccagcagcgccugcaucagaagaagcagcagcagcuucuucagcagacugaacuggcugacccaccuggacuacaccuaccccgcccugaacgugaccaugcccaacaacgagcaguucgacaagcuguacaucuggggcgugcaccaccccggcaccgacaaggaccagaucuuccuguacgcccagagcagcggcagaaucaccgugagcaccaagagaagccagcaggccgugauccccaacaucggcagcagacccagaaucagagacauccccagcagaaucagcaucuacuggaccaucgugaagcccggcgacauccugcugaucaacagcaccggcaaccugaucgcccccagaggcuacuucaagaucagaagcggcaagagcagcaucaugagaagcgacgcccccaucggcaagugcaagagcgagugcaucacccccaacggcagcauccccaacgacaagcccuuccagaacgugaacagaaucaccuacggcgccugccccagauacgugaagcacagcacccugaagcuggccaccggcaugagaaacgugcccgagaagcagaccagaggcaucuucggcgccaucgccggcuucaucgagaacggcugggagggcaugguggacggcugguacggcuucagacaccagaacagcgagggcagaggccaggccgccgaccugaagagcacccaggccgccaucgaccagaucaacggcaagcugaacagacugaucggcaagaccaacgagaaguuccaccagaucgagaaggaguucagcgagguggagggcagaauccaggaccuggagaaguacguggaggacaccaagaucgaccuguggagcuacaacgccgagcugcugguggcccuggagaaccagcacaccaucgaccugaccgacagcgagaugaacaagcuguucgagaagaccaagaagcagcugagagagaacgccgaggacaugggcaacggcugcuucaagaucuaccacaagugcgacaacgccugcaucggcagcaucagaaacggcaccuacgaccacaacguguacagagacgaggcccugaacaacagauuccagaucaagggcguggagcugaagagcggcuacaaggacuggauccuguggaucagcuucgccaucagcugcuuccugcugugcguggcccugcugggcuucaucaugugggccugccagaagggcaacaucagaugcaacaucugcaucuga

SEQ ID NO: 173341 - RNA, 1701 nt, Artificial Sequence; identical to SEQ ID NO: 172501
  derived and/or modified CDS sequence (opt4) from hemagglutinin__InfluenzaA__ALE31752

SEQ ID NO: 173342 - RNA, 1701 nt, Artificial Sequence; identical to SEQ ID NO: 173045
  derived and/or modified CDS sequence (opt4) from hemagglutinin__InfluenzaA__ALE31753

SEQ ID NO: 173343 - RNA, 1701 nt, Artificial Sequence; identical to SEQ ID NO: 172501
  derived and/or modified CDS sequence (opt4) from hemagglutinin__InfluenzaA__ALE31754

SEQ ID NO: 173344 - RNA, 1701 nt, Artificial Sequence
  derived and/or modified CDS sequence (opt4) from hemagglutinin__InfluenzaA__ALE31755
augaagaccaucaucgcccugagcuacauccugugccugguguucgcccagaagcugcccgagaacgacaacagcaccgccacccugugccugggccaccacgccgugcccaacggcaccaucgugaagaccaucaccagcgaccagaucgaggugaccaacgccaccgagcuggugcagaacagcagcaucggcgagaucugcgacagcccccaccagauccuggacggcaagaacugcacccugaucgacgcccugcugggcgacccccagugcgacggcuuccagaacaagaagugggaccuguucguggagagaagcaaggccuacagcaacugcuaccccuacgacgugcccgacuacgccagccugagaagccugguggccagcagcggcacccuggaguucaacgacgagagcuucaacugggccggcgugacccagaacggcaccagcagcgccugcaucagaggcagcaacagcagcuucuucagcagacugaacuggcugacccacagcaacuucaaguaccccgcccugaacgugaccaugcccaacaacgagcaguucgacaagcuguacaucuggggcgugcaccaccccggcaccgacaaggaccagaucuuccuguacgcccagagcagcggcagaaucaccgugagcaccaagagaagccagcaggccgugauccccaacaucggcagcagacccagaaucagaaacauccccagcagaaucagcaucuacuggaccaucgugaagcccggcgacauccugcugaucaacagcaccggcaaccugaucgcccccagaggcuacuucaagaucagaagcggcaagagcagcaucaugagaagcgacgcccccaucggcaagugcaagagcgagugcaucacccccaacggcagcauccccaacgacaagcccuuccagaacgugaacagaaucaccuacggcgccugccccagauacgugaagcagagcacccugaagcuggccaccggcaugagaaacgugcccgagaagcagaccagaggcaucuucggcgccaucgccggcuucaucgagaacggcugggagggcaugaaggacggcugguacggcuucagacaccagaacagcgagggcagaggccaggccgccgaccugaagagcacccaggccgccaucgaccagaucaacggcaagcugaacagacugaucggcaagaccaacgagaaguuccaccagaucgagaaggaguucagcgagguggagggcagaauccaggaccuggagaaguacguggaggacaccaagaucgaccuguggagcuacaacgccgagcugcugguggcccuggagaaccagcacaccaucgaccugaccgacagcgagaugaacaagcuguucgagaagaccaagaagcagcugagagagaacgccgaggacaugggcaacggcugcuucaagaucuaccacaagugcgacaacgccugcaucggcagcaucagaaacggcaccuacgaccacaacguguacagagacgaggcccugaacaacagauuccagaucaagggcguggagcugaagagcggcuacaaggacuggauccuguggaucagcuucgccaucagcugcuuccugcugugcguggcccugcugggcuucaucaugugggccugccagaagggcaacaucagaugcaacaucugcaucuga

SEQ ID NO: 173345 - RNA, 1701 nt, Artificial Sequence; identical to SEQ ID NO: 173045
  derived and/or modified CDS sequence (opt4) from hemagglutinin__InfluenzaA__ALE31756

SEQ ID NO: 173346 - RNA, 1701 nt, Artificial Sequence; identical to SEQ ID NO: 172501
  derived and/or modified CDS sequence (opt4) from hemagglutinin__InfluenzaA__ALE31757

SEQ ID NO: 173347 - RNA, 1701 nt, Artificial Sequence
  derived and/or modified CDS sequence (opt4) from hemagglutinin__InfluenzaA__ALE31758
augaagaccaucaucgcccugagcuacauccugugccugguguucgcccagaagauccccggcaacgacaacagcaccgccacccugugccugggccaccacgccgugcccaacggcaccaucgugaagaccaucaccaacgacagaaucgaggugaccaacgccaccgagcuggugcagaacagcagcaucggcgagaucugcgacagcccccaccagauccuggacggcgagaacugcacccugaucgacgcccugcugggcgacccccagugcgacggcuuccagaacaagaagugggaccuguucguggagagaagcaaggccuacagcaacugcuaccccuacgacgugcccgacuacgccagccugagaagccugguggccagcagcggcacccuggaguucaacaacgagagcuucaacuggaccggcgugacccagaacggcaccagcagcgccugcaucagaagaagcagcagcagcuucuucagcagacugaacuggcugacccaccugaacuacaccuaccccgcccugaacgugaccaugcccaacaacgagcaguucgacaagcuguacaucuggggcgugcaccaccccggcaccgacaaggaccagaucuuccuguacgcccagagcagcggcagaaucaccgugagcaccaagagaagccagcaggccgugauccccaacaucggcagcagacccagaaucagagacauccccagcagaaucagcaucuacuggaccaucgugaagcccggcgacauccugcugaucaacagcaccggcaaccugguggcccccagaggcuacuucaagaucagaagcggcaagagcagcaucaugagaagcgacgcccccaucggcaagugcaagagcgagugcaucacccccaacggcagcauccccaacgacaagcccuuccagaacgugaacagaaucaccuacggcgccugccccagauacgugaagcacagcacccugaagcuggccaccggcaugagaaacgugcccgagaagcagaccagaggcaucuucggcgccaucgccggcuucaucgagaacggcugggagggcaugguggacggcugguacggcuucagacaccagaacagcgagggcagaggccaggccgccgaccugaagagcacccaggccgccaucgaccagaucaacggcaagcugaacagacugaucggcaagaccaacgagaaguuccaccagaucgagaaggaguucagcgagguggagggcagaauccaggaccuggagaaguacguggaggacaccaagaucgaccuguggagcuacaacgccgagcugcugguggcccuggagaaccagcacaccaucgaccugaccgacagcgagaugaacaagcuguucgagaagaccaagaagcagcugagagagaacgccgaggacaugggcaacggcugcuucaagaucuaccacaagugcgacaacgccugcaucggcagcaucagaaacggcaccuacgaccacaacguguacagagacgaggcccugaacaacagauuccagaucaagggcguggagcugaagagcggcuacaaggacuggauccuguggaucagcuucgccaucagcugcuuccugcugugcguggcccugcugggcuucaucaugugggccugccagaagggcaacaucagaugcaacaucugcaucuga

SEQ ID NO: 173348 - RNA, 1701 nt, Artificial Sequence
  derived and/or modified CDS sequence (opt4) from hemagglutinin__InfluenzaA__ALE31759
augaagaccaucaucgcccugagcuacauccugugccugguguucgcccagaagcugcccggcaacgacaacagcaccgccacccugugccugggccaccacgccgugcccaacggcaccaucgugaagaccaucaccaacgacagaaucgaggugaccaacgccaccgagcuggugcagaacagcagcaucggcgagaucugcgacagcccccaccagauccuggacggcaagaacugcacccugaucgacgcccugcugggcgacccccagugcgacggcuuccagaacaagagaugggaccuguucguggagagaagcaaggccuacagcaacugcuaccccuacgacgugcccgacuacgccagccugagaagccugguggccagcagcggcacccuggaguucaacgacgagagcuucaacugggccggcgugacccagaacggcaccagcagcgccugcaucagaggcagcaacagcagcuucuucagcagacugaacuggcugacccacagcaacuucaaguaccccgcccugaacgugaccaugcccaacaacgagcaguucgacaagcuguacaucuggggcgugcaccaccccggcaccgacaaggaccagaucuuccuguacgcccagagcagcggcagagugaccgugagcaccaagagaagccagcaggccgugauccccaacaucggcagcagacccagaaucagaaacauccccagcagaaucagcaucuacuggaccaucgugaagcccggcgacauccugcugaucaacagcaccggcaaccugaucgcccccagaggcuacuucaagauccagagcggcaagagcagcaucaugagaagcgacgcccccaucggcaagugcaagagcgagugcaucacccccaacggcagcauccccaacaacaagcccuuccagaacgugaacagaaucaccuacggcgccugccccagauacgugaagcagagcacccugaagcuggccaccggcaugagaaacgugcccgagaagcagaccagaggcaucuucggcgccaucgccggcuucaucgagaacggcugggagggcaugaaggacggcugguacggcuucagacaccagaacagcgagggcagaggccaggccgccgaccugaagagcacccaggccgccaucgaccagaucaacggcaagcugaacagacugaucggcaagaccaacgagaaguuccaccagaucgagaaggaguucagcgagguggagggcagaauccaggaccuggagaaguacguggaggacaccaagaucgaccuguggagcuacaacgccgagcugcugguggcccuggagaaccagcacaccaucgaccugaccgacagcgagaugaacaagcuguucgagaagaccaagaagcagcugagagagaacgccgaggacaugggcaacggcugcuucaagaucuaccacaagugcgacaacgccugcaucggcagcaucagaaacggcaccuacgaccacgacguguacagagacgaggcccugaacaacagauuccagaucaagggcguggagcugaagagcggcuacaaggacuggauccuguggaucagcuucgccaucagcugcuuccugcugugcguggcccugcugggcuucaucaugugggccugccagaagggcaacaucagaugcaacaucugcaucuga

SEQ ID NO: 173349 - RNA, 1701 nt, Artificial Sequence
  derived and/or modified CDS sequence (opt4) from hemagglutinin__InfluenzaA__ALE31760
augaagaccaucaucgcccugagcuacauccugugccugguguucgcccagaagauccccggcaacgacaacagcaccgccacccugugccugggccaccacgccgugcccaacggcaccaucgugaagaccaucaccaacgacagaaucgaggugaccaacgccaccgagcuggugcagaacagcagcaucggcgagaucugcgacagcccccaccagauccuggacggcgagaacugcacccugaucgacgcccugcugggcgacccccagugcgacggcuuccagaacaagaagugggaccuguucguggagagaagcaaggccuacagcaacugcuaccccuacgacgugcccgacuacgccagccugagaagccugguggccagcagcggcacccuggaguucaacaacgagagcuucaacuggaccggcgugacccagaacggcaccagcagcgccugcaucagaagaagcagcagcagcuucuucagcagacugaacuggcugacccaccugaacuacaccuaccccgcccugaacgugaccaugcccaacaacgagcaguucgacaagcuguacaucuggggcgugcaccaccccggcaccgacaaggaccagaucuuccuguacgcccagagcagcggcagaaucaccgugagcaccaagagaagccagcaggccgugauccccaacaucggcuacagacccagaaucagagacauccccagcagaaucagcaucuacuggaccaucgugaagcccggcgacauccugcugaucaacagcaccggcaaccugaucgcccccagaggcuacuucaagaucagaagcggcaagagcagcaucaugagaagcgacgcccccaucggcaagugcaagagcgagugcaucacccccaacggcagcauccccaacgacaagcccuuccagaacgugaacagaaucaccuacggcgccugccccagauacgugaagcacagcacccugaagcuggccaccggcaugagaaacgugcccgagaagcagaccagaggcaucuucggcgccaucgccggcuucaucgagaacggcugggagggcaugguggacggcugguacggcuucagacaccagaacagcgagggcagaggccaggccgccgaccugaagagcacccaggccgccaucgaccagaucaacggcaagcugaacagacugaucggcaagaccaacgagaaguuccaccagaucgagaaggaguucagcgagguggagggcagaauccaggaccuggagaaguacguggaggacgccaagaucgaccuguggagcuacaacgccgagcugcugguggcccuggagaaccagcacaccaucgaccugaccgacagcgagaugaacaagcuguucgagaagaccaagaagcagcugagagagaacgccgaggacaugggcaacggcugcuucaagaucuaccacaagugcgacaacgccugcaucggcagcaucagaaacggcaccuacgaccacaacguguacagagacgaggcccugaacaacagauuccagaucaagggcguggagcugaagagcggcuacaaggacuggauccuguggaucagcuucgccaucagcugcuuccugcugugcguggcccugcugggcuucaucaugugggccugccagaagggcaacaucagaugcaacaucugcaucuga

SEQ ID NO: 173350 - RNA, 1701 nt, Artificial Sequence; identical to SEQ ID NO: 173045
  derived and/or modified CDS sequence (opt4) from hemagglutinin__InfluenzaA__ALE31761

SEQ ID NO: 173351 - RNA, 1701 nt, Artificial Sequence; identical to SEQ ID NO: 172501
  derived and/or modified CDS sequence (opt4) from hemagglutinin__InfluenzaA__ALE31762

SEQ ID NO: 173352 - RNA, 1701 nt, Artificial Sequence; identical to SEQ ID NO: 173107
  derived and/or modified CDS sequence (opt4) from hemagglutinin__InfluenzaA__ALE31763

SEQ ID NO: 173353 - RNA, 1701 nt, Artificial Sequence; identical to SEQ ID NO: 173159
  derived and/or modified CDS sequence (opt4) from hemagglutinin__InfluenzaA__ALE31764

SEQ ID NO: 173354 - RNA, 1701 nt, Artificial Sequence; identical to SEQ ID NO: 172501
  derived and/or modified CDS sequence (opt4) from hemagglutinin__InfluenzaA__ALE31765

SEQ ID NO: 173355 - RNA, 1701 nt, Artificial Sequence
  derived and/or modified CDS sequence (opt4) from hemagglutinin__InfluenzaA__ALE31774
augaagaccaucaucgcccugagcuacauccugugccugguguucgcccagaagauccccggcaacgacaacagcaccgccacccugugccugggccaccacgccgugcccaacggcaccaucgugaagaccaucaccaacgacagaaucgaggugaccaacgccaccgagcuggugcagaacagcagcaucggcgagaucugcgacagcccccaccagauccuggacggcgagaacugcacccugaucgacgcccugcugggcgacccccagugcgacggcuuccagaacaagaagugggaccuguucguggagagaagcaaggccuacagcaacugcuaccccuacgacgugcccgacuacgccagccugagaagccugguggccagcagcggcacccuggaguucaacaacgagagcuucaacuggaccggcgugacccagaacggcaccagcagcgccugcaucagaagaagcagcagcagcuucuucagcagacugaacuggcugacccaccugaacuacaccuaccccgcccugaacgugaccaugcccaacaacgagcaguucgacaagcuguacaucuggggcgugcaccaccccggcaccgacaaggaccagguguuccuguacgcccagagcagcggcagaaucaccgugagcaccaagagaagccagcaggccgugauccccaacaucggcagcagacccagaaucagagacauccccagcagaaucagcaucuacuggaccaucgugaagcccggcgacauccugcugaucaacagcaccggcaaccugaucgcccccagaggcuacuucaagaucagaagcggcaagagcagcaucaugagaagcgacgcccccaucggcaagugcaagagcgagugcaucacccccaacggcagcauccccaacgacaagcccuuccagaacgugaacagaaucaccuacggcgccugccccagauacgugaagcacagcacccugaagcuggccaccggcaugagaaacgugcccgagaagcagaccagaggcaucuucggcgccaucgccggcuucaucgagaacggcugggagggcaugguggacggcugguacggcuucagacaccagaacagcgagggcagaggccaggccgccgaccugaagagcacccaggccgccaucgaccagaucaacggcaagcugaacagacugaucggcaagaccaacgagaaguuccaccagaucgagaaggaguucagcgagguggagggcagaauccaggaccuggagaaguacguggaggacaccaagaucgaccuguggagcuacaacgccgagcugcugguggcccuggagaaccagcacaccaucgaccugaccgacagcgagaugaacaagcuguucgagaagaccaagaagcagcugagagagaacgccgaggacaugggcaacggcugcuucaagaucuaccacaagugcgacaacgccugcaucggcagcaucagaaacggcaccuacgaccacaacguguacagagacgaggcccugaacaacagauuccagaucaagggcguggagcugaagagcggcuacaaggacuggauccuguggaucagcuucgccaucagcugcuuccugcugugcguggcccugcugggcuucaucaugugggccugccagaagggcaacaucagaugcaacaucugcaucuga

SEQ ID NO: 173356 - RNA, 1701 nt, Artificial Sequence
  derived and/or modified CDS sequence (opt4) from hemagglutinin__InfluenzaA__ALE31775
augaagaccaucaucgcccugagcuacauccugugccugguguucgcccagaagauccccggcaacgacaacagcaccgccacccugugccugggccaccacgccgugcccaacggcaccaucgugaagaccaucaccaacgacagaaucgaggugaccaacgccaccgagcuggugcagaacagcagcaucggcgagaucugcgacagcccccaccagauccuggacggcgagaacugcacccugaucgacgcccugcugggcgacccccagugcgacggcuuccagaacaagaagugggaccuguucguggagagaagcaaggccuacagcaacugcuaccccuacgacgugcccgacuacgccagccugagaagccugguggccagcagcggcacccuggaguucaacaacgagagcuucaacuggaccggcgugacccagaacggcaccagcagcgccugcaucagaaagagcagcagcagcuucuucagcagacugaacuggcugacccaccugaacuacaccuaccccgcccugaacgugaccaugcccaacaacgagcaguucgacaagcuguacaucuggggcgugcaccaccccggcaccgacaaggaccagaucuuccuguacgccagaagcagcggcagaaucaccgugagcaccaagagaagccagcaggccgugauccccaacaucggcagcagacccagaaucagagacauccccagcagaaucagcaucuacuggaccaucgugaagcccggcgacauccugcugaucaacagcaccggcaaccugaucgcccccagaggcuacuucaagaucagaagcggcaagagcagcaucaugagaagcgacgcccccaucggcaagugcaagagcgagugcaucacccccaacggcagcauccccaacgacaagcccuuccagaacgugaacagaaucaccuacggcgccugccccagauacgugaagcacagcacccugaagcuggccaccggcaugagaaacgugcccgagaagcagaccagaggcaucuucggcgccaucgccggcuucaucgagaacggcugggagggcaugguggacggcugguacggcuucagacaccagaacagcgagggcagaggccaggccgccgaccugaagagcacccaggccgccaucgaccagaucaacggcaagcugaacagacugaucggcaagaccaacgagaaguuccaccagaucgagaaggaguucagcgagguggagggcagaauccaggaccuggagaaguacguggaggacaccaagaucgaccuguggagcuacaacgccgaguuccugguggcccuggagaaccagcacaccaucgaccugaccgacagcgagaugaacaagcuguucgagaagaccaagaagcagcugagagagaacgccgaggacaugggcaacggcugcuucaagaucuaccacaagugcgacaacgccugcaucggcagcaucagaaacggcaccuacgaccacaacguguacagagacgaggcccugaacaacagauuccagaucaagggcguggagcugaagagcggcuacaaggacuggauccuguggaucagcuucgccaucagcugcuuccugcugugcguggcccugcugggcuucaucaugugggccugccagaagggcaacaucagaugcaacaucugcaucuga

SEQ ID NO: 173357 - RNA, 1701 nt, Artificial Sequence
  derived and/or modified CDS sequence (opt4) from hemagglutinin__InfluenzaA__ALE31776
augaagaccaucaucgcccugagcuacauccugugccugguguucgcccagaagcugcccgagaacgacaacagcaccgccacccugugccugggccaccacgccgugcccaacggcaccaucgugaagaccaucaccagcgacagaaucgaggugaccaacgccaccgagcuggugcagaacagcagcaucggcgagaucugcgacagcccccaccagauccuggacggcaagaacugcacccugaucgacgcccugcugggcgacccccagugcgacggcuuccagaacaagaagugggaccuguucguggagagaagcaaggccuacagcaacugcuaccccuacgacgugcccgacuacgccagccugagaagccugguggccagcagcggcacccuggaguucaacgacgagagcuucaacugggccggcgugacccagaacggcaccagcagcgccugcaucagaggcagcaacagcagcuucuucagcagacugaacuggcugacccacagcaacuucaaguaccccgcccugaacgugaccaugcccaacaacgagcaguucgacaagcuguacaucuggggcgugcaccaccccggcaccgacaaggaccagaucuuccuguacgcccagagcagcggcagaaucaccgugagcaccaagagaagccagcaggccgugauccccaacaucggcagcagacccagaaucagaaacauccccagcagaaucagcaucuacuggaccaucgugaagcccggcgacauccugcugaucaacagcaccggcaaccugaucgcccccagaggcuacuucaagaucagaagcggcaagagcagcaucaugagaagcgacgccagcaucggcaagugcaagagcgagugcaucacccccaacggcagcauccccaacgacaagcccuuccagaacgugaacagaaucaccuacggcgccugccccagauacgugaagcagagcacccugaagcuggccaccggcaugagaaacgugcccgagaagcagaccagaggcaucuucggcgccaucgccggcuucaucgagaacggcugggagggcaugaaggacggcugguacggcuucagacaccagaacagcgagggcagaggccaggccgccgaccugaagagcacccaggccgccaucgaccagaucaacggcaagcugaacagacugaucggcaagaccaacgagaaguuccaccagaucgagaaggaguucagcgagguggagggcagaauccaggaccuggagaaguacguggaggacaccaagaucgaccuguggagcuacaacgccgagcugcugguggcccuggagaaccagcacaccaucgaccugaccgacagcgagaugaacaagcuguucgagaagaccaagaagcagcugagagagaacgccgaggacaugggcaacggcugcuucaagaucuaccacaagugcgacaacgccugcaucggcagcaucagaaacggcaccuacgaccacgacguguacagagacgaggcccugaacaacagauuccagaucaagggcguggagcugaagagcggcuacaaggacuggauccuguggaucagcuucgccaucagcugcuuccugcugugcguggcccugcugggcuucaucaugugggccugccagaagggcaacaucagaugcaacaucugcaucuga

SEQ ID NO: 173358 - RNA, 1701 nt, Artificial Sequence
  derived and/or modified CDS sequence (opt4) from hemagglutinin__InfluenzaA__ALE31777
augaagaccaucaucgcccugagcuacauccugugccugguguucgcccagaagauccccggcaacgacaacagcaccgccacccugugccugggccaccacgccgugcccaacggcaccaucgugaagaccaucaccaacgacagaaucgaggugaccaacgccaccgagcuggugcagaacagcagcaucggcgagaucugcgacagcccccaccagauccuggacggcgagaacugcacccugaucgacgcccugcugggcgacccccagugcgacggcuuccagaacaagaagugggaccuguucguggagagaagcaaggccuacagcaacugcuaccccuacgacgugcccgacuacgccagccugagaagccugguggccagcagcggcacccuggaguucaacaacgagagcuucaacuggaccggcgugacccagaacggcaccagcagcgccugcaucagaagaagcagcagcagcuucuucagcagacugaacuggcugacccaccugaacuacaccuaccccgcccugaacgugaccaugcccaacaacgagcaguucgacaagcuguacaucuggggcgugcaccaccccggcaccgacaaggaccagaucuuccuguacgcccagagcagcggcagaaucaccgugagcaccaagagaagccagcaggccguggugcccaacaucggcagcagacccagaaucagagacauccccagcagaaucagcaucuacuggaccaucgugaagcccggcgacauccugcugaucaacagcaccggcaaccugaucgcccccagaggcuacuucaagaucagaagcggcaagagcagcaucaugagaagcgacgcccccaucggcaagugcaagagcgagugcaucacccccaacggcagcauccccaacgacaagcccuuccagaacgugaacagaaucaccuacggcgccugccccagauacgugaagcacagcacccugaagcuggccaccggcaugagaaacgugcccgagaagcagaccagaggcaucuucggcgccaucgccggcuucaucgagaacggcugggagggcaugguggacggcugguacggcuucagacaccagaacagcgagggcagaggccaggccgccgaccugaagagcacccaggccgccaucgaccagaucaacggcaagcugaacagacugaucggcaagaccaacgagaaguuccaccagaucgagaaggaguucagcgagguggagggcagaauccaggaccuggagaaguacguggaggacaccaagaucgaccuguggagcuacaacgccgagcugcugguggcccuggagaaccagcacaccaucgaccugaccgacagcgagaugaacaagcuguucgagaagaccaagaagcagcugagagagaacgccgaggacaugggcaacggcugcuucaagaucuaccacaagugcgacaacgccugcaucggcagcaucagaaacggcaccuacgaccacaacguguacagagacgaggcccugaacaacagauuccagaucaagggcguggagcugaagagcggcuacaaggacuggauccuguggaucagcuucgccaucagcugcuuccugcugugcguggcccugcugggcuucaucaugugggccugccagaagggcaacaucagaugcaacaucugcaucuga

SEQ ID NO: 173359 - RNA, 1701 nt, Artificial Sequence; identical to SEQ ID NO: 173107
  derived and/or modified CDS sequence (opt4) from hemagglutinin__InfluenzaA__ALE31778

SEQ ID NO: 173360 - RNA, 1701 nt, Artificial Sequence; identical to SEQ ID NO: 172501
  derived and/or modified CDS sequence (opt4) from hemagglutinin__InfluenzaA__ALE31779

SEQ ID NO: 173361 - RNA, 1701 nt, Artificial Sequence
  derived and/or modified CDS sequence (opt4) from hemagglutinin__InfluenzaA__ALE31780
augaagaccaucaucgcccugagcuacauccugugccugguguucgcccagaagauccccggcaacgacaacagcaccgccacccugugccugggccaccacgccgugcccaacggcaccaucgugaagaccaucaccaacgacagaaucgaggugaccaacgccaccgagcuggugcagaacagcagcaucggcgagaucugcgacagcccccaccagauccuggacggcgagaacugcacccugaucgacgcccugcugggcgacccccagugcgacggcuuccagaacaagaagugggaccuguucguggagagaagcaaggcccacagcaacugcuaccccuacgacgugcccgacuacgccagccugagaagccugguggccagcagcggcacccuggaguucaacaacgagagcuucaacuggaccggcgugacccagaacggcaccagcagcgccugcaucagaagaagcagcagcagcuucuucagcagacugaacuggcugacccaccugaacuacaccuaccccgcccugaacgugaccaugcccaacaacgagcaguucgacaagcuguacaucuggggcgugcaccaccccggcaccgacaaggaccagaucuuccuguacgcccagagcagcggcagaaucaccgugagcaccaagagaagccagcaggccgugauccccaacaucggcagcagacccagaaucagagacauccccagcagaaucagcaucuacuggaccaucgugaagcccggcgacauccugcugaucaacagcaccggcaaccugaucgcccccagaggcuacuucaagaucagaagcggcaagagcagcaucaugagaaccgacgcccccaucggcaagugcaagagcgagugcaucacccccaacggcagcauccccaacgacaagcccuuccagaacgugaacagaaucaccuacggcgccugccccagauacgugaagcacagcacccugaagcuggccaccggcaugagaaacgugcccgagaagcagaccagaggcaucuucggcgccaucgccggcuucaucgagaacggcugggagggcaugguggacggcugguacggcuucagacaccagaacagcgagggcagaggccaggccgccgaccugaagagcacccaggccgccaucgaccagaucaacggcaagcugaacagacugaucggcaagaccaacgagaaguuccaccagaucgagaaggaguucagcgagguggagggcagaauccaggaccuggagaaguacguggaggacaccaagaucgaccuguggagcuacaacgccgagcugcugguggcccuggagaaccagcacaccaucgaccugaccgacagcgagaugaacaagcuguucgagaagaccaagaagcagcugagagagaacgccgaggacaugggcaacggcugcuucaagaucuaccacaagugcgacaacgccugcaucggcagcaucagaaacggcaccuacgaccacaacguguacagagacgaggcccugaacaacagauuccagaucaagggcguggagcugaagagcggcuacaaggacuggauccuguggaucagcuucgccaucagcugcuuccugcugugcguggcccugcugggcuucaucaugugggccugccagaagggcaacaucagaugcaacaucugcaucuga

SEQ ID NO: 173362 - RNA, 1701 nt, Artificial Sequence
  derived and/or modified CDS sequence (opt4) from hemagglutinin__InfluenzaA__ALE31781
augaagaccaucaucgcccugagcuacauccugugccugguguucgcccagaagauccccggcaacgacaacagcaccgccacccugugccugggccaccacgccgugcccaacggcaccaucgugaagaccaucaccaacgacagaaucgaggugaccaacgccaccgagcuggugcagaacagcagcaucggcgagaucugcggcagcccccaccagauccuggacggcgagaacugcacccugaucgacgcccugcugggcgacccccagugcgacggcuuccagaacaagaagugggaccuguucguggagagaagcaaggccuacagcaacugcuaccccuacgacgugcccgacuacgccagccugagaagccugguggccagcagcggcacccuggaguucaacaacgagagcuucaacuggaccggcgugacccagaacggcaccagcagcgccugcaucagaaagagcagcagcagcuucuucagcaagcugaacuggcugacccaccugaacuacaccuaccccgcccugaacgugaccaugcccaacaacgagcaguucgacaagcuguacaucuggggcgugcaccaccccggcaccgacaaggaccagaucuuccuguacgccagaagcagcggcagaaucaccgugagcaccaagagaagccagcaggccgugauccccaacaucggcagcagacccagaaucagagacauccccagcagaaucagcaucuacuggaccaucgugaagcccggcgacauccugcugaucaacagcaccggcaaccugaucgcccccagaggcuacuucaagaucagaagcggcaagagcagcaucaugagaagcgacgcccccaucggcaagugcaagagcgagugcaucacccccaacggcagcauccccaacgacaagcccuuccagaacgugaacagaaucaccuacggcgccugccccagauacgugaagcacagcacccugaagcuggccaccggcaugagaaacgugcccgagaagcagaccagaggcaucuucggcgccaucgccggcuucaucgagaacggcugggagggcaugguggacggcugguacggcuucagacaccagaacagcgagggcagaggccaggccgccgaccugaagagcacccaggccgccaucgaccagaucaacggcaagcugaacagacugaucggcaagaccaacgagaaguuccaccagaucgagaaggaguucagcgagguggagggcagaauccaggaccuggagaaguacguggaggacaccaagaucgaccuguggagcuacaacgccgagcugcugguggcccuggagaaccagcacaccaucgaccugaccgacagcgagaugaacaagcuguucgagaagaccaagaagcagcugagagagaacgccgaggacaugggcaacggcugcuucaagaucuaccacaagugcgacaacgccugcaucggcagcaucagaaacggcaccuacgaccacaacguguacagagacgaggcccugaacaacagauuccagaucaagggcguggagcugaagagcggcuacaaggacuggauccuguggaucagcuucgccaucagcugcuuccugcugugcguggcccugcugggcuucaucaugugggccugccagaagggcaacaucagaugcaacaucugcaucuga

SEQ ID NO: 173363 - RNA, 1701 nt, Artificial Sequence
  derived and/or modified CDS sequence (opt4) from hemagglutinin__InfluenzaA__ALE31782
augaagaccaucaucgcccugagcuacauccugugccugguguucgcccagaagauccccggcaacgacaacagcaccgccacccugugccugggccaccacgccgugcccaacggcaccaucgugaagaccaucaccaacgacagaaucgaggugaccaacgccaccgagcuggugcagaacagcagcaucggcgagaucugcgacagcccccaccagauccuggacggcgagaacugcacccugaucgacgcccugcugggcgacccccagugcgacggcuuccagaacaagaagugggaccuguucguggagagaagcaaggccuacagcaacugcuaccccuacgacgugcccgacuacgugagccugagaagccugguggccagcagcggcacccuggaguucaacaacgagagcuucaacuggaccggcgugacccagaacggcaccagcagcgccugcaucagaagaagcagcagcagcuucuucagcagacugaacuggcugacccaccugaacuacaccuaccccgcccugaacgugaccaugcccaacaacgagcaguucgacaagcuguacaucuggggcgugcaccaccccggcaccgacaaggaccagaucuuccuguacgcccagagcagcggcagaaucaccgugagcaccaagagaagccagcaggccgugauccccaacaucggcagcagacccagaaucagagacauccccagcagaaucagcaucuacuggaccaucgugaagcccggcgacauccugcugaucaacagcaccggcaaccugaucgcccccagaggcuacuucaagaucagaagcggcaagagcagcaucaugagaagcgacgcccccaucggcaagugcaagagcgagugcaucacccccaacggcagcauccccaacgacaagcccuuccagaacgugaacagaaucaccuacggcgccugccccagauacgugaagcagagcacccugaagcuggccaccggcaugagaaacgugcccgagaagcagaccagaggcaucuucggcgccaucgccggcuucaucgagaacggcugggagggcaugguggacggcugguacggcuucagacaccagaacagcgagggcagaggccaggccgccgaccugaagagcacccaggccgccaucgaccagaucaacggcaagcugaacagacugaucggcaagaccaacgagaaguuccaccagaucgagaaggaguucagcgagguggagggcagaauccaggaccuggagaaguacguggaggacaccaagaucgaccuguggagcuacaacgccgagcugcugguggcccuggagaaccagcacaccaucgaccugaccgacagcgagaugaacaagcuguucgagaagaccaagaagcagcugagagagaacgccgaggacaugggcaacggcugcuucaagaucuaccacaagugcgacaacgccugcaucggcagcaucagaaacggcaccuacgaccacaacguguacagagacgaggcccugaacaacagauuccagaucaagggcguggagcugaagagcggcuacaaggacuggauccuguggaucagcuucgccaucagcugcuuccugcugugcguggcccugcugggcuucaucaugugggccugccagaagggcaacaucagaugcaacaucugcaucuga

SEQ ID NO: 173364 - RNA, 1701 nt, Artificial Sequence
  derived and/or modified CDS sequence (opt4) from hemagglutinin__InfluenzaA__ALE31783
augaagaccaucaucgcccugagcuacauccugugccugguguucgcccagaagauccccggcaacgacaacagcaccgccacccugugccugggccaccacgccgugcccaacggcaccaucgugaagaccaucaccaacgacagaaucgaggugaccaacgccaccgagcuggugcagaacagcagcaucggcgagaucugcgacagcccccaccagauccuggacggcgagaacugcacccugaucgacgcccugcugggcgacccccagugcgacggcuuccagaacaagaagugggaccuguucguggagagaagcaaggccuacagcaacugcuaccccuacgacgugcccgacuacgccagccugagaagccugguggccagcagcggcacccuggaguucaacaacgagagcuucaacuggaccggcgugacccagaacggcaccagcagcgccugcaucagaagaagcagcagcagcuucuucagcagacugaacuggcugacccaccugaacuacaccuaccccgcccugaacgugaccgugcccaacaacgagcaguucgacaagcuguacaucuggggcgugcaccaccccggcaccgacaaggaccagaucuuccuguacgcccagagcagcggcagaaucaccgugagcaccaagagaagccagcaggccgugauccccaacaucggcagcagacccagaaucagagacauccccagcagaaucagcaucuacuggaccaucgugaagcccggcgacauccugcugaucaacagcaccggcaaccugaucgcccccagaggcuacuucaagaucagaagcggcaagagcagcaucaugagaagcgacgcccccaucggcaagugcaagagcgagugcaucacccccaacggcagcauccccaacgacaagcccuuccagaacgugaacagaaucaccuacggcgccugccccagauacgugaagcacagcacccugaagcuggccaccggcaugagaaacgugcccgagaagcagaccagaggcaucuucggcgccaucgccggcuucaucgagaacggcugggagggcaugguggacggcugguacggcuucagacaccagaacagcgagggcagaggccaggccgccgaccugaagagcacccaggccgccaucgaccagaucaacggcaagcugaacagacugaucggcaagaccaacgagaaguuccaccagaucgagaaggaguucagcgagguggagggcagaauccaggaccuggagaaguacguggaggacaccaagaucgaccuguggagcuacaacgccgagcugcugguggcccuggagaaccagcacaccaucgaccugaccgacagcgagaugaacaagcuguucgagaagaccaagaagcagcugagagagaacgccgaggacaugggcaacggcugcuucaagaucuaccacaagugcgacaacgccugcaucggcagcaucagaaacggcaccuacgaccacaacguguacagagacgaggcccugaacaacagauuccagaucaagggcguggagcugaagagcggcuacaaggacuggauccuguggaucagcuucgccaucagcugcuuccugcugugcguggcccugcugggcuucaucaugugggccugccagaagggcaacaucagaugcaacaucugcaucuga

SEQ ID NO: 173365 - RNA, 1701 nt, Artificial Sequence; identical to SEQ ID NO: 173117
  derived and/or modified CDS sequence (opt4) from hemagglutinin__InfluenzaA__ALE31784

SEQ ID NO: 173366 - RNA, 1701 nt, Artificial Sequence; identical to SEQ ID NO: 172501
  derived and/or modified CDS sequence (opt4) from hemagglutinin__InfluenzaA__ALE31785

SEQ ID NO: 173367 - RNA, 1701 nt, Artificial Sequence; identical to SEQ ID NO: 173107
  derived and/or modified CDS sequence (opt4) from hemagglutinin__InfluenzaA__ALE31786

SEQ ID NO: 173368 - RNA, 1701 nt, Artificial Sequence; identical to SEQ ID NO: 173159
  derived and/or modified CDS sequence (opt4) from hemagglutinin__InfluenzaA__ALE31787

SEQ ID NO: 173369 - RNA, 1701 nt, Artificial Sequence; identical to SEQ ID NO: 172601
  derived and/or modified CDS sequence (opt4) from hemagglutinin__InfluenzaA__ALE31788

SEQ ID NO: 173370 - RNA, 1701 nt, Artificial Sequence; identical to SEQ ID NO: 172501
  derived and/or modified CDS sequence (opt4) from hemagglutinin__InfluenzaA__ALE31789

SEQ ID NO: 173371 - RNA, 1701 nt, Artificial Sequence; identical to SEQ ID NO: 173116
  derived and/or modified CDS sequence (opt4) from hemagglutinin__InfluenzaA__ALE31790

SEQ ID NO: 173372 - RNA, 1701 nt, Artificial Sequence; identical to SEQ ID NO: 173237
  derived and/or modified CDS sequence (opt4) from hemagglutinin__InfluenzaA__ALE31791

SEQ ID NO: 173373 - RNA, 1701 nt, Artificial Sequence; identical to SEQ ID NO: 173137
  derived and/or modified CDS sequence (opt4) from hemagglutinin__InfluenzaA__ALE31792

SEQ ID NO: 173374 - RNA, 1701 nt, Artificial Sequence
  derived and/or modified CDS sequence (opt4) from hemagglutinin__InfluenzaA__ALE31793
augaagaccaucaucgcccugagcuacauccugugccugguguucgcccagaagauccccggcaacgacaacagcaccgccacccugugccugggccaccacgccgugcccaacggcaccaucgugaagaccaucaccaacgacagaaucgaggugaccaacgccaccgagcuggugcagaacagcagcaucggcgagaucugcgacagcccccaccagauccuggacggcgagaacugcacccugaucgacgcccugcugggcgacccccagugcgacggcuuccagaacaagaagugggaccuguucguggagagaagcaaggccuacagcaacugcuaccccuacgacgugcccgacuacgccagccugagaagccugguggccagcagcggcacccuggaguucaacaacgagagcuucaacuggaccggcgugacccagaacggcaccagcagcgccugcaucagaagaagcagcagcagcuucuucagcagacugaacuggcugacccaccugaacuacaccuaccccgcccugaacgugaccaugcccaacaacgagcaguucgacaagcuguacaucuggggcgugcaccaccccggcaccgacaaggaccagaucagccuguacgcccagagcagcggcagaaucaccgugagcaccaagagaagccagcaggccgugauccccaacaucggcagcagacccagaaucagagacauccccagcagaaucagcaucuacuggaccaucgugaagcccggcgacauccugcugaucaacagcaccggcaaccugaucgcccccagaggcuacuucaagaucagaagcggcaagagcagcaucaugagaagcgacgcccccaucggcaagugcaagagcgagugcaucacccccaacggcagcauccccaacgacaagcccuuccagaacgugaacagaaucaccuacggcgccugccccagauacgugaagcacagcacccugaagcuggccaccggcaugagaaacgugcccgagaagcagaccagaggcaucuucggcgccaucgccggcuucaucgagaacggcugggagggcaugguggacggcugguacggcuucagacaccagaacagcgagggcagaggccaggccgccgaccugaagagcacccaggccgccaucgaccagaucaacggcaagcugaacagacugaucggcaagaccaacgagaaguuccaccagaucgagaaggaguucagcgagguggagggcagaauccaggaccuggagaaguacguggaggacaccaagaucgaccuguggagcuacaacgccgagcugcugguggcccuggagaaccagcacaccaucgaccugaccgacagcgagaugaacaagcuguucgagaagaccaagaagcagcugagagagaacgccgaggacaugggcaacggcugcuucaagaucuaccacaagugcgacaacgccugcaucggcagcaucagaaacggcaccuacgaccacaacguguacagagacgaggcccugaacaacagauuccagaucaagggcguggagcugaagagcggcuacaaggacuggauccuguggaucagcuucgccaucagcugcuuccugcugugcguggcccugcugggcuucaucaugugggccugccagaagggcaacaucagaugcaacaucugcaucuga

SEQ ID NO: 173375 - RNA, 1701 nt, Artificial Sequence; identical to SEQ ID NO: 172501
  derived and/or modified CDS sequence (opt4) from hemagglutinin__InfluenzaA__ALE31794

SEQ ID NO: 173376 - RNA, 1701 nt, Artificial Sequence; identical to SEQ ID NO: 172501
  derived and/or modified CDS sequence (opt4) from hemagglutinin__InfluenzaA__ALE31795

SEQ ID NO: 173377 - RNA, 1701 nt, Artificial Sequence; identical to SEQ ID NO: 172501
  derived and/or modified CDS sequence (opt4) from hemagglutinin__InfluenzaA__ALE31796

SEQ ID NO: 173378 - RNA, 1701 nt, Artificial Sequence; identical to SEQ ID NO: 173159
  derived and/or modified CDS sequence (opt4) from hemagglutinin__InfluenzaA__ALE31797

SEQ ID NO: 173379 - RNA, 1701 nt, Artificial Sequence; identical to SEQ ID NO: 173159
  derived and/or modified CDS sequence (opt4) from hemagglutinin__InfluenzaA__ALE31798

SEQ ID NO: 173380 - RNA, 1701 nt, Artificial Sequence; identical to SEQ ID NO: 172501
  derived and/or modified CDS sequence (opt4) from hemagglutinin__InfluenzaA__ALE31799

SEQ ID NO: 173381 - RNA, 1701 nt, Artificial Sequence; identical to SEQ ID NO: 173107
  derived and/or modified CDS sequence (opt4) from hemagglutinin__InfluenzaA__ALE31800

SEQ ID NO: 173382 - RNA, 1701 nt, Artificial Sequence; identical to SEQ ID NO: 172501
  derived and/or modified CDS sequence (opt4) from hemagglutinin__InfluenzaA__ALE31801

SEQ ID NO: 173383 - RNA, 1701 nt, Artificial Sequence; identical to SEQ ID NO: 172501
  derived and/or modified CDS sequence (opt4) from hemagglutinin__InfluenzaA__ALE31802

SEQ ID NO: 173384 - RNA, 1701 nt, Artificial Sequence; identical to SEQ ID NO: 173107
  derived and/or modified CDS sequence (opt4) from hemagglutinin__InfluenzaA__ALE31803

SEQ ID NO: 173385 - RNA, 1701 nt, Artificial Sequence; identical to SEQ ID NO: 173058
  derived and/or modified CDS sequence (opt4) from hemagglutinin__InfluenzaA__ALE31805

SEQ ID NO: 173386 - RNA, 1701 nt, Artificial Sequence
  derived and/or modified CDS sequence (opt4) from hemagglutinin__InfluenzaA__ALE31806
augaagaccaucaucgcccugagcuacauccugugccugguguucgcccagaagauccccggcaacgacaacagcaccgccacccugugccugggccaccacgccgugcccaacggcaccaucgugaagaccaucaccaacgacagaaucgaggugaccaacgccaccgagcuggugcagaacagcagcaucggcgagaucugcgacagcccccaccagauccuggacggcgagaacugcacccugaucgacgcccugcugggcgacccccagugcgacggcuuccagaacaagaagugggaccuguucguggagagaagcaaggccuacagcaacugcuaccccuacgacgugcccgacuacgccagccugagaagccugguggccagcagcggcacccuggaguucaacaacgagagcuucaacuggaccggcgugacccagaacggcaccagcagcgccugcaucagaagaagcagcagcagcuucuucagcagacugaacuggcugacccaccugaacuacaccuaccccgcccugaacgugaccaugcccaacaacgagcaguucgacaagcuguacaucuggggcgugcaccaccccggcaccgacaaggaccagaucuuccuguacgcccagagcagcggcagaaucaccgugagcaccaagagaagccagcaggccgugauccccaacaucggcagcagacccagaaucagagacauccccagcagaaucagcaucuacuggaccaucgugaagcccggcgacacccugcugaucaacagcaccggcaaccugaucgcccccagaggcuacuucaagaucagaagcggcaagagcagcaucaugagaagcgacgcccccaucggcaagugcaagagcgagugcaucacccccaacggcagcauccccaacgacaagcccuuccagaacgugaacagaaucaccuacggcgccugccccagauacgugaagcacagcacccugaagcuggccaccggcaugagaaacgugcccgagaagcagaccagaggcaucuucggcgccaucgccggcuucaucgagaacggcugggagggcaugguggacggcugguacggcuucagacaccagaacagcgagggcagaggccaggccgccgaccugaagagcacccaggccgccaucgaccagaucaacggcaagcugaacagacugaucggcaagaccaacgagaaguuccaccagaucgagaaggaguucagcgagguggagggcagaauccaggaccuggagaaguacguggaggacaccaagaucgaccuguggagcuacaacgccgagcugcugguggcccuggagaaccagcacaccaucgaccugaccgacagcgagaugaacaagcuguucgagaagaccaagaagcagcugagagagaacgccgaggacaugggcaacggcugcuucaagaucuaccacaagugcgacaacgccugcaucggcagcaucagaaacggcaccuacgaccacaacguguacagagacgaggcccugaacaacagauuccagaucaagggcguggagcugaagagcggcuacaaggacuggauccuguggaucagcuucgccaucagcugcuuccugcugugcguggcccugcugggcuucaucaugugggccugccagaagggcaacaucagaugcaacaucugcaucuga

SEQ ID NO: 173387 - RNA, 1701 nt, Artificial Sequence
  derived and/or modified CDS sequence (opt4) from hemagglutinin__InfluenzaA__ALE31807
augaagaccaucaucgcccugagcuacauccugugccugguguucgcccagaagcugcccggcaacgacaacagcaccgccacccugugccugggccaccacgccgugcccaacggcaccaucgugaagaccaucaccaacgacagaaucgaggugaccaacgccaccgagcuggugcagaacagcagcaucggcgagaucugcgacagcccccaccagauccuggacggcgagaacugcacccugaucgacgcccugcugggcgacccccagugcgacggcuuccagaacaagaagugggaccuguucguggagagaagcaaggccuacagcaacugcuaccccuacgacgugcccgacuacgccagccugagaagccugguggccagcagcggcacccuggaguucaacaacgagagcuucaacuggaccggcgugacccagaacggcaccagcagcgccugcaucagaagaagcagcagcagcuucuucagcagacugaacuggcugacccaccugaacuucaccuaccccgcccugaacgugaccaugcccaacaacgagcaguucgacaagcuguacguguggggcgugcaccaccccggcaccgacaaggaccagaucuuccuguacgcccagagcagcggcagaaucaccgugagcaccaagagaagccagcaggccgugauccccaacaucggcagcagacccagaaucagaaacauccccagcagaaucagcaucuacuggaccaucgugaagcccggcgacauccugcugaucaacagcaccggcaaccugaucgcccccagaggcuacuucaagaucagaagcggcaagagcagcaucaugagaagcgacgcccccaucggcaagugcaagagcgagugcaucacccccaacggcagcauccccaacgacaagcccuuccagaacgugaacagaaucaccuacggcgccugccccagauacgugaagcacagcacccugaagcuggccaccggcaugagaaacgugcccgagaagcagaccagaggcaucuucggcgccaucgccggcuucaucgagaacggcugggagggcaugguggacggcugguacggcuucagacaccagaacagcgagggcagaggccaggccgccgaccugaagagcacccaggccgccaucgaccagaucaacggcaagcugaacagacugaucggcaagaccaacgagaaguuccaccagaucgagaaggaguucagcgagguggagggcagaauccaggaccuggagaaguacguggaggacaccaagaucgaccuguggagcuacaacgccgagcugcugguggcccuggagaaccagcacaccaucgaccugaccgacagcgagaugaacaagcuguucgagaagaccaagaagcagcugagagagaacgccgaggacaugggcaacggcugcuucaagaucuaccacaagugcgacaacgccugcaucggcagcaucagaaacggcaccuacgaccacaacguguacagagacgaggcccugaacaacagauuccagaucaagggcguggagcugaagagcggcuacaaggacuggauccuguggaucagcuucgccaucagcugcuuccugcugugcguggcccugcugggcuucaucaugugggccugccagaagggcaacaucagaugcaacaucugcaucuga

SEQ ID NO: 173388 - RNA, 1701 nt, Artificial Sequence
  derived and/or modified CDS sequence (opt4) from hemagglutinin__InfluenzaA__ALE31808
augaagaccaucaucgcccugggcuacauccugugccugguguucgcccagaagauccccggcaacgacaacagcaccgccacccugugccugggccaccacgccgugcccaacggcaccaucgugaagaccaucaccaacgacagaaucgaggugaccaacgccaccgagcuggugcagaacagcagcaucggcgagaucugcgacagcccccacaagauccuggacggcgagaacugcacccugaucgacgcccugcugggcgacccccagugcgacggcuuccagaacaagaagugggaccuguucguggagagaagcaaggccuacagcaacugcuaccccuacgacgugcccgacuacgccagccugagaagccugguggccagcagcggcacccuggaguucaacaacgagagcuucaacuggaccggcgugacccagaacggcaccagcagcgccugcaucagaagaagcagcagcagcuucuucagcagacugaacuggcugacccaccugaacuacaccuaccccgcccugaacgugaccaugcccaacaacgagcaguucgacaagcuguacaucuggggcgugcaccaccccggcaccgacaaggaccagaucuuccuguacgcccagagcagcggcagaaucaccgugagcaccaagagaagccagcaggccgugauccccaacaucggcagcagacccagaaucagagacauccccagcagaaucagcaucuacuggaccaucgugaagcccggcgacauccugcugaucaacagcaccggcaaccugaucgcccccagaggcuacuucaagaucagaagcggcaagagcagcaucaugagaagcgacgcccccaucggcaagugcaagagcgagugcaucacccccaacggcagcauccccaacgacaagcccuuccagaacgugaacagaaucaccuacggcgccugccccagauacgugaagcacagcacccugaagcuggccaccggcaugagaaacgugcccgagaagcagaccagaggcaucuucggcgccaucgccggcuucaucgagaacggcugggagggcaugguggacggcugguacggcuucagacaccagaacagcgagggcagaggccaggccgccgaccugaagagcacccaggccgccaucgaccagaucaacggcaagcugaacagacugaucggcaagaccaacgagaaguuccaccagaucgagaaggaguucagcgagguggagggcagaauccaggaccuggagaaguacguggaggacaccaagaucgaccuguggagcuacaacgccgagcugcugguggcccuggagaaccagcacaccaucgaccugaccgacagcgagaugaacaagcuguucgagaagaccaagaagcagcugagagagaacgccgaggacaugggcaacggcugcuucaagaucuaccacaagugcgacaacgccugcaucggcagcaucagaaacggcaccuacgaccacaacguguacagagacgaggcccugaacaacagauuccagaucaagggcguggagcugaagagcggcuacaaggacuggauccuguggaucagcuucgccaucagcugcuuccugcugugcguggcccugcugggcuucaucaugugggccugccagaagggcaacaucagaugcaacaucugcaucuga

SEQ ID NO: 173389 - RNA, 1701 nt, Artificial Sequence; identical to SEQ ID NO: 172501
  derived and/or modified CDS sequence (opt4) from hemagglutinin__InfluenzaA__ALE31810

SEQ ID NO: 173390 - RNA, 1701 nt, Artificial Sequence; identical to SEQ ID NO: 172501
  derived and/or modified CDS sequence (opt4) from hemagglutinin__InfluenzaA__ALE31812

SEQ ID NO: 173391 - RNA, 1701 nt, Artificial Sequence
  derived and/or modified CDS sequence (opt4) from hemagglutinin__InfluenzaA__ALE31814
augaagaccaucaucgcccugagcuacauccugugccugguguucgcccagaagcugcccggcaacgacaacagcaccgccacccugugccugggccaccacgccgugcccaacggcaccaucgugaagaccaucaccaacgacagaaucgaggugaccaacgccaccgagcuggugcagaacagcagcaucggcgagaucugcgacagcccccaccagauccuggacggcaagaacugcacccugaucgacgcccugcugggcgacccccagugcgacggcuuccagaacaagaagugggaccuguucguggagagaagcaaggcccacagcaacugcuaccccuacgacgugcccgacuacgccagccugagaagccugguggccagcagcggcacccuggaguucaacaacgagagcuucaacugggccggcgugacccagaacggcaccagcagcagcugcaucagaggcagcaacagcagcuucuucagcagacugaacuggcugacccaccugaacagcaaguaccccgcccugaacgugaccaugcccaacaacgagcaguucgacaagcuguacaucuggggcgugcaccaccccggcaccgacaaggaccagaucuuccuguacgcccagcccagcggcagaaucaccgugagcaccaagagaagccagcaggccgugauccccaacaucggcagcagacccagaaucagagacauccccagcagaaucagcaucuacuggaccaucgugaagcccggcgacauccugcugaucaacagcaccggcaaccugaucgcccccagaggcuacuucaagaucagaagcggcaagagcagcaucaugagaagcgacgcccccaucggcaagugcaagagcgagugcaucacccccaacggcagcauccccaacgacaagcccuuccagaacgugaacagaaucaccuacggcgccugccccagauacgugaagcagagcacccugaagcuggccaccggcaugagaaacgugcccgagagacagaccagaggcaucuucggcgccaucgccggcuucaucgagaacggcugggagggcaugguggacggcugguacggcuucagacaccagaacagcgagggcagaggccaggccgccgaccugaagagcacccaggccgccaucgaccagaucaacggcaagcugaacagacugaucggcaagaccaacgagaaguuccaccagaucgagaaggaguucagcgagguggagggcagaauccaggaccuggagaaguacguggaggacaccaagaucgaccuguggagcuacaacgccgagcugcugguggcccuggagaaccagcacaccaucgaccugaccgacagcgagaugaacaagcuguucgagaagaccaagaagcagcugagagagaacgccgaggacaugggcaacggcugcuucaagaucuaccacaagugcgacaacgccugcaucggcagcaucagaaacggcaccuacgaccacgacguguacagagacgaggcccugaacaacagauuccagaucaagggcguggagcugaagagcggcuacaaggacuggauccuguggaucagcuucgccaucagcugcuuccugcugugcguggcccugcugggcuucaucaugugggccugccagaagggcaacaucagaugcaacaucugcaucuga

SEQ ID NO: 173392 - RNA, 1701 nt, Artificial Sequence; identical to SEQ ID NO: 173391
  derived and/or modified CDS sequence (opt4) from hemagglutinin__InfluenzaA__ALE31815

SEQ ID NO: 173393 - RNA, 1701 nt, Artificial Sequence; identical to SEQ ID NO: 172501
  derived and/or modified CDS sequence (opt4) from hemagglutinin__InfluenzaA__ALE31818

SEQ ID NO: 173394 - RNA, 1701 nt, Artificial Sequence
  derived and/or modified CDS sequence (opt4) from hemagglutinin__InfluenzaA__ALE31819
augaagaccaucaucgcccugagcuacauccugugccugguguucgcccagaagauccccggcaacgacaacagcaccgccacccugugccugggccaccacgccgugcccaacggcaccaucgugaagaccaucaccaacgacagaaucgaggugaccaacgccaccgagcuggugcagaacagcagcaucggcgagaucugcgacagcccccaccagauccuggacggcgagaacugcacccugaucgacgcccugcugggcgacccccagugcgacggcuuccagaacaagaagugggaccuguucguggagagaagcaaggccuacagcaacugcuaccccuacgacgugcccgacuacgccagccugagaagccugguggccagcagcggcacccuggaguucaacaacgagagcuucaacuggaccggcgugacccagaacggcaccagcagcgccugcaucagaggcagcagcagcagcuucuucagcagacugaacuggcugacccaccugaacuacaccuaccccgcccugaacgugaccaugcccaacaaggagcaguucgacaagcuguacaucuggggcgugcaccaccccggcaccgacaaggaccagaucuuccuguacgcccagagcagcggcagaaucaccgugagcaccaagagaagccagcaggccgugauccccaacaucggcagcagacccagaaucagagacauccccagcagaaucagcaucuacuggaccaucgugaagcccggcgacauccugcugaucaacagcaccggcaaccugaucgcccccagaggcuacuucaagaucagaagcggcaagagcagcaucaugagaagcgacgcccccaucggcaagugcaagagcgagugcaucacccccaacggcagcauccccaacgacaagcccuuccagaacgugaacagaaucaccuacggcgccugccccagauacgugaagcacagcacccugaagcuggccaccggcaugagaaacgugcccgagaagcagaccagaggcaucuucggcgccaucgccggcuucaucgagaacggcugggagggcaugguggacggcugguacggcuucagacaccagaacagcgagggcagaggccaggccgccgaccugaagagcacccaggccgccaucgaccagaucaacggcaagcugaacagacugaucggcaagaccaacgagaaguuccaccagaucgagaaggaguucagcgagguggagggcagaauccaggaccuggagaaguacguggaggacaccaagaucgaccuguggagcuacaacgccgagcugcugguggcccuggagaaccagcacaccaucgaccugaccgacagcgagaugaacaagcuguucgagaagaccaagaagcagcugagagagaacgccgaggacaugggcaacggcugcuucaagaucuaccacaagugcgacaacgccugcaucggcagcaucagaaacggcaccuacgaccacaacguguacagagacgaggcccugaacaacagauuccagaucaagggcguggagcugaagagcggcuacaaggacuggauccuguggaucagcuucgccaucagcugcuuccugcugugcguggcccugcugggcuucaucaugugggccugccagaagggcaacaucagaugcaacaucugcaucuga

SEQ ID NO: 173395 - RNA, 1701 nt, Artificial Sequence; identical to SEQ ID NO: 173045
  derived and/or modified CDS sequence (opt4) from hemagglutinin__InfluenzaA__ALE31820

SEQ ID NO: 173396 - RNA, 1701 nt, Artificial Sequence
  derived and/or modified CDS sequence (opt4) from hemagglutinin__InfluenzaA__ALE31821
augaagaccaucaucgcccugagcuacacccugugccugguguucgcccagaagauccccggcaacgacaacagcaccgccacccugugccugggccaccacgccgugcccaacggcaccaucgugaagaccaucaccaacgacagaaucgaggugaccaacgccaccgagcuggugcagaacagcagcaucggcgagaucugcgacagcccccaccagauccuggacggcgagaacugcacccugaucgacgcccugcugggcgacccccagugcgacggcuuccagaacaagaagugggaccuguucguggagagaagcaaggcccacagcaacugcuaccccuacgacgugcccgacuacgccagccugagaagccugguggccagcagcggcacccuggaguucaacaacgagagcuucaacuggaccggcgugacccagaacggcaccagcagcgccugcaucagaagaagcagcagcagcuucuucagcagacugaacuggcugacccaccugaacuacaccuaccccgcccugaacgugaccaugcccaacaacgagcaguucgacaagcuguacaucuggggcgugcaccaccccggcaccgacaaggaccagaucuuccuguacgcccagagcagcggcagaaucaccgugagcaccaagagaagccagcaggccgugauccccaacaucggcagcagacccagaaucagagacauccccagcagaaucagcaucuacuggaccaucgugaagcccggcgacauccugcugaucaacagcaccggcaaccugaucgcccccagaggcuacuucaagaucagaagcggcaagagcagcaucaugagaagcgacgcccccaucggcaagugcaagagcgagugcaucacccccaacggcagcauccccaacgacaagcccuuccagaacgugaacagaaucaccuacggcgccugccccagauacgugaagcacagcacccugaagcuggccaccggcaugagaaacgugcccgagaagcagaccagaggcaucuucggcgccaucgccggcuucaucgagaacggcugggagggcaugguggacggcugguacggcuucagacaccagaacagcgagggcagaggccaggccgccgaccugaagagcacccaggccgccaucgaccagaucaacggcaagcugaacagacugaucggcaagaccaacgagaaguuccaccagaucgagaaggaguucagcgagguggagggcagaauccaggaccuggagaaguacguggaggacaccaagaucgaccuguggagcuacaacgccgagcugcugguggcccuggagaaccagcacaccaucgaccugaccgacagcgagaugaacaagcuguucgagaagaccaagaagcagcugagagagaacgccgaggacaugggcaacggcugcuucaagaucuaccacaagugcgacaacgccugcaucggcagcaucagaaacggcaccuacgaccacaacguguacagagacgaggcccugaacaacagauuccagaucaagggcguggagcugaagagcggcuacaaggacuggauccuguggaucagcuucgccaucagcugcuuccugcugugcguggcccugcugggcuucaucaugugggccugccagaagggcaacaucagaugcaacaucugcaucuga

SEQ ID NO: 173397 - RNA, 1701 nt, Artificial Sequence; identical to SEQ ID NO: 173137
  derived and/or modified CDS sequence (opt4) from hemagglutinin__InfluenzaA__ALE31822

SEQ ID NO: 173398 - RNA, 1701 nt, Artificial Sequence; identical to SEQ ID NO: 173045
  derived and/or modified CDS sequence (opt4) from hemagglutinin__InfluenzaA__ALE31823

SEQ ID NO: 173399 - RNA, 1701 nt, Artificial Sequence; identical to SEQ ID NO: 172501
  derived and/or modified CDS sequence (opt4) from hemagglutinin__InfluenzaA__ALE31824

SEQ ID NO: 173400 - RNA, 1701 nt, Artificial Sequence
  derived and/or modified CDS sequence (opt4) from hemagglutinin__InfluenzaA__ALE31825
augaagaccaucaucgcccugagcuacauccugugccugguguucgcccagaagauccccggcaacgacaacagcaccgccacccugugccugggccaccacgccgugcccaacggcaccaucgugaagaccaucaccaacgacagaaucgaggugaccaacgccaccgagcuggugcagaacagcagcaucggcgagaucugcgacagcccccaccagauccuggacggcgagaacugcacccugaucgacgcccugcugggcgacccccagugcgacggcuuccagaacaagaagugggaccuguucguggagagaagcaaggccuacagcaacugcuaccccuacgacgugcccgacuacgccagccugagaagccugguggccagcagcggcacccuggaguucaacaacgagagcuucaacuggaccggcgugacccagaacggcaccagcagcgccugcaucagaagaagcagcagcagcuucuucagcagacugaacuggcugacccaccugaacuacagauaccccgcccugaacgugaccaugcccaacaacgagcaguucgacaagcuguacaucuggggcgugcaccaccccggcaccgacaaggaccagaucuuccuguacgcccagagcagcggcagaaucaccgugagcaccaagagaagccagcaggccgugauccccaacaucggcagcagacccagaaucagagacauccccagcagaaucagcaucuacuggaccaucgugaagcccggcgacauccugcugaucaacagcaccggcaaccugaucgcccccagaggcuacuucaagaucagaagcggcaagagcagcaucaugagaagcgacgcccccaucggcaagugcaagagcgagugcaucacccccaacggcagcauccccaacgacaagcccuuccagaacgugaacagaaucaccuacggcgccugccccagauacgugaagcacagcacccugaagcuggccaccggcaugagaaacgugcccgagaagcagaccagaggcaucuucggcgccaucgccggcuucaucgagaacggcugggagggcaugguggacggcugguacggcuucagacaccagaacagcgagggcagaggccaggccgccgaccugaagagcacccaggccgccaucgaccagaucaacggcaagcugaacagacugaucggcaagaccaacgagaaguuccaccagaucgagaaggaguucagcgagguggagggcagaauccaggaccuggagaaguacguggaggacaccaagaucgaccuguggagcuacaacgccgagcugcugguggcccuggagaaccagcacaccaucgaccugaccgacagcgagaugaacaagcuguucgagaagaccaagaagcagcugagagagaacgccgaggacaugggcaacggcugcuucaagaucuaccacaagugcgacaacgccugcaucggcagcaucagaaacggcaccuacgaccacaacguguacagagacgaggcccugaacaacagauuccagaucaagggcguggagcugaagagcggcuacaaggacuggauccuguggaucagcuucgccaucagcugcuuccugcugugcguggcccugcugggcuucaucaugugggccugccagaagggcaacaucagaugcaacaucugcaucuga

SEQ ID NO: 173401 - RNA, 1701 nt, Artificial Sequence; identical to SEQ ID NO: 172501
  derived and/or modified CDS sequence (opt4) from hemagglutinin__InfluenzaA__ALE31826

SEQ ID NO: 173402 - RNA, 1701 nt, Artificial Sequence; identical to SEQ ID NO: 172501
  derived and/or modified CDS sequence (opt4) from hemagglutinin__InfluenzaA__ALE31827

SEQ ID NO: 173403 - RNA, 1701 nt, Artificial Sequence; identical to SEQ ID NO: 172501
  derived and/or modified CDS sequence (opt4) from hemagglutinin__InfluenzaA__ALE31828

SEQ ID NO: 173404 - RNA, 1701 nt, Artificial Sequence; identical to SEQ ID NO: 173058
  derived and/or modified CDS sequence (opt4) from hemagglutinin__InfluenzaA__ALE31829

SEQ ID NO: 173405 - RNA, 1701 nt, Artificial Sequence
  derived and/or modified CDS sequence (opt4) from hemagglutinin__InfluenzaA__ALE31830
augaagaccaucaucgcccugagcuacauccugugccugguguucgcccagaagauccccggcaacgacaacagcaccgccacccugugccugggccaccacgccgugcccaacggcaccaucgugaagaccaucaccaacgacagaaucgaggugaccaacgccaccgagcuggugcagaacagcagcaucggcgagaucugcgacagcccccaccagauccuggacggcgagaacugcacccugaucgacgcccugcugggcgacccccagugcgacggcuuccagaacaagaagugggaccuguucguggagagaagcaaggccuacagcaacugcuaccccuacgacgugcccgacuacgccagccugagaagccugguggccagcagcggcacccuggaguucaacaacgagagcuucaacuggaccggcgugacccagaacggcaccagcagcgccugcaucagaagaagcagcagcagcuucuucagcagacugaacuggcugacccaccugaacuacaccuaccccgcccugaacgugaccaugcccaacaacgagcaguucgacaagcuguacaucuggggcgugcaccaccccggcaccgacaaggaccagaucuuccuguacgcccagagcagcggcagaaucaccgugagcaccaagagaagccagcaggccgugauccccaacaucggcagcagacccagaaucagagacauccccagcagaaucagcaucuacuggaccaucgugaagcccggcgacauccugcugaucaacagcaccggcaaccugaucgcccccagaggcuacuucaagaucagaagcggcaagagcagcaucaugagaagcgacgcccccaucggcaagugcaagagcgagugcaucacccccaacggcagcauccccaacgacaagcccuuccagaacgugaacagaaucaccuacggcgccugccccagauacgugaagcacagcacccugaagcuggccaccggcaugagaaacgugcccgagaagcagaccagaggcaucuucggcgccaucgccggcuucaucgagaacggcugggagggcaugguggacggcugguacggcuucagacaccagaacagcgagggcagaggccaggccgccgaccugaagagcacccaggccgccaucgaccagaucaacggcaagcugaacagacugaucggcaagaccaacgagaaguuccaccagaucgagaaggaguucagcgagguggagggcagaauccaggaccuggagaaguacguggaggacaccaagaucgaccuguggagcuacaacgccgagcugcugguggcccuggagaaccagcacaccaucgacaucaccgacagcgagaugaacaagcuguucgagaagaccaagaagcagcugagagagaacgccgaggacaugggcaacggcugcuucaagaucuaccacaagugcgacaacgccugcaucggcagcaucagaaacggcaccuacgaccacaacguguacagagacgaggcccugaacaacagauuccagaucaagggcguggagcugaagagcggcuacaaggacuggauccuguggaucagcuucgccaucagcugcuuccugcugugcguggcccugcugggcuucaucaugugggccugccagaagggcaacaucagaugcaacaucugcaucuga

SEQ ID NO: 173406 - RNA, 1701 nt, Artificial Sequence
  derived and/or modified CDS sequence (opt4) from hemagglutinin__InfluenzaA__ALE31832
augaagaacaucaucgcccugagcuacauccugugccugguguucgcccagaagauccccggcaacgacaacagcaccgccacccugugccugggccaccacgccgugcccaacggcaccaucgugaagaccaucaccaacgacagaaucgaggugaccaacgccaccgagcuggugcagaacagcagcaucggcgagaucugcgacagcccccaccagauccuggacggcgagaacugcacccugaucgacgcccugcugggcgacccccagugcgacggcuuccagaacaagaagugggaccuguucguggagagaagcaaggccuacagcaacugcuaccccuacgacgugcccgacuacgccagccugagaagccugguggccagcagcggcacccuggaguucaacaacgagagcuucaacuggaccggcgugacccagaacggcaccagcagcgccugcaucagaagaagcaacagcagcuucuucagcagacugaacuggcugacccaccugaacuacaccuaccccgcccugaacgugaccaugcccaacaacgagcaguucgacaagcuguacaucuggggcgugcaccaccccggcaccgacaaggaccagaucuuccuguacgcccagagcagcggcagaaucaccgugagcaccaagagaagccagcaggccgugauccccaacaucggcagcagacccagaaucagagacauccccagcagaaucagcaucuacuggaccaucgugaagcccggcgacauccugcugaucaacagcaccggcaaccugaucgcccccagaggcuacuucaagaucagaagcggcaagagcagcaucaugagaagcgacgcccccaucggcaagugcaagagcgagugcaucacccccaacggcagcauccccaacgacaagcccuuccagaacgugaacagaaucaccuacggcgccugccccagauacgugaagcacagcacccugaagcuggccaccggcaugagaaacgugcccgagaagcagaccagaggcaucuucggcgccaucgccggcuucaucgagaacggcugggagggcaugguggacggcugguacggcuucagacaccagaacagcgagggcagaggccaggccgccgaccugaagagcacccaggccgccaucgaccagaucaacggcaagcugaacagacugaucggcaagaccaacgagaaguuccaccagaucgagaaggaguucagcgagguggagggcagaauccaggaccuggagaaguacguggaggacaccaagaucgaccuguggagcuacaacgccgagcugcugguggcccuggagaaccagcacaccaucgaccugaccgacagcgagaugaacaagcuguucgagaagaccaagaagcagcugagagagaacgccgaggacaugggcaacggcugcuucaagaucuaccacaagugcgacaacgccugcaucggcagcaucagaaacggcaccuacgaccacaacguguacagagacgaggcccugaacaacagauuccagaucaagggcguggagcugaagagcggcuacaaggacuggauccuguggaucagcuucgccaucagcugcuuccugcugugcguggcccugcugggcuucaucaugugggccugccagaagggcaacaucagaugcaacaucugcaucuga

SEQ ID NO: 173407 - RNA, 1701 nt, Artificial Sequence
  derived and/or modified CDS sequence (opt4) from hemagglutinin__InfluenzaA__ALE31833
augaagaccaucaucgcccugagcuacauccugugccuggugagcgcccagaagauccccggcaacgacaacagcaccgccacccugugccugggccaccacgccgugcccaacggcaccaucgugaagaccaucaccaacgacagaaucgaggugaccaacgccaccgagcuggugcagaacagcagcaucggcgagaucugcaacagcccccaccagauccuggacggcgagaacugcacccugaucgacgcccugcugggcgacccccagugcgacggcuuccagaacaagaagugggaccuguucguggagagaagcaaggccuacagcaacugcuaccccuacgacgugcccgacuacgccagccugagaagccugguggccagcagcggcacccuggaguucaacaacgagagcuucaacuggaccggcgugacccagaacggcaccagcagcgccugcaucagaagaagcagcagcagcuucuucagcagacugaacuggcugacccaccugaacuacaccuaccccgcccugaacgugaccaugcccaacaacgagcaguucgacaagcuguacaucuggggcgugcaccaccccggcaccgacaaggaccagaucuuccuguacgcccagagcagcggcagaaucaccgugagcaccaagagaagccagcaggccgugauccccaacaucggcagcagacccagaaucagagacauccccagcagaaucagcaucuacuggaccaucgugaagcccggcgacauccugcugaucaacagcaccggcaaccugaucgcccccagaggcuacuucaagaucagaagcggcaagagcagcaucaugagaagcgacgcccccaucggcaagugcaagagcgagugcaucacccccaacggcagcauccccaacgacaagcccuuccagaacgugaacagaaucaccuacggcgccugccccagauacgugaagcacagcacccugaagcuggccaccggcaugagaaacgugcccgagaagcagaccagaggcaucuucggcgccaucgccggcuucaucgagaacggcugggagggcaugguggacggcugguacggcuucagacaccagaacagcgagggcagaggccaggccgccgaccugaagagcacccaggccgccaucgaccagaucaacggcaagcugaacagacugaucggcaagaccaacgagaaguuccaccagaucgagaaggaguucagcgagguggagggcagaauccaggaccuggagaaguacguggaggacaccaagaucgaccuguggagcuacaacgccgagcugcugguggcccuggagaaccagcacaccaucgaccugaccgacagcgagaugaacaagcuguucgagaagaccaagaagcagcugagagagaacgccgaggacaugggcaacggcugcuucaagaucuaccacaagugcgacaacgccugcaucggcagcaucagaaacggcaccuacgaccacaacguguacagagacgaggcccugaacaacagauuccagaucaagggcguggagcugaagagcggcuacaaggacuggauccuguggaucagcuucgccaucagcugcuuccugcugugcguggcccugcugggcuucaucaugugggccugccagaagggcaacaucagaugcaacaucugcaucuga

SEQ ID NO: 173408 - RNA, 1701 nt, Artificial Sequence
  derived and/or modified CDS sequence (opt4) from hemagglutinin__InfluenzaA__ALE31834
augaagaccaucaucgcccugagcuacauccugugccugguguucgcccagaagcugcccggcaacgacaacagcaccgccacccugugccugggccaccacgccgugcccaacggcaccaucgugaagaccaucaccaacgacagaaucgaggugaccaacgccaccgagcuggugcagaacagcagcaucggcgagaucugcgacagcccccaccagauccuggacggcgagaacugcacccugaucgacgcccugcugggcgacccccagugcgacggcuuccagaacaagaagugggaccuguucguggagagaagcaaggcccacagcaacugcuaccccuacgacgugcccgacuacgccagccugagaagccugguggccagcagcggcacccuggaguucaacaacgagagcuucaacugggccggcgugacccagaacggcaccagcagcagcugcaucagaggcagcaacagcagcuucuucagcagacugaacuggcugacccaccugaacagcaaguaccccgcccugaacgugaccaugcccaacaacgagcaguucgacaagcuguacaucuggggcgugcaccaccccggcaccgacaaggaccagaucuuccuguacgcccagagcagcggcagaaucaccgugagcaccaagagaagccagcaggccgugauccccaacaucggcagcagacccagaaucagagacauccccagcagaaucagcaucuacuggaccaucgugaagcccggcgacauccugcugaucaacagcaccggcaaccugaucgcccccagaggcuacuucaagaucagaagcggcaagagcagcaucaugagaagcgacgcccccaucggcaagugcaagagcgagugcaucacccccaacggcagcauccccaacgacaagcccuuccagaacgugaacagaaucaccuacggcgccugccccagauacgugaagcagagcacccugaagcuggccaccggcaugagaaacgugcccgagaagcagaccagaggcaucuucggcgccaucgccggcuucaucgagaacggcugggagggcaugguggacggcugguacggcuucagacaccagaacagcgagggcagaggccaggccgccgaccugaagagcacccaggccgccaucgaccagaucaacggcaagcugaacagacugaucggcaagaccaacgagaaguuccaccagaucgagaaggaguucagcgagguggagggcagaauccaggaccuggagaaguacguggaggacaccaagaucgaccuguggagcuacaacgccgagcugcugguggcccuggagaaccagcacaccaucgaccugaccgacagcgagaugaacaagcuguucgagaagaccaagaagcagcugagagagaacgccgaggacaugggcaacggcugcuucaagaucuaccacaagugcgacaacgccugcaucggcagcaucagaaacggcaccuacgaccacgacguguacagagacgaggcccugaacaacagauuccagaucaagggcguggagcugaagagcggcuacaaggacuggauccuguggaucagcuucgccaucagcugcuuccugcugugcguggcccugcugggcuucaucaugugggccugccagaagggcaacaucagaugcaacaucugcaucuga

SEQ ID NO: 173409 - RNA, 1701 nt, Artificial Sequence; identical to SEQ ID NO: 173159
  derived and/or modified CDS sequence (opt4) from hemagglutinin__InfluenzaA__ALE31835

SEQ ID NO: 173410 - RNA, 1701 nt, Artificial Sequence; identical to SEQ ID NO: 172501
  derived and/or modified CDS sequence (opt4) from hemagglutinin__InfluenzaA__ALE31836

SEQ ID NO: 173411 - RNA, 1701 nt, Artificial Sequence
  derived and/or modified CDS sequence (opt4) from hemagglutinin__InfluenzaA__ALE31837
augaagaccaucaucgcccugagcuacauccugugccugguguacgcccagaagauccccggcaacgacaacagcaccgccacccugugccugggccaccacgccgugcccaacggcaccaucgugaagaccaucaccaacgacagaaucgaggugaccaacgccaccgagcuggugcagaacagcagcaucggcgagaucugcgacagcccccaccagauccuggacggcgagaacugcacccugaucgacgcccugcugggcgacccccagugcgacggcuuccagaacaagaagugggaccuguucguggagagaagcaaggccuacagcaacugcuaccccuacgacgugcccgacuacgccagccugagaagccugguggccagcagcggcacccuggaguucaacaacgagagcuucaacuggaccggcgugacccagaacggcaccagcagcgccugcaucagaagaagcagcagcagcuucuucagcagacugaacuggcugacccaccugaacuacaccuaccccgcccugaacgugaccaugcccaacaacgagcaguucgacaagcuguacaucuggggcgugcaccaccccggcaccgacaaggaccagaucuuccuguacgcccagagcagcggcagaaucaccgugagcaccaagagaagccagcaggccgugauccccaacaucggcagcagacccagaaucagagacauccccagcagaaucagcaucuacuggaccaucgugaagcccggcgacauccugcugaucaacagcaccggcaaccugaucgcccccagaggcuacuucaagaucagaagcggcaagagcagcaucaugagaagcgacgcccccaucggcaagugcaagagcgagugcaucacccccaacggcagcauccccaacgacaagcccuuccagaacgugaacagaaucaccuacggcgccugccccagauacgugaagcacagcacccugaagcuggccaccggcaugagaaacgugcccgagaagcagaccagaggcaucuucggcgccaucgccggcuucaucgagaacggcugggagggcaugguggacggcugguacggcuucagacaccagaacagcgagggcagaggccaggccgccgaccugaagagcacccaggccgccaucgaccagaucaacggcaagcugaacagacugaucggcaagaccaacgagaaguuccaccagaucgagaaggaguucagcgagguggagggcagaauccaggaccuggagaaguacguggaggacaccaagaucgaccuguggagcuacaacgccgagcugcugguggcccuggagaaccagcacaccaucgaccugaccgacagcgagaugaacaagcuguucgagaagaccaagaagcagcugagagagaacgccgaggacaugggcaacggcugcuucaagaucuaccacaagugcgacaacgccugcaucggcagcaucagaaacggcaccuacgaccacaacguguacagagacgaggcccugaacaacagauuccagaucaagggcguggagcugaagagcggcuacaaggacuggauccuguggaucagcuucgccaucagcugcuuccugcugugcguggcccugcugggcuucaucaugugggccugccagaagggcaacaucagaugcaacaucugcaucuga

SEQ ID NO: 173412 - RNA, 1701 nt, Artificial Sequence; identical to SEQ ID NO: 172501
  derived and/or modified CDS sequence (opt4) from hemagglutinin__InfluenzaA__ALE31838

SEQ ID NO: 173413 - RNA, 1701 nt, Artificial Sequence; identical to SEQ ID NO: 172501
  derived and/or modified CDS sequence (opt4) from hemagglutinin__InfluenzaA__ALE31839

SEQ ID NO: 173414 - RNA, 1701 nt, Artificial Sequence
  derived and/or modified CDS sequence (opt4) from hemagglutinin__InfluenzaA__ALE31840
augaagaccaucaucgcccugagcuacauccugugccugguguucgcccagaagauccccggcaacgacaacagcaccgccacccugugccugggccaccacgccgugcccaacggcaccaucgugaagaccaucaccaacgacagaaucgaggugaccaacgccaccgagcuggugcagaacagcagcaucggcgagaucugcgacagcccccaccagauccuggacggcgagaacugcacccugaucgacgcccugcugggcgacccccagugcgacggcuuccagaacaagaagugggaccuguucguggagagaagcaaggccuacagcaacugcuaccccuacgacgugcccgacuacgccagccugagaagccugguggccagcagcggcacccuggaguucaacaacgagagcuucaacuggaccggcgugacccagaacggcaccagcagcgccugcaucagaagaagcagcagcagcuucuucagcagacugaacuggcugacccaccugaacuacaccuaccccgcccugaacgugaccaugcccaacaacgagcaguucgacaagcuguacaucuggggcgugcaccaccccggcaccgacaaggaccagaucuuccuguacgcccagagcagcggcagaaucaccgugagcaccaagagaagccagcaggccgugauccccaacaucggcagcagacugagaaucagagacauccccagcagaaucagcaucuacuggaccaucgugaagcccggcgacauccugcugaucaacagcaccggcaaccugaucgcccccagaggcuacuucaagaucagaagcggcaagagcagcaucaugagaagcgacgcccccaucggcaagugcaagagcgagugcaucacccccaacggcagcauccccaacgacaagcccuuccagaacgugaacagaaucaccuacggcgccugccccagauacgugaagcacagcacccugaagcuggccaccggcaugagaaacgugcccgagaagcagaccagaggcaucuucggcgccaucgccggcuucaucgagaacggcugggagggcaugguggacggcugguacggcuucagacaccagaacagcgagggcagaggccaggccgccgaccugaagagcacccaggccgccaucgaccagaucaacggcaagcugaacagacugaucggcaagaccaacgagaaguuccaccagaucgagaaggaguucagcgagguggagggcagaauccaggaccuggagaaguacguggaggacaccaagaucgaccuguggagcuacaacgccgagcugcugguggcccuggagaaccagcacaccaucgaccugaccgacagcgagaugaacaagcuguucgagaagaccaagaagcagcugagagagaacgccgaggacaugggcaacggcugcuucaagaucuaccacaagugcgacaacgccugcaucggcagcaucagaaacggcaccuacgaccacaacguguacagagacgaggcccugaacaacagauuccagaucaagggcguggagcugaagagcggcuacaaggacuggauccuguggaucagcuucgccaucagcugcuuccugcugugcguggcccugcugggcuucaucaugugggccugccagaagggcaacaucagaugcaacaucugcaucuga

SEQ ID NO: 173415 - RNA, 1701 nt, Artificial Sequence; identical to SEQ ID NO: 172501
  derived and/or modified CDS sequence (opt4) from hemagglutinin__InfluenzaA__ALE31842

SEQ ID NO: 173416 - RNA, 1701 nt, Artificial Sequence
  derived and/or modified CDS sequence (opt4) from hemagglutinin__InfluenzaA__ALE31843
augcagaccaucaucgcccugagcuacauccugugccugguguucgcccagaagauccccggcaacgacaacagcaccgccacccugugccugggccaccacgccgugcccaacggcaccaucgugaagaccaucaccaacgacagaaucgaggugaccaacgccaccgagcuggugcagaacagcagcaucggcgagaucugcgacagcccccaccagauccuggacggcgagaacugcacccugaucgacgcccugcugggcgacccccagugcgacggcuuccagaacaagaagugggaccuguucguggagagaagcaaggccuacagcaacugcuaccccuacgacgugcccgacuacgccagccugagaagccugguggccagcagcggcacccuggaguucaacaacgagagcuucaacuggaccggcgugacccagaacggcaccagcagcgccugcaucagaaagagcagcagcagcuucuucagcagacugaacuggcugacccaccugaacuacaccuaccccgcccugaacgugaccaugcccaacaacgagcaguucgacaagcuguacaucuggggcgugcaccaccccggcaccgacaaggaccagaucuuccuguacgcccagagcagcggcagaaucaccgugagcaccaagagaagccagcaggccgugauccccaacaucggcagcagacccagaaucagagacauccccagcagaaucagcaucuacuggaccaucgugaagcccggcgacauccugcugaucaacagcaccggcaaccugaucgcccccagaggcuacuucaagauccugagcggcaagagcagcaucaugagaagcgacgcccccaucggcaagugcaagagcgagugcaucacccccaacggcagcauccccaacgacaagcccuuccagaacgugaacagaaucaccuacggcgccugccccagauacgugaagcacagcacccugaagcuggccaccggcaugagaaacgugcccgagaagcagaccagaggcaucuucggcgccaucgccggcuucaucgagaacggcugggagggcaugguggacggcugguacggcuucagacaccagaacagcgagggcagaggccaggccgccgaccugaagagcacccaggccgccaucgaccagaucaacggcaagcugaacagacugaucggcaagaccaacgagaaguuccaccagaucgagaaggaguucagcgagguggagggcagaauccaggaccuggagaaguacguggaggacaccaagaucgaccuguggagcuacaacgccgagcugcugguggcccuggagaaccagcacaccaucgaccugaccgacagcgagaugaacaagcuguucgagaagaccaagaagcagcugagagagaacgccgaggacaugggcaacggcugcuucaagaucuaccacaagugcgacaacgccugcaucggcagcaucagaaacggcaccuacgaccacaacguguacagagacgaggcccugaacaacagauuccagaucaagggcguggagcugaagagcggcuacaaggacuggauccuguggaucagcuucgccaucagcugcuuccugcugugcguggcccugcugggcuucaucaugugggccugccagaagggcaacaucagaugcaacaucugcaucuga

SEQ ID NO: 173417 - RNA, 1701 nt, Artificial Sequence; identical to SEQ ID NO: 173058
  derived and/or modified CDS sequence (opt4) from hemagglutinin__InfluenzaA__ALE31844

SEQ ID NO: 173418 - RNA, 1701 nt, Artificial Sequence; identical to SEQ ID NO: 173034
  derived and/or modified CDS sequence (opt4) from hemagglutinin__InfluenzaA__ALE31846

SEQ ID NO: 173419 - RNA, 1701 nt, Artificial Sequence; identical to SEQ ID NO: 172501
  derived and/or modified CDS sequence (opt4) from hemagglutinin__InfluenzaA__ALE31847

SEQ ID NO: 173420 - RNA, 1701 nt, Artificial Sequence; identical to SEQ ID NO: 172501
  derived and/or modified CDS sequence (opt4) from hemagglutinin__InfluenzaA__ALE31848

SEQ ID NO: 173421 - RNA, 1701 nt, Artificial Sequence
  derived and/or modified CDS sequence (opt4) from hemagglutinin__InfluenzaA__ALE31850
augaagaccaucaucgcccugagcuacauccugugccugguguucgcccagaagcugcccggcaacgacaacagcaccgccacccugugccugggccaccacgccgugcccaacggcaccaucgugaagaccaucaccaacgacagaaucgaggugaccaacgccaccgagcuggugcagaacagcagcaucggcgagaucugcgacagcccccaccagauccuggacggcgagaacugcacccugaucgacgcccugcugggcgacccccagugcgacggcuuccagaacaagaagugggaccuguucguggagagaagcaaggccuacagcaacugcuaccccuacgacgugcccgacuacgccagccugagaagccugguggccagcagcggcacccuggaguucaacaacgagagcuucaacugggccggcgugacccagaacggcaccagcagcagcugcaucagaggcagcaacagcagcuucuucagcagacugaacuggcugacccaccugaacagcaaguaccccgcccugaacgugaccaugcccaacaacgagcaguucgacaagcuguacaucuggggcgugcaccaccccggcaccgacaaggaccagaucuuccuguacgcccagcccagcggcagaaucaccgugagcaccaagagaagccagcaggccgugauccccaacaucggcagcagacccagaaucagagacauccccagcagaaucagcaucuacuggaccaucgugaagcccggcgacauccugcugaucaacagcaccggcaaccugaucgcccccagaggcuacuucaagaucagaagcggcaagagcagcaucaugagaagcgacgcccccaucggcaagugcaagagcgagugcaucacccccaacggcagcauccccaacgacaagcccuuccagaacgugaacagagugaccuacggcgccugccccagauacgugaagcagagcacccugaagcuggccaccggcaugagaaacgugcccgagagacagaccagaggcaucuucggcgccaucgccggcuucaucgagaacggcugggagggcaugguggacggcugguacggcuucagacaccagaacagcgagggcagaggccaggccgccgaccugaagagcacccaggccgccaucgaccagaucaacggcaagcugaacagacugaucggcaagaccaacgagaaguuccaccagaucgagaaggaguucagcgagguggagggcagaauccaggaccuggagaaguacguggaggacaccaagaucgaccuguggagcuacaacgccgagcugcugguggcccuggagaaccagcacaccaucgaccugaccgacagcgagaugaacaagcuguucgagaagaccaagaagcagcugagagagaacgccgaggacaugggcaacggcugcuucaagaucuaccacaagugcgacaacgccugcaucggcagcaucagaaacggcaccuacgaccacgacguguacagagacgaggcccugaacaacagauuccagaucaagggcguggagcugaagagcggcuacaaggacuggauccuguggaucagcuucgccaucagcugcuuccugcugugcguggcccugcugggcuucaucaugugggccugccagaagggcaacaucagaugcaacaucugcaucuga

SEQ ID NO: 173422 - RNA, 1701 nt, Artificial Sequence
  derived and/or modified CDS sequence (opt4) from hemagglutinin__InfluenzaA__ALE31851
augaagaccaucaucgcccugagcuacauccugugccugguguucgcccagaagauccccggcaacgacaacagcaccgccacccugugccugggccaccacgccgugcccaacggcaccaucgugaagaccaucaccaacgacagaaucgaggugaccaacgccaccgagcuggugcagaacagcagcaucggcgagaucugcgacagcccccaccagauccuggacggcgagaacugcacccugaucgacgcccugcugggcgacccccagugcgacggcuuccagaacaagaagugggaccuguucguggagagaagcaaggccuacagcaacugcuaccccuacgacgugcccgacuacgccagccugagaagccugguggccagcagcggcacccuggaguucaacaacgagagcuucaacuggaccggcgugacccagaacggcaccagcagcgccugcaucagaaagagcagcagcagcuucuucagcagacugaacuggcugacccaccugaacuacaccuaccccgcccugaacgugaccaugcccaacaacgagcaguucgacaagcuguacaucuggggcgugcaccaccccggcaccgacaaggaccagaucuuccuguacgccagaagcagcggcagaaucaccgugagcaccaagagaagccagcaggccgugauccccaacaucggcagcagacccagaaucagagacauccccagcagaaucagcaucuacuggaccaucgugaagcccggcgacauccugcugaucaacagcaucggcaaccugaucgcccccagaggcuacuucaagaucagaagcggcaagagcagcaucaugagaagcgacgcccccaucggcaagugcaagagcgagugcaucacccccaacggcagcauccccaacgacaagcccuuccagaacgugaacagaaucaccuacggcgccugccccagauacgugaagcacagcacccugaagcuggccaccggcaugagaaacgugcccgagaagcagaccagaggcaucuucggcgccaucgccggcuucaucgagaacggcugggagggcaugguggacggcugguacggcuucagacaccagaacagcgagggcagaggccaggccgccgaccugaagagcacccaggccgccaucgaccagaucaacggcaagcugaacagacugaucggcaagaccaacgagaaguuccaccagaucgagaaggaguucagcgagguggagggcagaauccaggaccuggagaaguacguggaggacaccaagaucgaccuguggagcuacaacgccgagcugcugguggcccuggagaaccagcacaccaucgaccugaccgacagcgagaugaacaagcuguucgagaagaccaagaagcagcugagagagaacgccgaggacaugggcaacggcugcuucaagaucuaccacaagugcgacaacgccugcaucggcagcaucagaaacggcaccuacgaccacaacguguacagagacgaggcccugaacaacagauuccagaucaagggcguggagcugaagagcggcuacaaggacuggauccuguggaucagcuucgccaucagcugcuuccugcugugcguggcccugcugggcuucaucaugugggccugccagaagggcaacaucagaugcaacaucugcaucuga

SEQ ID NO: 173423 - RNA, 1701 nt, Artificial Sequence; identical to SEQ ID NO: 173045
  derived and/or modified CDS sequence (opt4) from hemagglutinin__InfluenzaA__ALE31852

SEQ ID NO: 173424 - RNA, 1701 nt, Artificial Sequence
  derived and/or modified CDS sequence (opt4) from hemagglutinin__InfluenzaA__ALE31853
augaagaccaucaucgcccugagcuacauccugugccugguguucacccagaagauccccggcaacgacaacagcaccgccacccugugccugggccaccacgccgugcccaacggcaccaucgugaagaccaucaccaacgacagaaucgaggugaccaacgccaccgagcuggugcagaacagcagcaucggcgagaucugcgacagcccccaccagauccuggacggcgagaacugcacccugaucgacgcccugcugggcgacccccagugcgacggcuuccagaacaagaagugggaccuguucguggagagaagcaaggccuacagcaacugcuaccccuacgacgugcccgacuacgccagccugagaagccugguggccagcagcggcacccuggaguucaacaacgagagcuucaacuggaccggcgugacccagaacggcaccagcagcgccugcaucagaagaagcagcagcagcuucuucagcagacugaacuggcugacccaccugaacuacaccuaccccgcccugaacgugaccaugcccaacaacgagcaguucgacaagcuguacaucuggggcgugcaccaccccggcaccgacaaggaccagaucuuccuguacgcccagagcagcggcagaaucaccgugagcaccaagagaagccagcaggccgugauccccaacaucggcagcagacccagaaucagagacauccccagcagaaucagcaucuacuggaccaucgugaagcccggcgacauccugcugaucaacagcaccggcaaccugaucgcccccagaggcuacuucaagaucagaagcggcaagagcagcaucaugagaagcgacgcccccaucggcaagugcaagagcgagugcaucacccccaacggcagcauccccaacgacaagcccuuccagaacgugaacagaaucaccuacggcgccugccccagauacgugaagcacagcacccugaagcuggccaccggcaugagaaacgugcccgagaagcagaccagaggcaucuucggcgccaucgccggcuucaucgagaacggcugggagggcaugguggacggcugguacggcuucagacaccagaacagcgagggcagaggccaggccgccgaccugaagagcacccaggccgccaucgaccagaucaacggcaagcugaacagacugaucggcaagaccaacgagaaguuccaccagaucgagaaggaguucagcgagguggagggcagaauccaggaccuggagaaguacguggaggacaccaagaucgaccuguggagcuacaacgccgagcugcugguggcccuggagaaccagcacaccaucgaccugaccgacagcgagaugaacaagcuguucgagaagaccaagaagcagcugagagagaacgccgaggacaugggcaacggcugcuucaagaucuaccacaagugcgacaacgccugcaucggcagcaucagaaacggcaccuacgaccacaacguguacagagacgaggcccugaacaacagauuccagaucaagggcguggagcugaagagcggcuacaaggacuggauccuguggaucagcuucgccaucagcugcuuccugcugugcguggcccugcugggcuucaucaugugggccugccagaagggcaacaucagaugcaacaucugcaucuga

SEQ ID NO: 173425 - RNA, 1701 nt, Artificial Sequence
  derived and/or modified CDS sequence (opt4) from hemagglutinin__InfluenzaA__ALE31854
augaagaccaucaucgcccugagcuacauccugugccugguguucgcccagaagauccccggcaacgacaacagcaccgccacccugugccugggccaccacgccgugcccaacggcaccaucgugaagaccaucaccaacgacagaaucgaggugaccaacgccaccgagcuggugcagaacagcagcaucggcgagaucugcgacagcccccaccagauccuggacggcgagaacugcacccugaucgacgcccugcugggcgacccccagugcgacggcuuccagaacaagaagugggaccuguucguggagagaagcaaggccuacagcaacugcuaccccuacgacgugcccgacuacgccagccugagaagccugguggccagcagcggcacccuggaguucaacaacgagagcuucaacuggaccggcgugacccagaacggcaccagcagcgccugcaucagaagaagcagcagcagcuucuucagcagacugaacuggcugacccaccugaacuacaccuaccccgcccugaacgugaccaugcccaacaacgagcaguucgacaagcuguacaucuggggcgugcaccaccccggcaccgacaaggaccagaucuuccuguacgccagaagcagcggcagaaucaccgugagcaccaagggcagccagcaggccgugauccccaacaucggcagcagacccagaaucagagacauccccagcagaaucagcaucuacuggaccaucgugaagcccggcgacauccugcugaucaacagcaccggcaaccugaucgcccccagaggcuacuucaagaucagaagcggcaagagcagcaucaugagaagcgacgcccccaucggcagaugcaagagcgagugcaucacccccaacggcagcauccccaacgacaagcccuuccagaacgugaacagaaucaccuacggcgccugccccagauacgugaagcacagcacccugaagcuggccaccggcaugagaaacgugcccgagaagcagaccagaggcaucuucggcgccaucgccggcuucaucgagaacggcugggagggcaugguggacggcugguacggcuucagacaccagaacagcgagggcagaggccaggccgccgaccugaagagcacccaggccgccaucgaccagaucaacggcaagcugaacagacugaucggcaagaccaacgagaaguuccaccagaucgagaaggaguucagcgagguggagggcagaauccaggaccuggagaaguacguggaggacaccaagaucgaccuguggagcuacaacgccgagcugcugguggcccuggagaaccagcacaccaucgaccugaccgacagcgagaugaacaagcuguucgagaagaccaagaagcagcugagagagaacgccgaggacaugggcaacggcugcuucaagaucuaccacaagugcgacaacgccugcaucggcagcaucagaaacggcaccuacgaccacaacguguacagagacgaggcccugaacaacagauuccagaucaagggcguggagcugaagagcggcuacaaggacuggauccuguggaucagcuucgccaucagcugcuuccugcugugcguggcccugcugggcuucaucaugugggccugccagaagggcaacaucagaugcaacaucugcaucuga

SEQ ID NO: 173426 - RNA, 1701 nt, Artificial Sequence; identical to SEQ ID NO: 173187
  derived and/or modified CDS sequence (opt4) from hemagglutinin__InfluenzaA__ALE31855

SEQ ID NO: 173427 - RNA, 1701 nt, Artificial Sequence; identical to SEQ ID NO: 172501
  derived and/or modified CDS sequence (opt4) from hemagglutinin__InfluenzaA__ALE31856

SEQ ID NO: 173428 - RNA, 1701 nt, Artificial Sequence; identical to SEQ ID NO: 172501
  derived and/or modified CDS sequence (opt4) from hemagglutinin__InfluenzaA__ALE31857

SEQ ID NO: 173429 - RNA, 1701 nt, Artificial Sequence
  derived and/or modified CDS sequence (opt4) from hemagglutinin__InfluenzaA__ALE31858
augaagaccaucaucgcccugagcuacauccugugccugguguucgcccagaagauccccggcaacgacaacagcaccgccacccugugccugggccaccacgccgugcccaacggcaccaucgugaagaccaucaccaacgacagaaucgaggugaccaacgccaccgagcuggugcagaacagcagcaucggcgagaucugcgacagcccccaccagauccuggacggcgagaacugcacccugaucgacgcccugcugggcgacccccagugcgacggcuuccagaacaagaagugggaccuguucguggagagaagcaaggccuacagcaacugcuaccccuacgacgugcccgacuacgccagccugagaagccugguggccagcagcggcacccuggaguucaacaacgagagcuucaacuggaccggcgugacccagaacggcaccagcagcgccugcaucagaagaagcagcagcagcuucuucagcagacugaacuggcugacccaccugaaguacaccuaccccgcccugaacgugaccaugcccaacaacgagcaguucgacaagcuguacaucuggggcgugcaccaccccggcaccgacaaggaccagaucuuccuguacgcccagagcagcggcagaaucaccgugagcaccaagagaagccagcaggccgugauccccaacaucggcagcagacccagaaucagagacauccccagcagaaucagcaucuacuggaccaucgugaagcccggcgacauccugcugaucaacagcaccggcaaccugaucgcccccagaggcuacuucaagaucagaagcggcaagagcagcaucaugagaagcgacgcccccaucggcaagugcaagagcgagugcaucacccccaacggcagcauccccaacgacaagcccuuccagaacgugaacagaaucaccuacggcgccugccccagauacgugaagcacagcacccugaagcuggccaccggcaugagaaacgugcccgagaagcagaccagaggcaucuucggcgccaucgccggcuucaucgagaacggcugggagggcaugguggacggcugguacggcuucagacaccagaacagcgagggcagaggccaggccgccgaccugaagagcacccaggccgccaucgaccagaucaacggcaagcugaacagacugaucggcaagaccaacgagaaguuccaccagaucgagaaggaguucagcgagguggagggcagaauccaggaccuggagaaguacguggaggacaccaagaucgaccuguggagcuacaacgccgagcugcugguggcccuggagaaccagcacaccaucgaccugaccgacagcgagaugaacaagcuguucgagaagaccaagaagcagcugagagagaacgccgaggacaugggcaacggcugcuucaagaucuaccacaagugcgacaacgccugcaucggcagcaucagaaacggcaccuacgaccacaacguguacagagacgaggcccugaacaacagauuccagaucaagggcguggagcugaagagcggcuacaaggacuggauccuguggaucagcuucgccaucagcugcuuccugcugugcguggcccugcugggcuucaucaugugggccugccagaagggcaacaucagaugcaacaucugcaucuga

SEQ ID NO: 173430 - RNA, 1701 nt, Artificial Sequence
  derived and/or modified CDS sequence (opt4) from hemagglutinin__InfluenzaA__ALE31859
augaagaccaucaucgcccugagcuacauccugugccugguguucgcccagaagauccccggcaacgacaacagcaccgccacccugugccugggccaccacgccgugcccaacggcaccaucgugaagaccaucaccaacgacagaaucgaggugaccaacgccaccgagcuggugcagaacagcagcaucggcgagaucugcgacagcccccaccagauccuggacggcgagaacugcacccugaucgacgcccugcugggcgacccccagugcgacggcuuccagaacaagaagugggaccuguucguggagagaagcaaggccuacagcaacugcuaccccuacgacgugcccgacuacgccagccugagaagccugguggccagcagcggcacccuggaguucaacaacgagagcuucaacuggaccggcgugacccagaacggcaccagcagcgccugcaccagaagaagcagcagcagcuucuucagcagacugaacuggcugacccaccugaacuacaccuaccccgcccugaacgugaccaugcccaacaacgagcaguucgacaagcuguacaucuggggcgugcaccaccccggcaccgacaaggaccagaucuuccuguacgcccagagcagcggcagaaucaccgugagcaccaagagaagccagcaggccgugauccccaacaucggcagcagacccagaaucagagacauccccagcagaaucagcaucuacuggaccaucgugaagcccggcgacaugcugcugaucaacagcaccggcaaccugaucgcccccagaggcuacuucaagaucagaagcggcaagagcagcaucaugagaagcgacgcccccaucggcaagugcaagagcgagugcaucacccccaacggcagcauccccaacgacaagcccuuccagaacgugaacagaaucaccuacggcgccugccccagauacgugaagcacagcacccugaagcuggccaccggcaugagaaacgugcccgagaagcagaccagaggcaucuucggcgccaucgccggcuucaucgagaacggcugggagggcaugguggacggcugguacggcuucagacaccagaacagcgagggcagaggccaggccgccgaccugaagagcacccaggccgccaucgaccagaucaacggcaagcugaacagacugaucggcaagaccaacgagaaguuccaccagaucgagaaggaguucagcgagguggagggcagaauccaggaccuggagaaguacguggaggacaccaagaucgaccuguggagcuacaacgccgagcugcugguggcccuggagaaccagcacaccaucgaccugaccgacagcgagaugaacaagcuguucgagaagaccaagaagcagcugagagagaacgccgaggacaugggcaacggcugcuucaagaucuaccacaagugcgacaacgccugcaucggcagcaucagaaacggcaccuacgaccacaacguguacagagacgaggcccugaacaacagauuccagaucaagggcguggagcugaagagcggcuacaaggacuggauccuguggaucagcuucgccaucagcugcuuccugcugugcguggcccugcugggcuucaucaugugggccugccagaagggcaacaucagaugcaacaucugcaucuga

SEQ ID NO: 173431 - RNA, 1701 nt, Artificial Sequence
  derived and/or modified CDS sequence (opt4) from hemagglutinin__InfluenzaA__ALE31860
augaagaccaucaucgcccugagcuacauccugugccugguguucgcccagaagauccccggcaacgacaacagcaccgccacccugugccugggccaccacgccgugcccaacggcaccaucgugaagaccaucaccaacgacagaaucgaggugaccaacgccaccgagcuggugcagaacagcagcaucggcaagaucugcgacagcccccaccagauccuggacggcgagaacugcacccugaucgacgcccugcugggcgacccccagugcgacggcuuccagaacaagaagugggaccuguucguggagagaagcaaggccuacagcaacugcuaccccuacgacgugcccgacuacgccagccugagaagccugguggccagcagcggcacccuggaguucaacaacgagagcuucaacuggaccggcgugacccagaacggcaccagcagcgccugcaucagaagaagcagcagcagcuucuucagcagacugaacuggcugacccaccugaacuacaccuaccccgcccugaacgugaccaugcccaacaacgagcaguucgacaagcuguacaucuggggcgugcaccaccccggcaccgacaaggaccagaucuuccuguacgcccagagcagcggcagaaucaccgugagcaccaagagaagccagcaggccgugauccccaacaucggcagcagacccagaaucagagacauccccagcagaaucagcaucuacuggaccaucgugaagcccggcgacauccugcugaucaacagcaccggcaaccugaucgcccccagaggcuacuucaagaucagaagcggcgagagcagcaucaugagaagcgacgcccccaucggcaagugcaagagcgagugcaucacccccaacggcagcauccccaacgacaagcccuuccagaacgugaacagaaucaccuacggcgccugccccagauacgugaagcacagcacccugaagcuggccaccggcaugagaaacgugcccgagaagcagaccagaggcaucuucggcgccaucgccggcuucaucgagaacggcugggagggcaugguggacggcugguacggcuucagacaccagaacagcgagggcagaggccaggccgccgaccugaagagcacccaggccgccaucgaccagaucaacggcaagcugaacagacugaucggcaagaccaacgagaaguuccaccagaucgagaaggaguucagcgagguggagggcagaauccaggaccuggagaaguacguggaggacaccaagaucgaccuguggagcuacaacgccgagcugcugguggcccuggagaaccagcacaccaucgaccugaccgacagcgagaugaacaagcuguucgagaagaccaagaagcagcugagagagaacgccgaggacaugggcaacggcugcuucaagaucuaccacaagugcgacaacgccugcaucggcagcaucagaaacggcaccuacgaccacaacguguacagagacgaggcccugaacaacagauuccagaucaagggcguggagcugaagagcggcuacaaggacuggauccuguggaucagcuucgccaucagcugcuuccugcugugcguggcccugcugggcuucaucaugugggccugccagaagggcaacaucagaugcaacaucugcaucuga

SEQ ID NO: 173432 - RNA, 1701 nt, Artificial Sequence; identical to SEQ ID NO: 172501
  derived and/or modified CDS sequence (opt4) from hemagglutinin__InfluenzaA__ALE31861

SEQ ID NO: 173433 - RNA, 1701 nt, Artificial Sequence
  derived and/or modified CDS sequence (opt4) from hemagglutinin__InfluenzaA__ALE31862
augaagaugaucaucgcccugagcuacauccugugccugguguucgcccagaagauccccggcaacgacaacagcaccgccacccugugccugggccaccacgccgugcccaacggcaccaucgugaagaccaucaccaacgacagaaucgaggugaccaacgccaccgagcuggugcagaacagcagcaucggcgagaucugcgacagcccccaccagauccuggacggcgagaacugcacccugaucgacgcccugcugggcgacccccagugcgacggcuuccagaacaagaagugggaccuguucguggagagaagcaaggccuacagcaacugcuaccccuacgacgugcccgacuacgccagccugagaagccugguggccagcagcggcacccuggaguucaacaacgagagcuucaacuggaccggcgugacccagaacggcaccagcagcgccugcaucagaaagagcagcagcagcuucuucagcagacugaacuggcugacccaccugaacuacaccuaccccgcccugaacgugaccaugcccaacaacgagcaguucgacaagcuguacaucuggggcgugcaccaccccggcaccgacaaggaccagaucuuccuguacgccagaagcagcggcagaaucaccgugagcaccaagagaagccagcaggccgugauccccaacaucggcagcagacccagaaucagagacauccccagcagaaucagcaucuacuggaccaucgugaagcccggcgacauccugcugaucaacagcaccggcaaccugaucgcccccagaggcuacuucaagaucagaagcggcaagagcagcaucaugagaagcgacgcccccaucggcaagugcaagagcgagugcaucacccccaacggcagcauccccaacgacaagcccuuccagaacgugaacagaaucaccuacggcgccugccccagauacgugaagcacagcacccugaagcuggccaccggcaugagaaacgugcccgagaagcagaccagaggcaucuucggcgccaucgccggcuucaucgagaacggcugggagggcaugguggacggcugguacggcuucagacaccagaacagcgagggcagaggccaggccgccgaccugaagagcacccaggccgccaucgaccagaucaacggcaagcugaacagacugaucggcaagaccaacgagaaguuccaccagaucgagaaggaguucagcgagguggagggcagaauccaggaccuggagaaguacguggaggacaccaagaucgaccuguggagcuacaacgccgaguuccugguggcccuggagaaccagcacaccaucgaccugaccgacagcgagaugaacaagcuguucgagaagaccaagaagcagcugagagagaacgccgaggacaugggcaacggcugcuucaagaucuaccacaagugcgacaacgccugcaucggcagcaucagaaacggcaccuacgaccacaacguguacagagacgaggcccugaacaacagauuccagaucaagggcguggagcugaagagcggcuacaaggacuggauccuguggaucagcuucgccaucagcugcuuccugcugugcguggcccugcugggcuucaucaugugggccugccagaagggcaacaucagaugcaacaucugcaucuga

SEQ ID NO: 173434 - RNA, 1701 nt, Artificial Sequence; identical to SEQ ID NO: 173159
  derived and/or modified CDS sequence (opt4) from hemagglutinin__InfluenzaA__ALE31863

SEQ ID NO: 173435 - RNA, 1701 nt, Artificial Sequence; identical to SEQ ID NO: 173159
  derived and/or modified CDS sequence (opt4) from hemagglutinin__InfluenzaA__ALE31865

SEQ ID NO: 173436 - RNA, 1701 nt, Artificial Sequence; identical to SEQ ID NO: 173159
  derived and/or modified CDS sequence (opt4) from hemagglutinin__InfluenzaA__ALE31866

SEQ ID NO: 173437 - RNA, 1701 nt, Artificial Sequence
  derived and/or modified CDS sequence (opt4) from hemagglutinin__InfluenzaA__ALE31867
augaagaccaucaucgcccugagcuacauccugugccugguguucgcccagaagauccccggcaacgacaacagcaccgccacccugugccugggccaccacgccgugcccaacggcaccaucgugaagaccaucaccaacgacagaaucgaggugaccaacgccaccgagcuggugcagaacagcagcaucggcgagaucugcgacagcccccaccagauccuggacggcgagaacugcacccugaucgacgcccugcugggcgacccccagugcgacggcuuccagaacaagaagugggaccuguucguggagagaagcaaggccuacagcaacugcuaccccuacgacgugcccgacuacgccagccugagaagccugguggccagcagcggcacccuggaguucaacaacgagagcuucaacuggaccggcgugacccagaacggcaccagcagcgccugcaucagaaagagcagcagcagcuucuucagcagacugaacuggcugacccaccugaacuacaccuaccccgcccugaacgugaccaugcccaacaacgagcaguucgacaagcuguacaucuggggcgugcaccaccccggcaccgacaaggaccagaucuuccuguacgccagaagcagcggcagaaucaccgugagcaccaagagaagccagcaggccgugauccccaacaucggcagcagacccagaaucagagacauccccagcagaaucagcaucuacuggaccaucgugaagcccggcgacauccugcugaucaacagcaccggcaaccugaucgcccccagaggcuacuucaagaucagaagcggcaagagcagcaucaugagaagcgacgcccccaucggcaagugcaagagcgagugcaucacccccaacggcagcauccccaacgacaagcccuuccagaacgugaacagaaucaccuacggcgccugccccagauacgugaagcacagcacccugaagcuggccaccggcaugagaaacgugcccgagaagcagaccagaggcaucuucggcgccaucgccggcuucaucgagaacggcugggagggcaugguggacggcugguacggcuucagacaccagaacagcgagggcagaggccaggccgccgaccugaagagcacccaggccgccaucgaccagaucaacggcaagcugaacagacugaucggcaagaccaacgagaaguuccaccagaucgagaaggaguucagcgagguggagggcagaauccaggaccuggagaaguacguggaggacaccaagaucgaccuguggagcuacaacgccgagcugcugguggcccuggagaaccagcacaccaucgaccugaccgacagcgagaugaacaagcuguucgagaagaccaagaagcagcugagagagaacgccgaggacaugggcaacggcugcuucaagaucuaccacaagugcgacaacgccugcaucggcagcaucagaaacggcaccuacgaccacaacguguacagagacgaggcccugaacaacagauuccagaucaagggcguggagcugaagagcggcuacaaggacuggauccuguggaucagcuucgccaucagcugcuuccugcugugcguggcccugcugggcuucaucaugugggccugccagaacggcaacaucagaugcaacaucugcaucuga

SEQ ID NO: 173438 - RNA, 1701 nt, Artificial Sequence; identical to SEQ ID NO: 172501
  derived and/or modified CDS sequence (opt4) from hemagglutinin__InfluenzaA__ALE31868

SEQ ID NO: 173439 - RNA, 1701 nt, Artificial Sequence; identical to SEQ ID NO: 173437
  derived and/or modified CDS sequence (opt4) from hemagglutinin__InfluenzaA__ALE31869

SEQ ID NO: 173440 - RNA, 1701 nt, Artificial Sequence; identical to SEQ ID NO: 173437
  derived and/or modified CDS sequence (opt4) from hemagglutinin__InfluenzaA__ALE31870

SEQ ID NO: 173441 - RNA, 1701 nt, Artificial Sequence
  derived and/or modified CDS sequence (opt4) from hemagglutinin__InfluenzaA__ALE31871
augaagaccaucaucgcccugagcuacauccugugccugguguucgcccagaagauccccggcaacgacaacagcaccgccacccugugccugggccaccacgccgugcccaacggcaccaucgugaagaccaucaccaacgacagaaucgaggugaccaacgccaccgagcuggugcagaacagcagcaucggcgagaucugcaacagcccccaccagauccuggacggcgagaacugcacccugaucgacgcccugcugggcgacccccagugcgacggcuuccagaacaagaagugggaccuguucguggagagaagcaaggccuacagcaacugcuaccccuacgacgugcccgacuacgccagccugagaagccugguggccagcagcggcacccuggaguucaacaacgagagcuucaacuggaccggcgugacccagaacggcaccagcagcgccugcaucagaaagagcagcagcagcuucuucagcagacugaacuggcugacccaccugaacuacaccuaccccgcccugaacgugaccaugcccaacaacgagcaguucgacaagcuguacaucuggggcgugcaccaccccggcaccgacaaggaccagaucuuccuguacgccagaagcagcggcagaaucaccgugagcaccaagagaagccagcaggccgugauccccaacaucggcagcagacccagaaucagagacauccccagcagaaucagcaucuacuggaccaucgugaagcccggcgacauccugcugaucaacagcaccggcaaccugaucgcccccagaggcuacuucaagaucagaagcggcaagagcagcaucaugagaagcgacgcccccaucggcaagugcaagagcgagugcaucacccccaacggcagcauccccaacgacaagcccuuccagaacgugaacagaaucaccuacggcgccugccccagauacgugaagcacagcacccugaagcuggccaccggcaugagaaacgugcccgagaagcagaccagaggcaucuucggcgccaucgccggcuucaucgagaacggcugggagggcaugguggacggcugguacggcuucagacaccagaacagcgagggcagaggccaggccgccgaccugaagagcacccaggccgccaucgaccagaucaacggcaagcugaacagacugaucggcaagaccaacgagaaguuccaccagaucgagaaggaguucagcgagguggagggcagaauccaggaccuggagaaguacguggaggacaccaagaucgaccuguggagcuacaacgccgagcugcugguggcccuggagaaccagcacaccaucgaccugaccgacagcgagaugaacaagcuguucgagaagaccaagaagcagcugagagagaacgccgaggacaugggcaacggcugcuucaagaucuaccacaagugcgacaacgccugcaucggcagcaucagaaacggcaccuacgaccacaacguguacagagacgaggcccugaacaacagauuccagaucaagggcguggagcugaagagcggcuacaaggacuggauccuguggaucagcuucgccaucagcugcuuccugcugugcguggcccugcugggcuucaucaugugggccugccagaagggcaacaucagaugcaacaucugcaucuga

SEQ ID NO: 173442 - RNA, 1701 nt, Artificial Sequence; identical to SEQ ID NO: 172487
  derived and/or modified CDS sequence (opt4) from hemagglutinin__InfluenzaA__ALE31872

SEQ ID NO: 173443 - RNA, 1701 nt, Artificial Sequence; identical to SEQ ID NO: 172501
  derived and/or modified CDS sequence (opt4) from hemagglutinin__InfluenzaA__ALE31873

SEQ ID NO: 173444 - RNA, 1701 nt, Artificial Sequence
  derived and/or modified CDS sequence (opt4) from hemagglutinin__InfluenzaA__ALE31874
augaagaccaucaucgcccugagcuacauccugugccugguguucgcccagaagcugcccggcaacgacaacagcgccgccacccugugccugggccaccacgccgugcccaacggcaccaucgugaagaccaucaccaacgacagaaucgaggugaccaacgccaccgagcuggugcagaacagcagcaucggcgagaucugcgacagcccccaccagauccuggacggcgagaacugcacccugaucgacgcccugcugggcgacccccagugcgacggcuuccagaacaagaagugggaccuguucguggagagaagcaaggcccacagcaacugcuaccccuacgacgugcccgacuacgccagccugagaagccugguggccagcagcggcacccuggaguucaacaacgagagcuucaacugggccggcgugacccagaacggcaccagcagcagcugcaucagaggcagcaacagcagcuucuucagcagacugaacuggcugacccaccugaacagcaaguaccccgcccugaacgugaccaugcccaacaacgagcaguucgacaagcuguacaucuggggcgugcaccaccccggcaccgacaaggaccagaucuuccuguacgcccagagcagcggcagaaucaccgugagcaccaagagaagccagcaggccgugauccccaacaucggcagcagacccagaaucagagacauccccagcagaaucagcaucuacuggaccaucgugaagcccggcgacauccugcugaucaacagcaccggcaaccugaucgcccccagaggcuacuucaagaucagaagcggcaagagcagcaucaugagaagcgacgcccccaucggcaagugcaagagcgagugcaucacccccaacggcagcauccccaacgacaagcccuuccagaacgugaacagaaucaccuacggcgccugccccagauacgugaagcagagcacccugaagcuggccaccggcaugagaaacgugcccgagaagcagaccagaggcaucuucggcgccaucgccggcuucaucgagaacggcugggagggcaugguggacggcugguacggcuucagacaccagaacagcgagggcagaggccaggccgccgaccugaagagcacccaggccgccaucgaccagaucaacggcaagcugaacagacugaucggcaagaccaacgagaaguuccaccagaucgagaaggaguucagcgagguggagggcagaauccaggaccuggagaaguacguggaggacaccaagaucgaccuguggagcuacaacgccgagcugcugguggcccuggagaaccagcacaccaucgaccugaccgacagcgagaugaacaagcuguucgagaagaccaagaagcagcugagagagaacgccgaggacaugggcaacggcugcuucaagaucuaccacaagugcgacaacgccugcaucggcagcaucagaaacggcaccuacgaccacgacguguacagagacgaggcccugaacaacagauuccagaucaagggcguggagcugaagagcggcuacaaggacuggauccuguggaucagcuucgccaucagcugcuuccugcugugcguggcccugcugggcuucaucaugugggccugccagaagggcaacaucagaugcaacaucugcaucuga

SEQ ID NO: 173445 - RNA, 1701 nt, Artificial Sequence; identical to SEQ ID NO: 173444
  derived and/or modified CDS sequence (opt4) from hemagglutinin__InfluenzaA__ALE31875

SEQ ID NO: 173446 - RNA, 1701 nt, Artificial Sequence; identical to SEQ ID NO: 173444
  derived and/or modified CDS sequence (opt4) from hemagglutinin__InfluenzaA__ALE31876

SEQ ID NO: 173447 - RNA, 1701 nt, Artificial Sequence
  derived and/or modified CDS sequence (opt4) from hemagglutinin__InfluenzaA__ALE31877
augaagaccaucaucgcccugagcuacauccugugccugguguucgcccagaagcugcccgagaacgacaacagcaccgccacccugugccugggccaccacgccgugcccaacggcaccaucgugaagaccaucaccagcgacagaaucgaggugaccaacgccaccgagcuggugcagaacagcagcaucggcgagaucugcgacagcccccaccagauccuggacggcaagaacugcacccugaucgacgcccugcugggcgacccccagugcgacggcuuccagaacaagaagugggaccuguucguggagagaagcaaggccuacagcaacugcuaccccuacgacgugcccgacuacgccagccugagaagccugguggccagcagcggcacccuggaguucaacgacgagagcuucaacugggccggcgugacccagaacggcaccagcagcgccugcaucagaggcagcaacagcagcuucuucagcagacugaacuggcugacccacagcaacuucaaguaccccgcccugaacgugaccaugcccaacaacgagcaguucgacaagcuguacaucuggggcgugcaccaccccggcaccgacaaggaccagaucuuccuguacgcccagagcagcggcagaaucaccgugagcaccaagagaagccagcaggccgugauccccaacaucggcagcagacccagaaucagaaacauccccagcagaaucagcaucuacuggaccaucgugaagcccggcgacauccugcugaucaacagcaccggcaaccugaucgcccccagaggcuacuucaagaucagaagcggcaagagcagcaucaugagaagcgacgcccccaucggcaagugcaagagcgagugcaucacccccaacggcagcauccccaacgacaagcccuuccagaacgugaacagaaucaccuacggcgccugccccagauacgugaagcagagcacccugaagcuggccaccggcaugagaaacgugcccgagaagcagaccagaggcaucuucggcgccaucgccggcuucaucgagaacggcugggagggcaugaaggacggcugguacggcuucagacaccagaacagcgagggcagaggccaggccgccgaccugaagagcacccaggccgccaucgaccagaucaacggcaagcugaacagacugaucggcaagaccaacgagaaguuccaccagaucgagaaggaguucagcgagguggagggcagaauccaggaccuggagaaguacguggaggacaccaagaucgaccuguggagcuacaacgccgagcugcugguggcccuggagaaccagcacaccaucgaccugaccgacagcgagaucaacaagcuguucgagaagaccaagaagcagcugagagagaacgccgaggacaugggcaacggcugcuucaagaucuaccacaagugcgacaacgccugcaucggcagcaucagaaacggcaccuacgaccacgacguguacagagacgaggcccugaacaacagauuccagaucaagggcguggagcugaagagcggcuacaaggacuggauccuguggaucagcuucgccaucagcugcuuccugcugugcguggcccugcugggcuucaucaugugggccugccagaagggcaacaucagaugcaacaucugcaucuga

SEQ ID NO: 173448 - RNA, 1701 nt, Artificial Sequence; identical to SEQ ID NO: 172501
  derived and/or modified CDS sequence (opt4) from hemagglutinin__InfluenzaA__ALE31878

SEQ ID NO: 173449 - RNA, 1701 nt, Artificial Sequence; identical to SEQ ID NO: 172501
  derived and/or modified CDS sequence (opt4) from hemagglutinin__InfluenzaA__ALE31879

SEQ ID NO: 173450 - RNA, 1701 nt, Artificial Sequence; identical to SEQ ID NO: 172501
  derived and/or modified CDS sequence (opt4) from hemagglutinin__InfluenzaA__ALE31880

SEQ ID NO: 173451 - RNA, 1701 nt, Artificial Sequence
  derived and/or modified CDS sequence (opt4) from hemagglutinin__InfluenzaA__ALE31881
augaagaccaucaucgcccugagccacauccugugccugguguucgcccagaagauccccggcaacgacaacagcaccgccacccugugccugggccaccacgccgugcccaacggcaccaucgugaagaccaucaccaacgacagaaucgaggugaccaacgccaccgagcuggugcagaacagcagcaucggcgagaucugcgacagcccccaccagauccuggacggcgagaacugcacccugaucgacgcccugcugggcgacccccagugcgacggcuuccagaacaagaagugggaccuguucguggagagaagcaaggccuacagcaacugcuaccccuacgacgugcccgacuacgccagccugagaagccugguggccagcagcggcacccuggaguucaacaacgagagcuucaacuggaccggcgugacccagaacggcaccagcagcgccugcaucagaagaagcagcagcagcuucuucagcagacugaacuggcugacccaccugaacuacaccuaccccgcccugaacgugaccaugcccaacaacgagcaguucgacaagcuguacaucuggggcgugcaccaccccggcaccgacaaggaccagaucuuccuguacgcccagagcagcggcagaaucaccgugagcaccaagagaagccagcaggccgugauccccaacaucggcagcagacccagaaucagagacauccccagcagaaucagcaucuacuggaccaucgugaagcccggcgacauccugcugaucaacagcaccggcaaccugguggcccccagaggcuacuucaagaucagaagcggcaagagcagcaucaugagaagcgacgcccccaucggcaagugcaagagcgagugcaucacccccaacggcagcauccccaacgacaagcccuuccagaacgugaacagaaucaccuacggcgccugccccagauacgugaagcacagcacccugaagcuggccaccggcaugagaaacgugcccgagaagcagaccagaggcaucuucggcgccaucgccggcuucaucgagaacggcugggagggcaugguggacggcugguacggcuucagacaccagaacagcgagggcagaggccaggccgccgaccugaagagcacccaggccgccaucgaccagaucaacggcaagcugaacagacugaucggcaagaccaacgagaaguuccaccagaucgagaaggaguucagcgagguggagggcagaauccaggaccuggagaaguacguggaggacaccaagaucgaccuguggagcuacaacgccgagcugcugguggcccuggagaaccagcacaccaucgaccugaccgacagcgagaugaacaagcuguucgagaagaccaagaagcagcugagagagaacgccgaggacaugggcaacggcugcuucaagaucuaccacaagugcgacaacgccugcaucggcagcaucagaaacggcaccuacgaccacaacguguacagagacgaggcccugaacaacagauuccagaucaagggcaucgagcugaagagcggcuacaaggacuggauccuguggaucagcuucgccaucagcugcuuccugcugugcguggcccugcugggcuucaucaugugggccugccagaagggcaacaucagaugcaacaucugcaucuga

SEQ ID NO: 173452 - RNA, 1701 nt, Artificial Sequence; identical to SEQ ID NO: 172501
  derived and/or modified CDS sequence (opt4) from hemagglutinin__InfluenzaA__ALE31882

SEQ ID NO: 173453 - RNA, 1701 nt, Artificial Sequence; identical to SEQ ID NO: 172501
  derived and/or modified CDS sequence (opt4) from hemagglutinin__InfluenzaA__ALE31888

SEQ ID NO: 173454 - RNA, 1701 nt, Artificial Sequence; identical to SEQ ID NO: 172501
  derived and/or modified CDS sequence (opt4) from hemagglutinin__InfluenzaA__ALE31889

SEQ ID NO: 173455 - RNA, 1701 nt, Artificial Sequence; identical to SEQ ID NO: 173159
  derived and/or modified CDS sequence (opt4) from hemagglutinin__InfluenzaA__ALE31890

SEQ ID NO: 173456 - RNA, 1701 nt, Artificial Sequence; identical to SEQ ID NO: 173159
  derived and/or modified CDS sequence (opt4) from hemagglutinin__InfluenzaA__ALE31891

SEQ ID NO: 173457 - RNA, 1701 nt, Artificial Sequence; identical to SEQ ID NO: 172501
  derived and/or modified CDS sequence (opt4) from hemagglutinin__InfluenzaA__ALE31892

SEQ ID NO: 173458 - RNA, 1701 nt, Artificial Sequence; identical to SEQ ID NO: 172501
  derived and/or modified CDS sequence (opt4) from hemagglutinin__InfluenzaA__ALE31893

SEQ ID NO: 173459 - RNA, 1701 nt, Artificial Sequence; identical to SEQ ID NO: 173107
  derived and/or modified CDS sequence (opt4) from hemagglutinin__InfluenzaA__ALE31894

SEQ ID NO: 173460 - RNA, 1701 nt, Artificial Sequence; identical to SEQ ID NO: 172487
  derived and/or modified CDS sequence (opt4) from hemagglutinin__InfluenzaA__ALE31895

SEQ ID NO: 173461 - RNA, 1701 nt, Artificial Sequence; identical to SEQ ID NO: 172501
  derived and/or modified CDS sequence (opt4) from hemagglutinin__InfluenzaA__ALE31896

SEQ ID NO: 173462 - RNA, 1701 nt, Artificial Sequence; identical to SEQ ID NO: 172501
  derived and/or modified CDS sequence (opt4) from hemagglutinin__InfluenzaA__ALE31897

SEQ ID NO: 173463 - RNA, 1701 nt, Artificial Sequence; identical to SEQ ID NO: 172501
  derived and/or modified CDS sequence (opt4) from hemagglutinin__InfluenzaA__ALE31898

SEQ ID NO: 173464 - RNA, 1701 nt, Artificial Sequence
  derived and/or modified CDS sequence (opt4) from hemagglutinin__InfluenzaA__ALE31899
augaagaccaucaucgcccugagcuacauccugugccugguguucgcccagaagauccccggcaacgacaacagcaccgccacccugugccugggccaccacgccgugcccaacggcaccaucgugaagaccaucaccaacgacagaaucgaggugaccaacgccaccgagcuggugcagaacagcagcaucggcgagaucugcgacagcccccaccagauccuggacggcgagaacugcacccugaucgacgcccugcugggcgacccccagugcgacggcuuccagaacaagaagugggaccuguucguggagagaagcaaggccuacagcaacugcuaccccuacgacgugcccgacuacgccagccugagaagccugguggccagcagcggcacccuggaguucaacaacgagagcuucaacuggaccggcgugacccagaacggcaccagcagcgccugcaucagaaagagcagcagcagcuucuucagcagacugaacuggcugacccaccugaacuacaccuaccccgcccugaacgugaccaugcccaacaacgagcaguucgacaagcuguacaucuggggcgugcaccaccccggcaccgacaaggaccagaucuuccuguacgccagaagcagcggcagaaucaccgugagcaccaagagaagccagcaggccgugauccccaacaucggcagcagacccagaaucagagacauccccagcagaaucagcaucuacuggaccaucgugaagcccggcgacauccugcugaucaacagcaccggcaaccugaucgcccccagaggcuacuucaagaucagaagcggcaagagcagcaugaugagaagcgacgcccccaucggcaagugcaagagcgagugcaucacccccaacggcagcauccccaacgacaagcccuuccagaacgugaacagaaucaccuacggcgccugccccagauacgugaagcacagcacccugaagcuggccaccggcaugagaaacgugcccgagaagcagaccagaggcaucuucggcgccaucgccggcuucaucgagaacggcugggagggcaugguggacggcugguacggcuucagacaccagaacagcgagggcagaggccaggccgccgaccugaagagcacccaggccgccaucgaccagaucaacggcaagcugaacagacugaucggcaagaccaacgagaaguuccaccagaucgagaaggaguucagcgagguggagggcagaauccaggaccuggagaaguacguggaggacaccaagaucgaccuguggagcuacaacgccgagcugcugguggcccuggagaaccagcacaccaucgaccugaccgacagcgagaugaacaagcuguucgagaagaccaagaagcagcugagagagaacgccgaggacaugggcaacggcugcuucaagaucuaccacaagugcgacaacgccugcaucggcagcaucagaaacggcaccuacgaccacaacguguacagagacgaggcccugaacaacagauuccagaucaagggcguggagcugaagagcggcuacaaggacuggauccuguggaucagcuucgccaucagcugcuuccugcugugcguggcccugcugggcuucaucaugugggccugccagaagggcaacaucagaugcaacaucugcaucuga

SEQ ID NO: 173465 - RNA, 1701 nt, Artificial Sequence; identical to SEQ ID NO: 173107
  derived and/or modified CDS sequence (opt4) from hemagglutinin__InfluenzaA__ALE31901

SEQ ID NO: 173466 - RNA, 1701 nt, Artificial Sequence
  derived and/or modified CDS sequence (opt4) from hemagglutinin__InfluenzaA__ALE31902
augaagaccaucaucgcccugagcuacauccugugccugguguucgcccagaagauccccggcaacgacaacagcaccgccacccugugccugggccaccacgccgugcccaacggcaccaucgugaagaccaucaccaacgacagaaucgaggugaccaacgccaccgagcuggugcagaacagcagcaucggcgagaucugcgacagcccccaccagauccuggacggcgagaacugcacccugaucgacgcccugcugggcgacccccagugcgacggcuuccagaacaagaagugggaccuguucguggagagaagcaaggccuacagcaacugcuaccccuacgacgugcccgacuacgccagccugagaagccugguggccagcagcggcacccuggaguucaacaacgagagcuucaacuggaccggcgugacccagaacggcaccagcagcgccugcaucagaagaagcagcagcagcuucuucagcagacugaacuggcugacccaccugaacuacaccuaccccgcccugaacgugaccaugcccaacaacgagcaguucgacaagcuguacaucuggggcgugcaccaccccggcaccgacaaggaccagaucuuccuguacgcccagagcagcggcagaaucaccgugagcaccaagagaagccagcaggccgugauccccaacaucggcagcagacccagaaucagagacauccccagcagaaucagcaucuacuggaccaucgugaagcccggcgacauccugcugaucaacagcaccggcaaccugaucgcccccagaggcuacuucaagaucagaagcggcaagagcagcaucaugagaagcgacgcccccaucggcaagugcaagagcgagugcaucacccccaacggcagcauccccaacgacaagcccuuccagaacgugaacagaaucaccuacggcgccugccccagauacgugaagcacagcacccugaagcuggccaccggcaugagaaacgugcccgagaagcagaccagaggcaucuucggcgccaucgccggcuucaucgagaacggcugggagggcaugguggacggcugguacggcuucagacaccagaacagcgagggcagaggccaggccgccgaccugaagagcacccaggccgccaucgaccagaucaacggcaagcugaacagacugaucggcaagaccaacgagaaguuccaccagaucgagaaggaguucagcgagguggagggcagaauccaggaccuggagaaguacguggaggacaccaagaucgaccuguggagcuacaacgccgagcugcugguggcccuggagaaccagcacaccaucgaccugaccgacagcgagaugaacaagcuguucgagagaaccaagaagcagcugagagagaacgccgaggacaugggcaacggcugcuucaagaucuaccacaagugcgacaacgccugcaucggcagcaucagaaacggcaccuacgaccacaacguguacagagacgaggcccugaacaacagauuccagaucaagggcguggagcugaagagcggcuacaaggacuggauccuguggaucagcuucgccaucagcugcuuccugcugugcguggcccugcugggcuucaucaugugggccugccagaagggcaacaucagaugcaacaucugcaucuga

SEQ ID NO: 173467 - RNA, 1701 nt, Artificial Sequence; identical to SEQ ID NO: 172501
  derived and/or modified CDS sequence (opt4) from hemagglutinin__InfluenzaA__ALE31903

SEQ ID NO: 173468 - RNA, 1701 nt, Artificial Sequence; identical to SEQ ID NO: 172501
  derived and/or modified CDS sequence (opt4) from hemagglutinin__InfluenzaA__ALE31904

SEQ ID NO: 173469 - RNA, 1701 nt, Artificial Sequence
  derived and/or modified CDS sequence (opt4) from hemagglutinin__InfluenzaA__ALE31905
augaagaccaucaucgcccugggcuacauccugugccugggcuucgcccagaagauccccggcaacgacaacagcaccgccacccugugccugggccaccacgccgugcccaacggcaccaucgugaagaccaucaccaacgacagaaucgaggugaccaacgccaccgagcuggugcagaacagcagcaucggcgagaucugcgacagcccccacaagauccuggacggcgagaacugcacccugaucgacgcccugcugggcgacccccagugcgacggcuuccagaacaagaagugggaccuguucguggagagaagcaaggccuacagcaacugcuaccccuacgacgugcccgacuacgccagccugagaagccugguggccagcagcggcacccuggaguucaacaacgagagcuucaacuggaccggcgugacccagaacggcaccagcagcgccugcaucagaagaagcagcagcagcuucuucagcagacugaacuggcugacccaccugaacuacaccuaccccgcccugaacgugaccaugcccaacaacgagcaguucgacaagcuguacaucuggggcgugcaccaccccggcaccgacaaggaccagaucuuccuguacgcccagagcagcggcagaaucaccgugagcaccaagagaagccagcaggccgugauccccaacaucggcagcagacccagaaucagagacauccccagcagaaucagcaucuacuggaccaucgugaagcccggcgacauccugcugaucaacagcaccggcaaccugaucgcccccagaggcuacuucaagaucagaagcggcaagagcagcaucaugagaagcgacgcccccaucggcaagugcaagagcgagugcaucacccccaacggcagcauccccaacgacaagcccuuccagaacgugaacagaaucaccuacggcgccugccccagauacgugaagcacagcacccugaagcuggccaccggcaugagaaacgugcccgagaagcagaccagaggcaucuucggcgccaucgccggcuucaucgagaacggcugggagggcaugguggacggcugguacggcuucagacaccagaacagcgagggcagaggccaggccgccgaccugaagagcacccaggccgccaucgaccagaucaacggcaagcugaacagacugaucggcaagaccaacgagaaguuccaccagaucgagaaggaguucagcgagguggagggcagaauccaggaccuggagaaguacguggaggacaccaagaucgaccuguggagcuacaacgccgagcugcugguggcccuggagaaccagcacaccaucgaccugaccgacagcgagaugaacaagcuguucgagaagaccaagaagcagcugagagagaacgccgaggacaugggcaacggcugcuucaagaucuaccacaagugcgacaacgccugcaucggcagcaucagaaacggcaccuacgaccacaacguguacagagacgaggcccugaacaacagauuccagaucaagggcguggagcugaagagcggcuacaaggacuggauccuguggaucagcuucgccaucagcugcuuccugcugugcguggcccugcugggcuucaucaugugggccugccagaagggcaacaucagaugcaacaucugcaucuga

SEQ ID NO: 173470 - RNA, 1701 nt, Artificial Sequence; identical to SEQ ID NO: 172501
  derived and/or modified CDS sequence (opt4) from hemagglutinin__InfluenzaA__ALE31906

SEQ ID NO: 173471 - RNA, 1701 nt, Artificial Sequence
  derived and/or modified CDS sequence (opt4) from hemagglutinin__InfluenzaA__ALE31907
augaagaccaucaucgcccugagcuacauccugugccugguguucgcccagaagauccccggcaacgacaacagcaccgccacccugugccugggccaccacgccgugcccaacggcaccaucgugaagaccaucaccaacgacagaaucgaggugaccaacgccaccgagcuggugcagaacagcagcaucggcgagaucugcgacagcccccaccagauccuggacggcgagaacugcacccugaucgacgcccugcugggcgacccccagugcgacggcuuccagaacaagaagugggaccuguucguggagagaagcaaggccuacagcaacugcuaccccuacgacgugcccgacuacgccagccugagaagccugguggccagcagcggcacccuggaguucaacaacgagagcuucaacuggaccggcgugacccagaacggcaccagcagcgccugcaucagaagaagcagcagcagcuucuucagcagacugaacuggcugacccaccugaacuacaaguaccccgcccugaacgugaccaugcccaacaacgagcaguucgacaagcuguacaucuggggcgugcaccaccccggcaccgacaaggaccagaucuuccuguacgcccagagcagcggcagaaucaccgugagcaccaagagaagccagcaggccgugauccccaacaucggcagcagacccagaaucagagacauccccagcagaaucagcaucuacuggaccaucgugaagagcggcgacauccugcugaucaacagcaccggcaaccugaucgcccccagaggcuacuucaagaucagaagcggcaagagcagcaucaugagaagcgacgcccccaucggcaagugcaagagcgagugcaucacccccaacggcagcauccccaacgacaagcccuuccagaacgugaacagaaucaccuacggcgccugccccagauacgugaagcacagcacccugaagcuggccaccggcaugagaaacgugcccgagaagcagaccagaggcaucuucggcgccaucgccggcuucaucgagaacggcugggagggcaugguggacggcugguacggcuucagacaccagaacagcgagggcagaggccaggccgccgaccugaagagcacccaggccgccaucgaccagaucaacggcaagcugaacagacugaucggcaagaccaacgagaaguuccaccagaucgagaaggaguucagcgagguggagggcagaauccaggaccuggagaaguacguggaggacaccaagaucgaccuguggagcuacaacgccgagcugcugguggcccuggagaaccagcacaccaucgaccugaccgacagcgagaugaacaagcuguucgagaagaccaagaagcagcugagagagaacgccgaggacaugggcaacggcugcuucaagaucuaccacaagugcgacaacgccugcaucggcagcaucagaaacggcaccuacgaccacaacguguacagagacgaggcccugaacaacagauuccagaucaagggcguggagcugaagagcggcuacaaggacuggauccuguggaucagcuucgccaucagcugcuuccugcugugcguggcccugcugggcuucaucaugugggccugccagaagggcaacaucagaugcaacaucugcaucuga

SEQ ID NO: 173472 - RNA, 1701 nt, Artificial Sequence; identical to SEQ ID NO: 172501
  derived and/or modified CDS sequence (opt4) from hemagglutinin__InfluenzaA__ALE31908

SEQ ID NO: 173473 - RNA, 1701 nt, Artificial Sequence
  derived and/or modified CDS sequence (opt4) from hemagglutinin__InfluenzaA__ALE31909
augaagaccaucaucgcccugagcuacauccugugccugguguucgcccagaagauccccggcaacgacaacagcaccgccacccugugccugggccaccacgccgugcccaacggcaccaucgugaagaccaucaccaacgacagaaucgaggugaccaacgccaccgagcuggugcagaacagcagcaucggcgagaucugcgacagcccccaccagauccuggacggcgagaacugcacccugaucgacgcccugcugggcgacccccagugcgacggcuuccagaacaagaagugggaccuguucguggagagaagcaaggccuacagcaacugcuaccccuacgacgugcccgacuacgccagccugagaagccugguggccagcagcggcacccuggaguucaacaacgagagcuucaacuggaccggcgugacccagaacggcaccagcagcgccugcaucagaagaagcagcagcagcuucuucagcagacugaacuggcugacccaccugaacuacaccuaccccgcccugaacgugaccaugcccaacaacgagcaguucgacaagcuguacaucuggggcgugcaccaccccggcaccgacaaggaccagaucuuccuguacgcccagagcagcggcagaaucaccgugagcaccaagagaagccagcaggccgugauccccaacaucggcagcagacccagaaucagagacauccccagcagaaucagcaucuacuggaccaucgugaagagcggcgacauccugcugaucaacagcaccggcaaccugaucgcccccagaggcuacuucaagaucagaagcggcaagagcagcaucaugagaagcgacgcccccaucggcaagugcaagagcgagugcaucacccccaacggcagcauccccaacgacaagcccuuccagaacgugaacagaaucaccuacggcgccugccccagauacgugaagcacagcacccugaagcuggccaccggcaugagaaacgugcccgagaagcagaccagaggcaucuucggcgccaucgccggcuucaucgagaacggcugggagggcaugguggacggcugguacggcuucagacaccagaacagcgagggcagaggccaggccgccgaccugaagagcacccaggccgccaucgaccagaucaacggcaagcugaacagacugaucggcaagaccaacgagaaguuccaccagaucgagaaggaguucagcgagguggagggcagaauccaggaccuggagaaguacguggaggacaccaagaucgaccuguggagcuacaacgccgagcugcugguggcccuggagaaccagcacaccaucgaccugaccgacagcgagaugaacaagcuguucgagaagaccaagaagcagcugagagagaacgccgaggacaugggcaacggcugcuucaagaucuaccacaagugcgacaacgccugcaucggcagcaucagaaacggcaccuacgaccacaacguguacagagacgaggcccugaacaacagauuccagaucaagggcguggagcugaagagcggcuacaaggacuggauccuguggaucagcuucgccaucagcugcuuccugcugugcguggcccugcugggcuucaucaugugggccugccagaagggcaacaucagaugcaacaucugcaucuga

SEQ ID NO: 173474 - RNA, 1701 nt, Artificial Sequence; identical to SEQ ID NO: 172501
  derived and/or modified CDS sequence (opt4) from hemagglutinin__InfluenzaA__ALE31910

SEQ ID NO: 173475 - RNA, 1701 nt, Artificial Sequence; identical to SEQ ID NO: 173424
  derived and/or modified CDS sequence (opt4) from hemagglutinin__InfluenzaA__ALE31912

SEQ ID NO: 173476 - RNA, 1701 nt, Artificial Sequence
  derived and/or modified CDS sequence (opt4) from hemagglutinin__InfluenzaA__ALE31913
augaagaccaucaucgcccugggcuacauccugugccugguguucgcccagaagauccccggcaacgacaacagcaccgccacccugugccugggccaccacgccgugcccaacggcaccaucgugaagaccaucaccaacgacagaaucgaggugaccaacgccaccgagcuggugcagaacagcagcaucggcgagaucugcgacagcccccacaagauccuggacggcgagaacugcacccugaucgacgcccugcugggcgacccccagugcgacggcuuccagaacaagaagugggaccuguucguggagagaagcaaggccuacagcaacugcuaccccuacgacgugcccgacuacgccagccugagaagccugguggccagcagcggcacccuggaguucaacaacgagagcuucaacuggaccggcgugacccagaacggcaccagcagcgccugcaucagaagaagcagcagcagcuucuucagcagacugaacuggcugacccaccugaacuacaccuaccccgcccugaacgugaccaugcccaacaacgagcaguucgacaagcuguacaucuggggcgugcaccaccccggcaccgacaaggaccagaucuuccuguacgcccagagcagcggcagaaucaccgugagcaccaagagaagccagcaggccgugauccccaacaucggcagcagacccagaaucagagacauccccagcagaaucagcaucuacuggaccaucgugaagcccggcgacauccugcugaucaacagcaccggcaaccugaucgcccccagaggcuacuucaagaucagaagcggcaagagcagcaucaugagaagcgacgcccccaucggcaagugcaagagcgagugcaucacccccaacggcagcauccccaacgacaagcccuuccagaacgugaacagaaucaccuacggcgccugccccagauacgugaagcacagcacccugaagcuggccaccggcaugagaaacgugcccgagaagcagaccagaggcaucuucggcgccaucgccggcuucaucgagaacggcugggagggcaugguggacggcugguacggcuucagacaccagaacagcgagggcagaggccaggccgccgaccugaagagcacccaggccgccaucgaccagaucaacggcaagcugaacagacugaucggcaagaccaacgagaaguuccaccagaucgagaaggaguucagcgagguggagggcagaauccaggaccuggagaaguacguggaggacaccaagaucgaccuguggagcuacaacgccgagcugcugguggcccuggagaaccagcacaccaucgaccugaccgacagcgagaugaacaagcuguucgagaagaccaagaagcagcugagagagaacgccgaggacaugggcaacggcugcuucaagaucuaccacaagugcgacaacgccugcaucgagagcaucagaaacggcaccuacgaccacaacguguacagagacgaggcccugaacaacagauuccagaucaagggcguggagcugaagagcggcuacaaggacuggauccuguggaucagcuucgccaucagcugcuuccugcugugcguggcccugcugggcuucaucaugugggccugccagaagggcaacaucagaugcaacaucugcaucuga

SEQ ID NO: 173477 - RNA, 1701 nt, Artificial Sequence; identical to SEQ ID NO: 172501
  derived and/or modified CDS sequence (opt4) from hemagglutinin__InfluenzaA__ALE31914

SEQ ID NO: 173478 - RNA, 1701 nt, Artificial Sequence
  derived and/or modified CDS sequence (opt4) from hemagglutinin__InfluenzaA__ALE31915
augaagaccaucaucgcccugagcuacauccugugccugguguucgcccagaagauccccggcaacgacaacagcaccgccacccugugccugggccaccacgccgugcccaacggcaccaucgugaagaccaucaccaacgacagaaucgaggugaccaacgccaccgagcuggugcagaacagcagcaucggcgagaucugcgacagcccccaccagauccuggacggcgagaacugcacccugaucgacgcccugcugggcgacccccagugcgacggcuuccagaacaagaagugggaccuguucguggagagaagcaaggccuacagcaacugcuaccccuacgacgugcccgaguacgccagccugagaagccugguggccagcagcggcacccuggaguucaacaacgagagcuucaacuggaccggcgugacccagaacggcaccagcagcgccugcaucagaagaagcagcagcagcuucuucagcagacugaacuggcugacccaccugaacuacaccuaccccgcccugaacgugaccaugcccaacaacgagcaguucgacaagcuguacaucuggggcgugcaccaccccggcaccgacaaggaccagaucuuccuguacgcccagagcagcggcagaaucaccgugagcaccaagagaagccagcaggccgugauccccaacaucggcagcagacccagaaucagagacauccccagcagaaucagcaucuacuggaccaucgugaagcccggcgacauccugcugaucaacagcaccggcaaccugaucgcccccagaggcuacuucaagaucagaagcggcaagagcagcaucaugagaagcgacgcccccaucggcaagugcaagagcgagugcaucacccccaacggcagcauccccaacgacaagcccuuccagaacgugaacagaaucaccuacggcgccugccccagauacgugaagcacagcacccugaagcuggccaccggcaugagaaacgugcccgagaagcagaccagaggcaucuucggcgccaucgccggcuucaucgagaacggcugggagggcaugguggacggcugguacggcuucagacaccagaacagcgagggcagaggccaggccgccgaccugaagagcacccaggccgccaucgaccagaucaacggcaagcugaacagacugaucggcaagaccaacgagaaguuccaccagaucgagaaggaguucagcgagguggagggcagaauccaggaccuggagaaguacguggaggacaccaagaucgaccuguggagcuacaacgccgagcugcugguggcccuggagaaccagcacaccaucgaccugaccgacagcgagaugaacaagcuguucgagaagaccaagaagcagcugagagagaacgccgaggacaugggcaacggcugcuucaagaucuaccacaagugcgacaacgccugcaucggcagcaucagaaacggcaccuacgaccacaacguguacagagacgaggcccugaacaacagauuccagaucaagggcguggagcugaagagcggcuacaaggacuggauccuguggaucagcuucgccaucagcugcuuccugcugugcguggcccugcugggcuucaucaugugggccugccagaagggcaacaucagaugcaacaucugcaucuga

SEQ ID NO: 173479 - RNA, 1701 nt, Artificial Sequence; identical to SEQ ID NO: 172501
  derived and/or modified CDS sequence (opt4) from hemagglutinin__InfluenzaA__ALE31916

SEQ ID NO: 173480 - RNA, 1701 nt, Artificial Sequence; identical to SEQ ID NO: 172501
  derived and/or modified CDS sequence (opt4) from hemagglutinin__InfluenzaA__ALE31917

SEQ ID NO: 173481 - RNA, 1701 nt, Artificial Sequence; identical to SEQ ID NO: 173034
  derived and/or modified CDS sequence (opt4) from hemagglutinin__InfluenzaA__ALE31918

SEQ ID NO: 173482 - RNA, 1701 nt, Artificial Sequence; identical to SEQ ID NO: 173159
  derived and/or modified CDS sequence (opt4) from hemagglutinin__InfluenzaA__ALE31920

SEQ ID NO: 173483 - RNA, 1701 nt, Artificial Sequence; identical to SEQ ID NO: 172501
  derived and/or modified CDS sequence (opt4) from hemagglutinin__InfluenzaA__ALE31921

SEQ ID NO: 173484 - RNA, 1701 nt, Artificial Sequence; identical to SEQ ID NO: 172501
  derived and/or modified CDS sequence (opt4) from hemagglutinin__InfluenzaA__ALE31922

SEQ ID NO: 173485 - RNA, 1701 nt, Artificial Sequence; identical to SEQ ID NO: 173045
  derived and/or modified CDS sequence (opt4) from hemagglutinin__InfluenzaA__ALE31923

SEQ ID NO: 173486 - RNA, 1701 nt, Artificial Sequence; identical to SEQ ID NO: 172501
  derived and/or modified CDS sequence (opt4) from hemagglutinin__InfluenzaA__ALE31924

SEQ ID NO: 173487 - RNA, 1701 nt, Artificial Sequence; identical to SEQ ID NO: 172501
  derived and/or modified CDS sequence (opt4) from hemagglutinin__InfluenzaA__ALE31925

SEQ ID NO: 173488 - RNA, 1701 nt, Artificial Sequence
  derived and/or modified CDS sequence (opt4) from hemagglutinin__InfluenzaA__ALE31926
augaagaccaucaucgcccugagcuacauccugugccugguguucgcccagaagauccccggcaacgacaacagcaccgccacccugugccugggccaccacgccgugcccaacggcaccaucgugaagaccaucaccaacgacagaaucgaggugaccaacgccaccgagcuggugcagaacagcagcaucggcgagaucugcgacagcccccaccagauccuggacggcgagaacugcacccugaucgacgcccugcugggcgacccccagugcgacggcuuccagaacaagaagugggaccuguucguggagagaagcaaggccuacagcaacugcuaccccuacgacgugcccgacuacgccagccugagaagccugguggccagcagcggcacccuggaguucaacaacgagggcuucaacuggaccggcgugacccagaacggcaccagcagcgccugcaucagaagaagcagcagcagcuucuucagcagacugaacuggcugacccaccugaacuacaaguaccccgcccugaacgugaccaugcccaacaacgagcaguucgacaagcuguacaucuggggcgugcaccaccccggcaccgacaaggaccagaucuuccuguacgcccagagcagcggcagaaucaccgugagcaccaagagaagccagcaggccgugauccccaacaucggcagcagacccagaaucagagacauccccagcagaaucagcaucuacuggaccaucgugaagcccggcgacauccugcugaucaacagcaccggcaaccugaucgcccccagaggcuacuucaagaucagaagcggcaagagcagcaucaugagaagcgacgcccccaucggcaagugcaagagcgagugcaucacccccaacggcagcauccccaacgacaagcccuuccagaacgugaacagaaucaccuacggcgccugccccagauacgugaagcacagcacccugaagcuggccaccggcaugagaaacgugcccgagaagcagaccagaggcaucuucggcgccaucgccggcuucaucgagaacggcugggagggcaugguggacggcugguacggcuucagacaccagaacagcgagggcagaggccaggccgccgaccugaagagcacccaggccgccaucgaccagaucaacggcaagcugaacagacugaucggcaagaccaacgagaaguuccaccagaucgagaaggaguucagcgagguggagggcagaauccaggaccuggagaaguacguggaggacaccaagaucgaccuguggagcuacaacgccgagcugcugguggcccuggagaaccagcacaccaucgaccugaccgacagcgagaugaacaagcuguucgagaagaccaagaagcagcugagagagaacgccgaggacaugggcaacggcugcuucaagaucuaccacaagugcgacaacgccugcaucggcagcaucagaaacggcaccuacgaccacaacguguacagagacgaggcccugaacaacagauuccagaucaagggcguggagcugaagagcggcuacaaggacuggauccuguggaucagcuucgccaucagcugcuuccugcugugcguggcccugcugggcuucaucaugugggccugccagaagggcaacaucagaugcaacaucugcaucuga

SEQ ID NO: 173489 - RNA, 1701 nt, Artificial Sequence; identical to SEQ ID NO: 172501
  derived and/or modified CDS sequence (opt4) from hemagglutinin__InfluenzaA__ALE31927

SEQ ID NO: 173490 - RNA, 1701 nt, Artificial Sequence
  derived and/or modified CDS sequence (opt4) from hemagglutinin__InfluenzaA__ALE31928
augaagaccaucaucgcccugagcuacauccugugccugguguucgcccagaagcugcccggcaacgacaacagcaccgccacccugugccugggccaccacgccgugcccaacggcaccaucgugaagaccaucaccaacgacagaaucgaggugaccaacgccaccgagcuggugcagaacagcagcaucggcgagaucugcgacagcccccaccagauccuggacggcgagaacugcacccugaucgacgcccugcugggcgacccccagugcgacggcuuccagaacaagaagugggaccuguucguggagagaagcaaggccuacagcaacugcuaccccuacgacgugcccgacuacgccagccugagaagccugguggccagcagcggcacccuggaguucaacaacgagagcuucaacugggccggcgugacccagaacggcaccagcagcgccugcaucagaggcagcaacagcagcuucuucagcagacugaacuggcugacccacagcaacuucaaguaccccgcccugaacgugaccaugcccaacaacgagcaguucgacaagcuguacaucuggggcgugcaccaccccggcaccgacaaggaccagaucuuccuguacgcccagagcagcggcagaaucaccgugagcaccaagagaagccagcaggccgugauccccaacaucggcagcagacccagaaucagagacauccccagcagaaucagcaucuacuggaccaucgugaagcccggcgacauccugcugaucaacagcaccggcaaccugaucgcccccagaggcuacuucaagaucagaagcggcaagagcagcaucaugagaagcgacgcccccaucggcaagugcaagagcgagugcaucacccccaacggcagcauccccaacgacaagcccuuccagaacgugaacagaaucaccuacggcgccugccccagauacgugaagcagagcacccugaagcuggccaccggcaugagaaacgugcccgagaagcagaccagaggcaucuucggcgccaucgccggcuucaucgagaacggcugggagggcaugguggacggcugguacggcuucagacaccagaacagcgagggcagaggccaggccgccgaccugaagagcacccaggccgccaucgaccagaucaacggcaagcugaacagacugaucggcaagaccaacgagaaguuccaccagaucgagaaggaguucagcgagguggagggcagaauccaggaccuggagaaguacguggaggacaccaagaucgaccuguggagcuacaacgccgagcugcugguggcccuggagaaccagcacaccaucgaccugaccgacagcgagaugaacaagcuguucgagaagaccaagaagcagcugagagagaacgccgaggacaugggcaacggcugcuucaagaucuaccacaagugcgacaacgccugcaucggcagcaucagaaacggcaccuacgaccacgacguguacagagacgaggcccugaacaacagauuccagaucaagggcguggagcugaagagcggcuacaaggacuggauccuguggaucagcuucgccaucagcugcuuccugcugugcguggcccugcugggcuucaucaugugggccugccagaagggcaacaucagaugcaacaucugcaucuga

SEQ ID NO: 173491 - RNA, 1701 nt, Artificial Sequence; identical to SEQ ID NO: 173137
  derived and/or modified CDS sequence (opt4) from hemagglutinin__InfluenzaA__ALE31930

SEQ ID NO: 173492 - RNA, 1701 nt, Artificial Sequence; identical to SEQ ID NO: 172501
  derived and/or modified CDS sequence (opt4) from hemagglutinin__InfluenzaA__ALE31931

SEQ ID NO: 173493 - RNA, 1701 nt, Artificial Sequence; identical to SEQ ID NO: 172501
  derived and/or modified CDS sequence (opt4) from hemagglutinin__InfluenzaA__ALE31932

SEQ ID NO: 173494 - RNA, 1701 nt, Artificial Sequence
  derived and/or modified CDS sequence (opt4) from hemagglutinin__InfluenzaA__ALE31933
augaagaccaucaucgcccugagcuacauccugugccugguguacgcccagaagauccccggcaacgacaacagcaccgccacccugugccugggccaccacgccgugcccaacggcaccaucgugaagaccaucaccaacgacagaaucgaggugaccaacgccaccgagcuggugcagaacagcagcaucggcgagaucugcgacagcccccaccagauccuggacggcgagaacugcacccugaucgacgcccugcugggcgacccccagugcgacggcuuccagaacaagaagugggaccuguucguggagagaagcaaggccuacagcaacugcuaccccuacgacgugcccgacuacgccagccugagaagccugguggccagcagcggcacccuggaguucaacaacgagagcuucaacuggaccggcgugacccagaacggcaccagcagcgccugcaucagaagaagcagcagcagcuucuucagcagacugaacuggcugacccaccugaaguacaccuaccccgcccugaacgugaccaugcccaacaacgagcaguucgacaagcuguacaucuggggcgugcaccaccccggcaccgacaaggaccagaucuuccuguacgcccagagcagcggcagaaucaccgugagcaccaagagaagccagcaggccgugauccccaacaucggcagcagacccagaaucagagacauccccagcagaaucagcaucuacuggaccaucgugaagcccggcgacauccugcugaucaacagcaccggcaaccugaucgcccccagaggcuacuucaagaucagaagcggcaagagcagcaucaugagaagcgacgcccccaucggcaagugcaagagcgagugcaucacccccaacggcagcauccccaacgacaagcccuuccagaacgugaacagaaucaccuacggcgccugccccagauacgugaagcacagcacccugaagcuggccaccggcaugagaaacgugcccgagaagcagaccagaggcaucuucggcgccaucgccggcuucaucgagaacggcugggagggcaugguggacggcugguacggcuucagacaccagaacagcgagggcagaggccaggccgccgaccugaagagcacccaggccgccaucgaccagaucaacggcaagcugaacagacugaucggcaagaccaacgagaaguuccaccagaucgagaaggaguucagcgagguggagggcagaauccaggaccuggagaaguacguggaggacaccaagaucgaccuguggagcuacaacgccgagcugcugguggcccuggagaaccagcacaccaucgaccugaccgacagcgagaugaacaagcuguucgagaagaccaagaagcagcugagagagaacgccgaggacaugggcaacggcugcuucaagaucuaccacaagugcgacaacgccugcaucggcagcaucagaaacggcaccuacgaccacaacguguacagagacgaggcccugaacaacagauuccagaucaagggcguggagcugaagagcggcuacaaggacuggauccuguggaucagcuucgccaucagcugcuuccugcugugcguggcccugcugggcuucaucaugugggccugccagaagggcaacaucagaugcaacaucugcaucuga

SEQ ID NO: 173495 - RNA, 1701 nt, Artificial Sequence
  derived and/or modified CDS sequence (opt4) from hemagglutinin__InfluenzaA__ALE31934
augaagaccaucaucgcccugagcuacauccugugccugguguucgcccagaagauccccggcaacgacaacagcaccgccacccugugccugggccaccacgccgugcccaacggcaccaucgugaagaccaucaccaacgacagaaucgaggugaccaacgccaccgagcuggugcagaacagcagcaucggcgagaucugcgacagcccccaccagauccuggacggcgagaacugcacccugaucgacgcccugcugggcgacccccagugcgacggcuuccagaacaagaagugggaccuguucguggagagaagcaaggccuacagcaacugcuaccccuacgacgugcccgacuacgccagccugagaagccugguggccagcagcggcacccuggaguucaacaacgagagcuucaacuggaccggcgugacccagaacggcaccagcagcgccugcaucagaaagagcagcagcagcuucuucagcagacugaacuggcugacccaccugaacuacaccuaccaggcccugaacgugaccaugcccaacaacgagcaguucgacaagcuguacaucuggggcgugcaccaccccggcaccgacaaggaccagaucuuccuguacgccagaagcagcggcagaaucaccgugagcaccaagagaagccagcaggccgugauccccaacaucggcagcagacccagaaucagagacauccccagcagaaucagcaucuacuggaccaucgugaagcccggcgacauccugcugaucaacagcaccggcaaccugaucgcccccagaggcuacuucaagaucagaagcggcaagagcagcaucaugagaagcgacgcccccaucggcaagugcaagagcgagugcaucacccccaacggcagcauccccaacgacaagcccuuccagaacgugaacagaaucaccuacggcgccugccccagauacgugaagcacagcacccugaagcuggccaccggcaugagaaacauccccgagaagcagaccagaggcaucuucggcgccaucgccggcuucaucgagaacggcugggagggcaugguggacggcugguacggcuucagacaccagaacagcgagggcagaggccaggccgccgaccugaagagcacccaggccgccaucgaccagaucaacggcaagcugaacagacugaucggcaagaccaacgagaaguuccaccagaucgagaaggaguucagcgagguggagggcagaauccaggaccuggagaaguacguggaggacaccaagaucgaccuguggagcuacaacgccgagcugcugguggcccuggagaaccagcacaccaucgaccugaccgacagcgagaugaacaagcuguucgagaagaccaagaagcagcugagagagaacgccgaggacaugggcaacggcugcuucaagaucuaccacaagugcgacaacgccugcaucggcagcaucagaaacggcaccuacgaccacaacguguacagagacgaggcccugaacaacagauuccagaucaagggcguggagcugaagagcggcuacaaggacuggauccuguggaucagcuucgccaucagcugcuuccugcugugcguggcccugcugggcuucaucaugugggccugccagaagggcaacaucagaugcaacaucugcaucuga

SEQ ID NO: 173496 - RNA, 1701 nt, Artificial Sequence; identical to SEQ ID NO: 172501
  derived and/or modified CDS sequence (opt4) from hemagglutinin__InfluenzaA__ALE31935

SEQ ID NO: 173497 - RNA, 1701 nt, Artificial Sequence; identical to SEQ ID NO: 173283
  derived and/or modified CDS sequence (opt4) from hemagglutinin__InfluenzaA__ALE31936

SEQ ID NO: 173498 - RNA, 1701 nt, Artificial Sequence
  derived and/or modified CDS sequence (opt4) from hemagglutinin__InfluenzaA__ALE31937
augaagaccaucaucgcccugagcuacauccugugccugguguucgcccagaagcugcccgagaacgacaacagcaccgccacccugugccugggccaccacgccgugcccaacggcaccaucgugaagaccaucaccaacgacagaaucgaggugaccaacgccaccgagcuggugcagaacagcagcaucggcgagaucugcgacagcccccaccagauccuggacggcgagaacugcacccugaucgacgcccugcugggcgacccccagugcgacggcuuccagaacaagaagugggaccuguucguggagagaagcaaggccuacagcaacugcuaccccuacgacgugcccgacuacgccagccugagaagccugguggccagcagcggcacccuggaguucaacaacgagagcuucaacugggccggcgugacccagaacggcaccagcagcagcugcaucagaggcagcaacagcagcuucuucagcagacugaacuggcugacccaccugaacagcaaguaccccgcccugaacgugaccaugcccaacaacgagcaguucgacaagcuguacaucuggggcgugcaccaccccggcaccgacaaggaccagaucuuccuguacgcccagcccagcggcagaaucaccgugagcaccaagagaagccagcaggccgugauccccaacaucggcagcagacccagaaucagagacauccccagcagaaucagcaucuacuggaccaucgugaagcccggcgacauccugcugaucaacagcaccggcaaccugaucgcccccagaggcuacuucaagaucagaagcggcaagagcagcaucaugagaagcgacgcccccaucggcaagugcaagagcgagugcaucacccccaacggcagcauccccaacgacaagcccuuccagaacgugaacagaaucaccuacggcgccugccccagauacgugaagcagagcacccugaagcuggccaccggcaugagaaacgugcccgagagacagaccagaggcaucuucggcgccaucgccggcuucaucgagaacggcugggagggcaugguggacggcugguacggcuucagacaccagaacagcgagggcagaggccaggccgccgaccugaagagcacccaggccgccaucgaccagaucaacggcaagcugaacagacugaucggcaagaccaacgagaaguuccaccagaucgagaaggaguucagcgagguggagggcagaauccaggaccuggagaaguacguggaggacaccaagaucgaccuguggagcuacaacgccgagcugcugguggcccuggagaaccagcacaccaucgaccugaccgacagcgagaugaacaagcuguucgagaagaccaagaagcagcugagagagaacgccgaggacaugggcaacggcugcuucaagaucuaccacaagugcgacaacgccugcaucggcagcaucagaaacggcaccuacgaccacgacguguacagagacgaggcccugaacaacagauuccagaucaagggcguggagcugaagagcggcuacaaggacuggauccuguggaucagcuucgccaucagcugcuuccugcugugcguggcccugcugggcuucaucaugugggccugccagaagggcaacaucagaugcaacaucugcaucuga

SEQ ID NO: 173499 - RNA, 1701 nt, Artificial Sequence; identical to SEQ ID NO: 172501
  derived and/or modified CDS sequence (opt4) from hemagglutinin__InfluenzaA__ALE31938

SEQ ID NO: 173500 - RNA, 1701 nt, Artificial Sequence; identical to SEQ ID NO: 173107
  derived and/or modified CDS sequence (opt4) from hemagglutinin__InfluenzaA__ALE31939

SEQ ID NO: 173501 - RNA, 1701 nt, Artificial Sequence; identical to SEQ ID NO: 172501
  derived and/or modified CDS sequence (opt4) from hemagglutinin__InfluenzaA__ALE31941

SEQ ID NO: 173502 - RNA, 1701 nt, Artificial Sequence; identical to SEQ ID NO: 173058
  derived and/or modified CDS sequence (opt4) from hemagglutinin__InfluenzaA__ALE31943

SEQ ID NO: 173503 - RNA, 1701 nt, Artificial Sequence
  derived and/or modified CDS sequence (opt4) from hemagglutinin__InfluenzaA__ALE31944
augaagaccaucaucgcccugagcuacauccugugccugguguucgcccagaagcugcccgagaacgacaacagcaccgccacccugugccugggccaccacgccgugcccaacggcaccaucgugaagaccaucaccagcgacagaaucgaggugaccaacgccaccgagcuggugcagaacagcagcaucggcgagaucugcgacagcccccaccagauccuggacggcaagaacugcacccugaucgacgcccugcugggcgacccccagugcgacggcuuccagaacaagaagugggaccuguucguggagagaagcaaggccuacagcaacugcuaccccuacgacgugcccgacuacgccagccugagaagccugguggccagcagcggcacccuggaguucaacgacgagagcuucaacugggccggcgugacccagaacggcaccagcagcgccugcaucagaggcagcaacagcagcuucuucagcagacugaacuggcugacccacagcaacuucaaguaccccgcccugaacgugaccaugcccaacaacgagcaguucgacaagcuguacaucuggggcgugcaccaccccggcaccgacaaggaccagaucuuccuguacgcccagagcagcggcagaaucaccgugagcaccaagagaagccagcaggccgugauccccaacaucggcagcagacccagaaucagagacauccccagcagaaucagcaucuacuggaccaucgugaagcccggcgacauccugcugaucaacagcaccggcaaccugaucgcccccagaggcuacuucaagaucagaagcggcaagagcagcaucaugagaagcgacgcccccaucggcaagugcaagagcgagugcaucacccccaacggcagcauccccaacgacaagcccuuccagaacgugaacagaaucaccuacggcgccugccccagauacgugaagcagagcacccugaagcuggccaccggcaugagaaacgugcccgagaagcagaccagaggcaucuucggcgccaucgccggcuucaucgagaacggcugggagggcaugaaggacggcugguacggcuucagacaccagaacagcgagggcagaggccaggccgccgaccugaagagcacccaggccgccaucgaccagaucaacggcaagcugaacagacugaucggcaagaccaacgagaaguuccaccagaucgagaaggaguucagcgagguggagggcagaauccaggaccuggagaaguacguggaggacaccaagaucgaccuguggagcuacaacgccgagcugcugguggcccuggagaaccagcacaccaucgaccugaccgacagcgagaugaacaagcuguucgagaagaccaagaagcagcugagagagaacgccgaggacaugggcaacggcugcuucaagaucuaccacaagugcgacaacgccugcaucggcagcaucagaaacggcaccuacgaccacgacguguacagagacgaggcccugaacaacagauuccagaucaagggcguggagcugaagagcggcuacaaggacuggauccuguggaucagcuucgccaucagcugcuuccugcugugcguggcccugcugggcuucaucaugugggccugccagaagggcaacaucagaugcaacaucugcaucuga

SEQ ID NO: 173504 - RNA, 1701 nt, Artificial Sequence
  derived and/or modified CDS sequence (opt4) from hemagglutinin__InfluenzaA__ALE31945
augaagaccaucaucgcccugagcuacauccugugccugguguucgcccagaagauccccggcaacgacaacagcaccgccacccugugccugggccaccacgccgugcccaacggcaccaucgugaagaccaucaccaacgacagaaucgaggugaccaacgccaccgagcuggugcagaacagcagcaucggcgagaucugcgacagcccccaccagauccuggacggcgagaacugcacccugaucgacgcccugcugggcgacccccagugcgacggcuuccagaacaagaagugggaccuguucguggagagaagcaaggccuacagcaacugcuaccccuacgacgugcccgacuacgccagccugagaagccugguggccagcagcggcacccuggaguucaacaacgagagcuucaacuggaccggcgugacccagaacggcaccagcagcgccugcaucagaagaagcagcagcagcuucuucagcagacugaacuggcugacccaccugaacuacaccuaccccgcccugaacgugaccaugcccaacaacgagcaguucgacaagcuguacaucuggggcgugcaccaccccggcaccgacaaggaccagaucuuccuguacgcccagagcagcggcagaaucaccgugagcaccaagggcagccagcaggccgugauccccaacgugggcagcagacccagaaucagagacauccccagcagaaucagcaucuacuggaccaucgugaagcccggcgacauccugcugaucaacagcaccggcaaccugaucgcccccagaggcuacuucaagaucagaagcggcaagagcagcaucaugagaagcgacgcccccaucggcaagugcaagagcgagugcaucacccccaacggcagcauccccaacgacaagcccuuccagaacgugaacagaaucaccuacggcgccugccccagauacgugaagcacagcacccugaagcuggccaccggcaugagaaacgugcccgagaagcagaccagaggcaucuucggcgccaucgccggcuucaucgagaacggcugggagggcaugguggacggcugguacggcuucagacaccagaacagcgagggcagaggccaggccgccgaccugaagagcacccaggccgccaucgaccagaucaacggcaagcugaacagacugaucggcaagaccaacgagaaguuccaccagaucgagaaggaguucagcgagguggagggcagaauccaggacaucgagaaguacguggaggacaccaagaucgaccuguggagcuacaacgccgagcugcugguggcccuggagaaccagcacaccaucgaccugaccgacagcgagaugaacaagcuguucgagaagaccaagaagcagcugagagagaacgccgaggacaugggcaacggcugcuucaagaucuaccacaagugcgacaacgccugcaucggcagcaucagaaacggcaccuacgaccacaacguguacagagacgaggcccugaacaacagauuccagaucaagggcguggagcugaagagcggcuacaaggacuggauccuguggaucagcuucgccaucagcugcuuccugcugugcguggcccugcugggcuucaucaugugggccugccagaagggcaacaucagaugcaacaucugcaucuga

SEQ ID NO: 173505 - RNA, 1701 nt, Artificial Sequence; identical to SEQ ID NO: 173159
  derived and/or modified CDS sequence (opt4) from hemagglutinin__InfluenzaA__ALE31946

SEQ ID NO: 173506 - RNA, 1701 nt, Artificial Sequence; identical to SEQ ID NO: 173159
  derived and/or modified CDS sequence (opt4) from hemagglutinin__InfluenzaA__ALE31947

SEQ ID NO: 173507 - RNA, 1701 nt, Artificial Sequence
  derived and/or modified CDS sequence (opt4) from hemagglutinin__InfluenzaA__ALE31948
augaagaccaucaucgcccugagcuacauccugugccugguguucgcccagaagauccccggcaacgacaacagcaccgccacccugugccugggccaccacgccgugcccaacggcaccaucgugaagaccaucaccaacgacagaaucgaggugaccaacgccaccgagcuggugcagaacagcagcaucggcgagaucugcgacagcccccaccagauccuggacggcgagaacugcacccugaucgacgcccugcugggcgacccccagugcgacggcuuccagaacaagaagugggaccuguucguggagagaagcaaggccuacagcaacugcuaccccuacgacgugcccgacuacgccagccugagaagccugguggccagcagcggcacccuggaguucaacaacgagagcuucaacuggaccggcgugacccagaacggcaccagcagcgccugcaucagaaagagcagcagcagcuucuucagcagacugaacuggcugacccaccugaacuacaccuaccccgcccugaacgugaccaugcccaacaacgagcaguucgacaagcuguacaucuggggcgugcaccaccccggcaccgacaaggaccagaucuuccuguacgccagaagcagcggcagaaucaccgugagcaccaagagaagccagcaggccgugauccccaacaucggcagcagacccagaaucagagacauccccagcagaaucagcaucuacuggaccaucgugaagcccggcgacauccugcugaucaacagcaccggcaaccugaucgcccccagaggcuacuucaagaucagaagcggcaagagcagcaucaugagaagcgacgcccccaucggcaagugcaagagcgagugcaucacccccaacggcagcauccccaacgacaagcccuuccagaacgugaacagaaucaccuacggcgccugccccagauacgugaagcacagcacccugaagcuggccaccggcaugagaaacgugcccgagaagcagaccagaggcaucuucggcgccaucgccggcuucaucgagaacggcugggagggcaugguggacggcugguacggcuucagacaccagaacagcgagggcagaggccaggccgccgaccugaagagcacccaggccgccaucgaccagaucaacggcaagcugaacagacuggugggcaagaccaacgagaaguuccaccagaucgagaaggaguucagcgagguggagggcagaauccaggaccuggagaaguacguggaggacaccaagaucgaccuguggagcuacaacgccgaguuccugguggcccuggagaaccagcacaccaucgaccugaccgacagcgagaugaacaagcuguucgagaagaccaagaagcagcugagagagaacgccgaggacaugggcaacggcugcuucaagaucuaccacaagugcgacaacgccugcaucggcagcaucagaaacggcaccuacgaccacaacguguacagagacgaggcccugaacaacagauuccagaucaagggcguggagcugaagagcggcuacaaggacuggauccuguggaucagcuucgccaucagcugcuuccugcugugcguggcccugcugggcuucaucaugugggccugccagaagggcaacaucagaugcaacaucugcaucuga

SEQ ID NO: 173508 - RNA, 1701 nt, Artificial Sequence; identical to SEQ ID NO: 173159
  derived and/or modified CDS sequence (opt4) from hemagglutinin__InfluenzaA__ALE31949

SEQ ID NO: 173509 - RNA, 1701 nt, Artificial Sequence; identical to SEQ ID NO: 172501
  derived and/or modified CDS sequence (opt4) from hemagglutinin__InfluenzaA__ALE31950

SEQ ID NO: 173510 - RNA, 1701 nt, Artificial Sequence; identical to SEQ ID NO: 173045
  derived and/or modified CDS sequence (opt4) from hemagglutinin__InfluenzaA__ALE31951

SEQ ID NO: 173511 - RNA, 1701 nt, Artificial Sequence; identical to SEQ ID NO: 172501
  derived and/or modified CDS sequence (opt4) from hemagglutinin__InfluenzaA__ALE31952

SEQ ID NO: 173512 - RNA, 1701 nt, Artificial Sequence
  derived and/or modified CDS sequence (opt4) from hemagglutinin__InfluenzaA__ALE31953
augaagaccaucaucgcccugagcuacauccugugccugguguucgcccagaagauccccggcaacgacaacagcaccgccacccugugccugggccaccacgccgugcccaacggcaccaucgugaagaccaucaccaacgacagaaucgaggugaccaacgccaccgagcuggugcagaacagcagcaucggcgagaucugcgacagcccccaccagauccuggacggcgagaacugcacccugaucgacgcccugcugggcgacccccagugcgacggcuuccagaacaagaagugggaccuguucguggagagaagcaaggccuacagcaacugcuaccccuacgacgugcccgacuacgccagccugagaagccugguggccagcagcggcacccuggaguucaacaacgagagcuucaacuggaccggcgugacccagaacggcaccagcagcgccugcaucagaaagagcagcagcagcuucuucagcagacugaacuggcugacccaccugaacuacaccuaccccgcccugaacgugaccaugcccaacaacgagcaguucgacaagcuguacaucuggggcgugcaccaccccggcaccgacaaggaccagaucuuccuguucgccagaagcagcggcagaaucaccgugagcaccaagagaagccagcaggccgugauccccaacaucggcagcagacccagaaucagagacauccccagcagaaucagcaucuacuggaccaucgugaagcccggcgacauccugcugaucaacagcaccggcaaccugaucgcccccagaggcuacuucaagaucagaagcggcaagagcagcaucaugagaagcgacgcccccaucggcaagugcaagagcgagugcaucacccccaacggcagcauccccaacgacaagcccuuccagaacgugaacagaaucaccuacggcgccugccccagauacgugaagcacagcacccugaagcuggccaccggcaugagaaacgugcccgagaagcagaccagaggcaucuucggcgccaucgccggcuucaucgagaacggcugggagggcaugguggacggcugguacggcuucagacaccagaacagcgagggcagaggccaggccgccgaccugaagagcacccaggccgccaucgaccagaucaacggcaagcugaacagacugaucggcaagaccaacgagaaguuccaccagaucgagaaggaguucagcgagguggagggcagaauccaggaccuggagaaguacguggaggacaccaagaucgaccuguggagcuacaacgccgagcugcugguggcccuggagaaccagcacaccaucgaccugaccgacagcgagaugaacaagcuguucgagaagaccaagaagcagcugagagagaacgccgaggacaugggcaacggcugcuucaagaucuaccacaagugcgacaacgccugcaucggcagcaucagaaacggcaccuacgaccacaacguguacagagacgaggcccugaacaacagauuccagaucaagggcguggagcugaagagcggcuacaaggacuggauccuguggaucagcuucgccaucagcugcuuccugcugugcguggcccugcugggcuucaucaugugggccugccagaagggcaacaucagaugcaacaucugcaucuga

SEQ ID NO: 173513 - RNA, 1701 nt, Artificial Sequence
  derived and/or modified CDS sequence (opt4) from hemagglutinin__InfluenzaA__ALE31954
augaagaccaucaucgcccugagcuacauccugugccugguguucgcccagaagcugcccggcaacgacaacagcaccgccacccugugccugggccaccacgccgugcccaacggcaccaucgugaagaccaucaccaacgacagaaucgaggugaccaacgccaccgagcuggugcagaacagcagcaucggcgagaucugcgacagcccccaccagauccuggacggcaagaacugcacccugaucgacgcccugcugggcgacccccagugcgacggcuuccagaacaagagaugggaccuguucguggagagaagcaaggccuacagcaacugcuaccccuacgacgugcccgacuacgccagccugagaagccugguggccagcagcggcacccuggaguucaacgacgagagcuucaacugggccggcgugacccagaacggcaccagcagcgccugcaucagaggcagcaacagcagcuucuucagcagacugaacuggcugacccacagcaacuucaaguaccccgcccugaacgugaccaugcccaacaacgagcaguucgacaagcuguacaucuggggcgugcaccaccccggcaccgacaaggaccagaucuuccuguacgcccacagcagcggcagaaucaccgugagcaccaagagaagccagcaggccgugauccccaacgugggcagcagacccagaaucagaaacauccccagcagaaucagcaucuacuggaccaucgugaagcccggcgacauccugcugaucaacagcaccggcaaccugaucgcccccagaggcuacuucaagauccagagcggcaagagcagcaucaugagaagcgacgcccccaucggcaagugcaagagcgagugcaucacccccaacggcagcauccccaacgacaagcccuuccagaacgugaacagaaucaccuacggcgccugccccagauacgugaagcagagcacccugaagcuggccaccggcaugagaaacgugcccgagaagcagaccagaggcaucuucggcgccaucgccggcuucaucgagaacggcugggagggcaugaaggacggcugguacggcuucagacaccagaacagcgagggcagaggccaggccgccgaccugaagagcacccaggccgccaucgaccagaucaacggcaagcugaacagacuggugggcaagaccaacgagaaguuccaccagaucgagaaggaguucagcgagguggagggcagaauccaggaccuggagaaguacguggaggacaccaagaucgaccuguggagcuacaacgccgagcugcugguggcccuggagaaccagcacaccaucgaccugaccgacagcgagaugaacaagcuguucgagaagaccaagaagcagcugagagagaacgccgaggacaugggcaacggcugcuucaagaucuaccacaagugcgacaacgccugcaucggcagcaucagaaacggcaccuacgaccacuacguguacagagacgaggcccugaacaacagauuccagaucaagggcguggagcugaagagcggcuacaaggacuggauccuguggaucagcuucgccaucagcugcuuccugcugugcguggcccugcugggcuucaucaugugggccugccagaagggcaacaucagaugcaacaucugcaucuga

SEQ ID NO: 173514 - RNA, 1701 nt, Artificial Sequence; identical to SEQ ID NO: 172501
  derived and/or modified CDS sequence (opt4) from hemagglutinin__InfluenzaA__ALE31955

SEQ ID NO: 173515 - RNA, 1701 nt, Artificial Sequence
  derived and/or modified CDS sequence (opt4) from hemagglutinin__InfluenzaA__ALE31956
augaagaccaucaucgcccugagcuacauccugugccugguguucgcccagaagauccccggcaacgacaacagcaccgccacccugugccugggccaccacgccgugcccaacggcaccaucgugaagaccaucaccaacgacagaaucgaggugaccaacgccaccgagcuggugcagaacagcagcaucggcgagaucugcaacagcccccaccagauccuggacggcgagaacugcacccugaucgacgcccugcugggcgacccccagugcgacggcuuccagaacaagaagugggaccuguucguggagagaagcaaggccuacagcaacugcuaccccuacgacgugcccgacuacgccagccugagaagccugguggccagcagcggcacccuggaguucaacaacgagagcuucaacuggaccggcgugacccagaacggcaccagcagcgccugcaucagaagaagcagcagcagcuucuucagcagacugaacuggcugacccaccugaacuacaccuaccccgcccugaacgugaccaugcccaacaacgagcaguucgacaagcuguacaucuggggcgugcaccaccccggcaccgacaaggaccagaucuuccuguacgcccagagcagcggcagaaucaccgugagcaccaagagaagccagcaggccgugauccccaacaucggcagcagacccagaaucagagacauccccagcagaaucagcaucuacuggaccaucgugaagcccggcgacauccugcugaucaacagcaccggcaaccugaucgcccccagaggcuacuucaagaucagaagcggcaagagcagcaucaugagaagcgacgcccccaucggcaagugcaagagcgagugcaucacccccaacggcagcauccccaacgacaagcccuuccagaacgugaacagaaucaccuacggcgccugccccagauacgugaagcacagcacccugaagcuggccaccggcaugagaaacgugcccgagaagcagaccagaggcaucuucggcgccaucgccggcuucaucgagaacggcugggagggcaugguggacggcugguacggcuucagacaccagaacagcgagggcagaggccaggccgccgaccugaagagcacccaggccgccaucgaccagaucaacggcaagcugaacagacugaucggcaagaccaacgagaaguuccaccagaucgagaaggaguucagcgagguggagggcagaauccaggaccuggagaaguacguggaggacaccaagaucgaccuguggagcuacaacgccgagcugcugguggcccuggagaaccagcacaccaucgaccugaccgacagcgagaugaacaagcuguucgagaagaccaagaagcagcugagagagaacgccgaggacaugggcaacggcugcuucaagaucuaccacaagugcgacaacgccugcaucggcagcaucagaaacggcaccuacgaccacaacguguacagagacgaggcccugaacaacagauuccagaucaagggcguggagcugaagagcggcuacaaggacuggauccuguggaucagcuucgccaucagcugcuuccugcugugcguggcccugcugggcuucaucaugugggccugccagaagggcaacaucagaugcaacaucugcaucuga

SEQ ID NO: 173516 - RNA, 1701 nt, Artificial Sequence; identical to SEQ ID NO: 173107
  derived and/or modified CDS sequence (opt4) from hemagglutinin__InfluenzaA__ALE31957

SEQ ID NO: 173517 - RNA, 1701 nt, Artificial Sequence
  derived and/or modified CDS sequence (opt4) from hemagglutinin__InfluenzaA__ALE31958
augaagaccaucaucgcccugagcuacauccugugccugguguucgcccagaagauccccggcaacgacaacagcaccgccacccugugccugggccaccacgccgugcccaacggcaccaucgugaagaccaucaccaacgacagaaucgaggugaccaacgccaccgagcuggugcagaacagcagcaucggcgagaucugcgacagcccccaccagauccuggacggcgagaacugcacccugaucgacgcccugcugggcgacccccagugcgacggcuuccagaacaagaagugggaccuguucguggagagaagcaaggccuacagcaacugcuaccccuacgacgugcccgacuacgccagccugagaagccugguggccagcagcggcacccuggaguucaacaacgagagcuucaacuggaccggcgugacccagaacggcaccagcagcgccugcaucagaagaagcagcagcagcuucuucagcagacugaacuggcugacccaccugaacuacaccuaccccgcccugaacgugaccaugcccaacaacgagcaguucgacaagcuguacaucuggggcgugcaccaccccggcaccgacaaggaccagaucuuccuguacgcccagagcagcggcagaaucaccgugagcaccaagagaagccagcaggccgugauccccaacaucggcagcaagcccagaaucagagacauccccagcagaaucagcaucuacuggaccaucgugaagcccggcgacauccugcugaucaacagcaccggcaaccugaucgcccccagaggcuacuucaagaucagaagcggcaagagcagcaucaugagaagcgacgcccccaucggcaagugcaagagcgagugcaucacccccaacggcagcauccccaacgacaagcccuuccagaacgugaacagaaucaccuacggcgccugccccagauacgugaagcacagcacccugaagcuggccaccggcaugagaaacgugcccgagaagcagaccagaggcaucuucggcgccaucgccggcuucaucgagaacggcugggagggcaugguggacggcugguacggcuucagacaccagaacagcgagggcagaggccaggccgccgaccugaagagcacccaggccgccaucgaccagaucaacggcaagcugaacagacugaucggcaagaccaacgagaaguuccaccagaucgagaaggaguucagcgagguggagggcagaauccaggaccuggagaaguacguggaggacaccaagaucgaccuguggagcuacaacgccgagcugcugguggcccuggagaaccagcacaccaucgaccugaccgacagcgagaugaacaagcuguucgagaagaccaagaagcagcugagagagaacgccgaggacaugggcaacggcugcuucaagaucuaccacaagugcgacaacgccugcaucggcagcaucagaaacggcaccuacgaccacaacguguacagagacgaggcccugaacaacagauuccagaucaagggcguggagcugaagagcggcuacaaggacuggauccuguggaucagcuucgccaucagcugcuuccugcugugcguggcccugcugggcuucaucaugugggccugccagaagggcaacaucagaugcaacaucugcaucuga

SEQ ID NO: 173518 - RNA, 1701 nt, Artificial Sequence
  derived and/or modified CDS sequence (opt4) from hemagglutinin__InfluenzaA__ALE31959
augaagaccaucaucgcccugagcuacauccugugccugguguucgcccagaagauccccggcaacgacaacagcaccgccacccugugccugggccaccacgccgugcccaacggcaccaucgugaagaccaucaccaacgacagaaucgaggugaccaacgccaccgagcuggugcagaacagcagcaucggcgagaucugcgacagcccccaccagauccuggacggcgagaacugcacccugaucgacgcccugcugggcgacccccagugcgacggcuuccagaacaagaagugggaccuguucguggagagaagcaaggccuacagcaacugcuaccccuacgacgugcccgacuacgccagccugagaagccugguggccagcagcggcacccuggaguucaacaacgagagcuucaacuggaccggcgugacccagaacggcaccagcagcgccugcaucagaaagagcagcagcagcuucuucagcagacugaacuggcugacccaccugaacuacgccuaccccgcccugaacgugaccaugcccaacaacgagcaguucgacaagcuguacaucuggggcgugcaccaccccggcaccgacaaggaccagaucuuccuguacgccagaagcagcggcagaaucaccgugagcaccaagagaagccagcaggccgugauccccaacaucggcagcagacccagaaucagagacauccccagcagaaucagcaucuacuggaccaucgugaagcccggcgacauccugcugaucaacagcaccggcaaccugaucgcccccagaggcuacuucaagaucagaagcggcaagagcagcaucaugagaagcgacgcccccaucggcaagugcaagagcgagugcaucacccccaacggcagcauccccaacgacaagcccuuccagaacgugaacagaaucaccuacggcgccugccccagauacgugaagcacagcacccugaagcuggccaccggcaugagaaacgugcccgagaagcagaccagaggcaucuucggcgccaucgccggcuucaucgagaacggcugggagggcaugguggacggcugguacggcuucagacaccagaacagcgagggcagaggccaggccgccgaccugaagagcacccaggccgccaucgaccagaucaacggcaagcugaacagacugaucggcaagaccaacgagaaguuccaccagaucgagaaggaguucagcgagguggagggcagaauccaggaccuggagaaguacguggaggacaccaagaucgaccuguggagcuacaacgccgagcugcugguggcccuggagaaccagcacaccaucgaccugaccgacagcgagaugaacaagcuguucgagaagaccaagaagcagcugagagagaacgccgaggacaugggcaacggcugcuucaagaucuaccacaagugcgacaacgccugcaucggcagcaucagaaacggcaccuacgaccacaacguguacagagacgaggcccugaacaacagauuccagaucaagggcguggagcugaagagcggcuacaaggacuggauccuguggaucagcuucgccaucagcugcuuccugcugugcguggcccugcugggcuucaucaugugggccugccagaagggcaacaucagaugcaacaucugcaucuga

SEQ ID NO: 173519 - RNA, 1701 nt, Artificial Sequence; identical to SEQ ID NO: 172501
  derived and/or modified CDS sequence (opt4) from hemagglutinin__InfluenzaA__ALE31960

SEQ ID NO: 173520 - RNA, 1701 nt, Artificial Sequence; identical to SEQ ID NO: 172690
  derived and/or modified CDS sequence (opt4) from hemagglutinin__InfluenzaA__ALE31961

SEQ ID NO: 173521 - RNA, 1701 nt, Artificial Sequence
  derived and/or modified CDS sequence (opt4) from hemagglutinin__InfluenzaA__ALE31962
augaagaccaucaucgcccugagcuacauccugugccugguguucgcccagaagauccccggcaacgacaacagcaccgccacccugugccugggccaccacgccgugcccaacggcaccaucgugaagaccaucaccaacgacagaaucgaggugaccaacgccaccgagcuggugcagaacagcagcaucggcgagaucugcgacagcccccaccagauccuggacggcgagaacugcacccugaucgacgcccugcugggcgacccccagugcgacggcuuccagaacaagaagugggaccuguucguggagagaagcaaggccuacagcaacugcuaccccuacgacgugcccgacuacgccagccugagaagccugguggccagcagcggcacccuggaguucaacaacgagagcuucaacuggaccggcgugacccagaacggcaccagcagcgccugcaucagaagaagcagcagcagcuucuucagcagacugaacuggcugacccaccugaacuacaccuaccccgcccugaacgugaccaugcccaacaacgagcaguucgacaagcuguacaucuggggcgugcaccaccccggcaccgacaaggaccagaucuuccuguacgcccagagcagcggcagaaucaccgugagcaccaagagaagccagcaggccgugauccccaacaucggcagcagacccagaaucagagacauccccagcagaaugagcaucuacuggaccaucgugaagcccggcgacauccugcugaucaacagcaccggcaaccugaucgcccccagaggcuacuucaagaucagaagcggcaagagcagcaucaugagaagcgacgcccccaucggcaagugcaagagcgagugcaucacccccaacggcagcauccccaacgacaagcccuuccagaacgugaacagaaucaccuacggcgccugccccagauacgugaagcacagcacccugaagcuggccaccggcaugagaaacgugcccgagaagcagaccagaggcaucuucggcgccaucgccggcuucaucgagaacggcugggagggcaugguggacggcugguacggcuucagacaccagaacagcgagggcagaggccaggccgccgaccugaagagcacccaggccgccaucgaccagaucaacggcaagcugaacagacugaucggcaagaccaacgagaaguuccaccagaucgagaaggaguucagcgagguggagggcagaauccaggaccuggagaaguacguggaggacaccaagaucgaccuguggagcuacaacgccgagcugcugguggcccuggagaaccagcacaccaucgaccugaccgacagcgagaugaacaagcuguucgagaagaccaagaagcagcugagagagaacgccgaggacaugggcaacggcugcuucaagaucuaccacaagugcgacaacgccugcaucggcagcaucagaaacggcaccuacgaccacaacguguacagagacgaggcccugaacaacagauuccagaucaagggcguggagcugaagagcggcuacaaggacuggauccuguggaucagcuucgccaucagcugcuuccugcugugcguggcccugcugggcuucaucaugugggccugccagaagggcaacaucagaugcaacaucugcaucuga

SEQ ID NO: 173522 - RNA, 1701 nt, Artificial Sequence
  derived and/or modified CDS sequence (opt4) from hemagglutinin__InfluenzaA__ALE31963
augaagaccaucaucgcccugagcuacauccugugccugguguucgcccagaagauccccggcaacgacaacagcaccgccacccugugccugggccaccacgccgugcccaacggcaccaucgugaagaccaucaccaacgacagaaucgaggugaccaacgccaccgagcuggugcagaacagcagcaucggcgagaucugcgacagcccccaccagauccuggacggcgagaacugcacccugaucgacgcccugcugggcgacccccagugcgacggcuuccagaacaagaagugggaccuguucguggagagaagcaaggccuacagcaacugcuaccccuacgacgugcccgacuacgccagccugagaagccugguggccagcagcggcacccuggaguucaacaacgagagcuucaacuggaccggcgugacccagaacggcaccagcagcgccugcaucagaagaagcagcagcagcuucuucagcagacugaacuggcugacccaccugaacuacaccuaccccgcccugaacgugaccaugcccaacaacgagcaguucgacaagcuguacaucuggggcgugcaccaccccggcaccgacaaggaccagaccuuccuguacgcccagagcagcggcagaaucaccgugagcaccaagagaagccagcaggccgugauccccaacaucggcagcagacccagaaucagagacauccccagcagaaucagcaucuacuggaccaucgugaagcccggcgacauccugcugaucaacagcaccggcaaccugaucgcccccagaggcuacuucaagaucagaagcggcaagagcagcaucaugagaagcgacgcccccaucggcaagugcaagagcgagugcaucacccccaacggcagcauccccaacgacaagcccuuccagaacgugaacagaaucaccuacggcgccugccccagauacgugaagcacagcacccugaagcuggccaccggcaugagaaacgugcccgagaagcagaccagaggcaucuucggcgccaucgccggcuucaucgagaacggcugggagggcaugguggacggcugguacggcuucagacaccagaacagcgagggcagaggccaggccgccgaccugaagagcacccaggccgccaucgaccagaucaacggcaagcugaacagacugaucggcaagaccaacgagaaguuccaccagaucgagaaggaguucagcgagguggagggcagaauccaggaccuggagaaguacguggaggacaccaagaucgaccuguggagcuacaacgccgagcugcugguggcccuggagaaccagcacaccaucgaccugaccgacagcgagaugaacaagcuguucgagaagaccaagaagcagcugagagagaacgccgaggacaugggcaacggcugcuucaagaucuaccacaagugcgacaacgccugcaucggcagcaucagaaacggcaccuacaaccacaacguguacagagacgaggcccugaacaacagauuccagaucaagggcguggagcugaagagcggcuacaaggacuggauccuguggaucagcuucgccaucagcugcuuccugcugugcguggcccugcugggcuucaucaugugggccugccagaagggcaacaucagaugcaacaucugcaucuga

SEQ ID NO: 173523 - RNA, 1701 nt, Artificial Sequence
  derived and/or modified CDS sequence (opt4) from hemagglutinin__InfluenzaA__ALE31964
augaagaccaucaucgcccugagcuacauccugugccugguguucgcccagaagauccccggcaacgacaacagcaccgccacccugugccugggccaccacgccgugcccaacggcaccaucgugaagaccaucaccaacgacagaaucgaggugaccaacgccaccgagcuggugcagaacagcagcaucggcgagaucugcgacagcccccaccagauccuggacggcgagaacugcacccugaucgacgcccugcugggcgacccccagugcgacggcuuccagaacaagaagugggaccuguucguggagagaagcaaggccuacagcaacugcuaccccuacuacgugcccgacuacgccagccugagaagccugguggccagcagcggcacccuggaguucaacaacgagagcuucaacuggaccggcgugacccagaacggcaccagcagcgccugcaucagaagaagcagcagcagcuucuucagcagacugaacuggcugacccaccugaacuacaccuaccccgcccugaacgugaccaugcccaacaacgagcaguucgacaagcuguacaucuggggcgugcaccaccccggcaccgacaaggaccagaucuuccuguacgcccagagcagcggcagaaucaccgugagcaccaagagaagccagcaggccgugauccccaacaucggcagcagacccagaaucagagacauccccagcagaaucagcaucuacuggaccaucgugaagcccggcgacauccugcugaucaacagcaccggcaaccugaucgcccccagaggcuacuucaagauccagagcggcaagagcagcaucaugagaagcgacgcccccaucggcaagugcaagagcgagugcaucacccccaacggcagcauccccaacgacaagcccuuccagaacgugaacagaaucaccuacggcgccugccccagauacgugaagcacagcacccugaagcuggccaccggcaugagaaacgugcccgagaagcagaccagaggcaucuucggcgccaucgccggcuucaucgagaacggcugggagggcaugguggacggcugguacggcuucagacaccagaacagcgagggcagaggccaggccgccgaccugaagagcacccaggccgccaucgaccagaucaacggcaagcugaacagacugaucggcaagaccaacgagaaguuccaccagaucgagaaggaguucagcgagguggagggcagaauccaggaccuggagaaguacguggaggacaccaagaucgaccuguggagcuacaacgccgagcugcugguggcccuggagaaccagcacaccaucgaccugaccgacagcgagaugaacaagcuguucgagaagaccaagaagcagcugagagagaacgccgaggacaugggcaacggcugcuucaagaucuaccacaagugcgacaacgccugcaucggcagcaucagaaacggcaccuacgaccacaacguguacagagacgaggcccugaacaacagauuccagaucaagggcguggagcugaagagcggcuacaaggacuggauccuguggaucagcuucgccaucagcugcuuccugcugugcguggcccugcugggcuucaucaugugggccugccagaagggcaacaucagaugcaacaucugcaucuga

SEQ ID NO: 173524 - RNA, 1701 nt, Artificial Sequence; identical to SEQ ID NO: 172501
  derived and/or modified CDS sequence (opt4) from hemagglutinin__InfluenzaA__ALE31965

SEQ ID NO: 173525 - RNA, 1701 nt, Artificial Sequence; identical to SEQ ID NO: 173159
  derived and/or modified CDS sequence (opt4) from hemagglutinin__InfluenzaA__ALE31966

SEQ ID NO: 173526 - RNA, 1701 nt, Artificial Sequence; identical to SEQ ID NO: 173429
  derived and/or modified CDS sequence (opt4) from hemagglutinin__InfluenzaA__ALE31967

SEQ ID NO: 173527 - RNA, 1701 nt, Artificial Sequence; identical to SEQ ID NO: 173045
  derived and/or modified CDS sequence (opt4) from hemagglutinin__InfluenzaA__ALE31968

SEQ ID NO: 173528 - RNA, 1701 nt, Artificial Sequence; identical to SEQ ID NO: 173152
  derived and/or modified CDS sequence (opt4) from hemagglutinin__InfluenzaA__ALE31969

SEQ ID NO: 173529 - RNA, 1701 nt, Artificial Sequence; identical to SEQ ID NO: 172501
  derived and/or modified CDS sequence (opt4) from hemagglutinin__InfluenzaA__ALE31970

SEQ ID NO: 173530 - RNA, 1701 nt, Artificial Sequence
  derived and/or modified CDS sequence (opt4) from hemagglutinin__InfluenzaA__ALE31971
augaagaccaucaucgcccugagcuacauccugugccugguguucgcccagaagauccccggcaacgacaacagcaccgccacccugugccugggccaccacgccgugcccaacggcaccaucgugaagaccaucaccaacgacagaaucgaggugaccaacgccaccgagcuggugcagaacagcagcaucggcgagaucugcgacagcccccaccagauccuggacggcgagaacugcacccugaucgacgcccugcugggcgacccccagugcgacggcuuccagaacaagaagugggaccuguucguggagagaagcaaggccuacagcaacugcuaccccuacgacgugcccgacuacgccagccugagaagccugguggccagcagcggcacccuggaguucaacaacgagagcuucaacuggaccggcgugacccagaacggcaccagcagcgccugcaucagaagaagcagcagcagcuucuucagcagacugaacuggcugacccaccugaacuacgccuaccccgcccugaacgugaccaugcccaacaacgagcaguucgacaagcuguacaucuggggcgugcaccaccccggcaccgacaaggaccagaucuuccuguacgcccagagcagcggcagaaucaccgugagcaccaagggcagccagcaggccgugauccccaacaucggcagcagacccagaaucagagacauccccagcagaaucagcaucuacuggaccaucgugaagcccggcgacauccugcugaucaacagcaccggcaaccugaucgcccccagaggcuacuucaagaucagaagcggcaagagcagcaucaugagaagcgacgcccccaucggcaagugcaagagcgagugcaucacccccaacggcagcauccccaacgacaagcccuuccagaacgugaacagaaucaccuacggcgccugccccagauacgugaagcacagcacccugaagcuggccaccggcaugagaaacgugcccgagaagcagaccagaggcaucuucggcgccaucgccggcuucaucgagaacggcugggagggcaugguggacggcugguacggcuucagacaccagaacagcgagggcagaggccaggccgccgaccugaagagcacccaggccgccaucgaccagaucaacggcaagcugaacagacugaucggcaagaccaacgagaaguuccaccagaucgagaaggaguucagcgagguggagggcagaauccaggaccuggagaaguacguggaggacaccaagaucgaccuguggagcuacaacgccgagcugcugguggcccuggagaaccagcacaccaucgaccugaccgacagcgagaugaacaagcuguucgagaagaccaagaagcagcugagagagaacgccgaggacaugggcaacggcugcuucaagaucuaccacaagugcgacaacgccugcaucggcagcaucagaaacggcaccuacgaccacaacguguacagagacgaggcccugaacaacagauuccagaucaagggcguggagcugaagagcggcuacaaggacuggauccuguggaucagcuucgccaucagcugcuuccugcugugcguggcccugcugggcuucaucaugugggccugccagaagggcaacaucagaugcaacaucugcaucuga

SEQ ID NO: 173531 - RNA, 1701 nt, Artificial Sequence; identical to SEQ ID NO: 173045
  derived and/or modified CDS sequence (opt4) from hemagglutinin__InfluenzaA__ALE31972

SEQ ID NO: 173532 - RNA, 1701 nt, Artificial Sequence; identical to SEQ ID NO: 173045
  derived and/or modified CDS sequence (opt4) from hemagglutinin__InfluenzaA__ALE31973

SEQ ID NO: 173533 - RNA, 1701 nt, Artificial Sequence; identical to SEQ ID NO: 172690
  derived and/or modified CDS sequence (opt4) from hemagglutinin__InfluenzaA__ALE31974

SEQ ID NO: 173534 - RNA, 1701 nt, Artificial Sequence; identical to SEQ ID NO: 173045
  derived and/or modified CDS sequence (opt4) from hemagglutinin__InfluenzaA__ALE31975

SEQ ID NO: 173535 - RNA, 1701 nt, Artificial Sequence; identical to SEQ ID NO: 172501
  derived and/or modified CDS sequence (opt4) from hemagglutinin__InfluenzaA__ALE31976

SEQ ID NO: 173536 - RNA, 1701 nt, Artificial Sequence; identical to SEQ ID NO: 172501
  derived and/or modified CDS sequence (opt4) from hemagglutinin__InfluenzaA__ALE31977

SEQ ID NO: 173537 - RNA, 1701 nt, Artificial Sequence
  derived and/or modified CDS sequence (opt4) from hemagglutinin__InfluenzaA__ALE31978
augaagaccaucaucgcccugagcuacauccugugccugguguucgcccagaagauccccggcaacgacaacagcaccgccacccugugccugggccaccacgccgugcccaacggcaccaucgugaagaccaucaccaacgacagaaucgaggugaccaacgccaccgagcuggugcagaacagcagcaucggcgagaucugcgacagcccccaccagauccuggacggcgagaacugcacccugaucgacgcccugcugggcgacccccagugcgacggcuuccagaacaagaagugggaccuguucguggagagaagcaaggccuacagcaacugcuaccccuacgacgugcccgacuacgccagccugagaagccugguggccagcagcggcacccuggaguucaacaacgagagcuucaacuggaccggcgugacccagaacggcaccagcagcgccugcaucagaaagagcagcagcagcuucuucagcagacugaacuggcugacccaccugaacuacaccuaccccgcccugaacgugaccaugcccaacaacgagcaguucgacaagcuguacaucuggggcgugcaccaccccggcaccgacaaggaccagaucuuccuguacgccagaagcagcggcagaaucaccgugagcaccaagagaagccagcaggccgugauccccaacaucggcagcagacccagaaucagagacauccccagcagaaucagcaucuacuggaccaucgugaagcccggcgacauccugcugauccacagcaccggcaaccugaucgcccccagaggcuacuucaagaucagaagcggcaagagcagcaucaugagaagcgacgcccccaucggcaagugcaagagcgagugcaucacccccaacggcagcauccccaacgacaagcccuuccagaacgugaacagaaucaccuacggcgccugccccagauacgugaagcacagcacccugaagcuggccaccggcaugagaaacgugcccgagaagcagaccagaggcaucuucggcgccaucgccggcuucaucgagaacggcugggagggcaugguggacggcugguacggcuucagacaccagaacagcgagggcagaggccaggccgccgaccugaagagcacccaggccgccaucgaccagaucaacggcaagcugaacagacugaucggcaagaccaacgagaaguuccaccagaucgagaaggaguucagcgagguggagggcagaauccaggaccuggagaaguacguggaggacaccaagaucgaccuguggagcuacaacgccgagcugcugguggcccuggagaaccagcacaccaucgaccugaccgacagcgagaugaacaagcuguucgagaagaccaagaagcagcugagagagaacgccgaggacaugggcaacggcugcuucaagaucuaccacaagugcgacaacgccugcaucggcagcaucagaaacggcaccuacgaccacaacguguacagagacgaggcccugaacaacagauuccagaucaagggcguggagcugaagagcggcuacaaggacuggauccuguggaucagcuucgccaucagcugcuuccugcugugcguggcccugcugggcuucaucaugugggccugccagaagggcaacaucagaugcaacaucugcaucuga

SEQ ID NO: 173538 - RNA, 1701 nt, Artificial Sequence; identical to SEQ ID NO: 172501
  derived and/or modified CDS sequence (opt4) from hemagglutinin__InfluenzaA__ALE31979

SEQ ID NO: 173539 - RNA, 1701 nt, Artificial Sequence
  derived and/or modified CDS sequence (opt4) from hemagglutinin__InfluenzaA__ALE31980
augaagaccaucaucgcccugagcuacauccugugccugguguucgcccagaagauccccggcaacgacaacagcaccgccacccugugccugggccaccacgccgugcccaacggcaccaucgugaagaccaucaccaacgacagaaucgaggugaccaacgccaccgagcuggugcagaacagcagcaucggcgagaucugcgacagcccccaccagauccuggacggcgagaacugcacccugaucgacgcccugcugggcgacccccagugcgacggcuuccagaacaagaagugggaccuguucguggagagaagcaaggccuacagcaacugcuaccccuacgacgugcccgacuacgccagccugagaagccugguggccagcagcggcacccuggaguucaacaacgagagcuucaacuggaccggcgugacccagaacggcaccagcagcgccugcaucagaagaagcagcagcagcuucuucagcagacugaacuggcugacccaccugaacuacaccuaccccgcccugaacgugaccaugcccaacaacgagcaguucgacaagcuguacaucuggggcgugcaccaccccggcaccgacaaggaccagaucuuccuguacgcccagagcagcggcagaaucaccgugagcaccaagagaagccagcaggccgugauccccaacaucggcagcagacccagaaucagagacauccccagcagaaucagcaucuacuggaccaucgugaagcccggcgacauccugcugaucaacagcaccggcaaccugaucgcccccagaggcuacuucaagaucagaagcggcaagagcagcaucaugagaagcgacgcccccaucggcaagugcaagagcgagugcaucacccccaacggcagcauccccaacgacaagcccuuccagaacgugaacagaaucaccuacggcgccugccccagauacgugaagcacagcacccugaagcuggccaccggcaugagaaacgugcccgagaagcagaccagaggcaucuucggcgccaucgccggcuucaucgagaacggcugggagggcaugguggacggcugguacggcuucagacaccagaacagcgagggcagaggccaggccgccgaccugaagagcacccaggccgccaucgaccagaucaacggcaagcugaacagacugaucggcaagaccaacgagaaguuccaccagaucgagaaggaguucagcgagguggagggcagaauccaggaccuggagaaguacguggaggacaccaagaucgaccuguggagcuacaacgccgagcugcugguggcccuggagaaccagcacaccaucgaccugaccgacagcgagaugaacaagcuguucgagaagaccaagaagcagcugagagagaacgccgaggacaugggcaacggcugcuucaagaucuaccacaagugcgacaacgccugcaucggcagcaucagaaacggcaccuacgaccacaacguguacagagacgaggcccugaacaacagauuccagaucaagggcguggagcugaagagcgaguacaaggacuggauccuguggaucagcuucgccaucagcugcuuccugcugugcguggcccugcugggcuucaucaugugggccugccagaagggcaacaucagaugcaacaucugcaucuga

SEQ ID NO: 173540 - RNA, 1701 nt, Artificial Sequence; identical to SEQ ID NO: 172501
  derived and/or modified CDS sequence (opt4) from hemagglutinin__InfluenzaA__ALE31981

SEQ ID NO: 173541 - RNA, 1701 nt, Artificial Sequence; identical to SEQ ID NO: 173041
  derived and/or modified CDS sequence (opt4) from hemagglutinin__InfluenzaA__ALE31995

SEQ ID NO: 173542 - RNA, 1701 nt, Artificial Sequence
  derived and/or modified CDS sequence (opt4) from hemagglutinin__InfluenzaA__ALE31996
augaagaccaucaucgcccugagcuacauccugugccugguguucgcccagaagauccccggcaacgacaacagcaccgccacccugugccugggccaccacgccgugcccaacggcaccaucgugaagaccaucaccaacgacagaaucgaggugaccaacgccaccgagcuggugcagaacagcagcaucggcgagaucugcgacagcccccaccagauccuggacggcgagaacugcacccugaucgacgcccugcugggcgacccccagugcgacggcuuccagaacaagaagugggaccuguucguggagagaagcaaggccuacagcaacugcuaccccuacgacgugcccgacuacgccagccugagaagccugguggccagcagcggcacccuggaguucaacaacgagagcuucaacuggaccggcgugacccagaacggcaccagcagcgccugcaucagaagaagcagcagcagcuucuucagcagacugaacuggcugacccaccugaacuacaccuaccccgcccugaacgugaccaugcccaacaacgagcaguucgacaagcuguacaucuggggcgugcaccaccccggcaccgacaaggaccagaucuuccuguacgcccagagcagcggcagaaucaccgugagcaccaagagaagccagcaggccgugauccccaacaucggcagcagacccagaaucagagacauccccagcagaaucagcaucuacuggaccaucgugaagcccggcgacauccugcugaucaacagcaccggcaaccugaucgcccccagaggcuacuucaagaucagaagcggcaagagcagcaucaugagaagcgacgcccccaucggcaagugcaagagcgagugcaucacccccaacggcagcauccccaacgacaagcccuuccagaacgugaacagagugaccuacggcgccugccccagauacgugaagcacagcacccugaagcuggccaccggcaugagaaacgugcccgagaagcagaccagaggcaucuucggcgccaucgccggcuucaucgagaacggcugggagggcaugguggacggcugguacggcuucagacaccagaacagcgagggcagaggccaggccgccgaccugaagagcacccaggccgccaucgaccagaucaacggcaagcugaacagacugaucggcaagaccaacgagaaguuccaccagaucgagaaggaguucagcgagguggagggcagaauccaggaccuggagaaguacguggaggacaccaagaucgaccuguggagcuacaacgccgagcugcugguggcccuggagaaccagcacaccaucgaccugaccgacagcgagaugaacaagcuguucgagaagaccaagaagcagcugagagagaacgccgaggacaugggcaacggcugcuucaagaucuaccacaagugcgacaacgccugcaucggcagcaucagaaacggcaccuacgaccacaacguguacagagacgaggcccugaacaacagauuccagaucaagggcguggagcugaagagcggcuacaaggacuggauccuguggaucagcuucgccaucagcugcuuccugcugugcguggcccugcugggcuucaucaugugggccugccagaagggcaacaucagaugcaacaucugcaucuga

SEQ ID NO: 173543 - RNA, 1701 nt, Artificial Sequence
  derived and/or modified CDS sequence (opt4) from hemagglutinin__InfluenzaA__ALE31997
augaagaccaucaucgcccugagcuacauccugugccugguguucgcccagaagauccccggcaacgacaacagcaccgccacccugugccugggccaccacgccgugcccaacggcaccaucgugaagaccaucaccaacgacagaaucgaggugaccaacgccaccgagcuggugcagaacagcagcaucggcgagaucugcgacagcccccaccagauccuggacggcgagaacugcacccugaucgacgcccugcugggcgacccccagugcgacggcuuccagaacaagaagugggaccuguucaucgagagaagcaaggccuacagcaacugcuaccccuacgacgugcccgacuacgccagccugagaagccugguggccagcagcggcacccuggaguucaacaacgagagcuucaacuggaccggcgugacccagaacggcaccagcagcgccugcaucagaagaagcagcagcagcuucuucagcagacugaacuggcugacccaccugaacuacaccuaccccgcccugaacgugaccaugcccaacaacgagcaguucgacaagcuguacaucuggggcgugcaccaccccggcaccgacaaggaccagaucuuccuguacgcccagagcagcggcagaaucaccgugagcaccaagagaagccagcaggccgugauccccaacaucggcagcagacccagaaucagagacauccccagcagaaucagcaucuacuggaccaucgugaagcccggcgacauccugcugaucaacagcaccggcaaccugaucgcccccagaggcuacuucaagaucagaagcggcaagagcagcaucaugagaagcgacgcccccaucggcaagugcaagagcgagugcaucacccccaacggcagcauccccaacgacaagcccuuccagaacgugaacagaaucaccuacggcgccugccccagauacgugaagcacagcacccugaagcuggccaccggcaugagaaacgugcccgagaagcagaccagaggcaucuucggcgccaucgccggcuucaucgagaacggcugggagggcaugguggacggcugguacggcuucagacaccagaacagcgagggcagaggccaggccgccgaccugaagagcacccaggccgccaucgaccagaucaacggcaagcugaacagacugaucggcaagaccaacgagaaguuccaccagaucgagaaggaguucagcgagguggagggcagaauccaggaccuggagaaguacguggaggacaccaagaucgaccuguggagcuacaacgccgagcugcugguggcccuggagaaccagcacaccaucgaccugaccgacagcgagaugaacaagcuguucgagaagaccaagaagcagcugagagagaacgccgaggacaugggcaacggcugcuucaagaucuaccacaagugcgacaacgccugcaucggcagcaucagaaacggcaccuacgaccacaacguguacagagacgaggcccugaacaacagauuccagaucaagggcguggagcugaagagcggcuacaaggacuggauccuguggaucagcuucgccaucagcugcuuccugcugugcguggcccugcugggcuucaucaugugggccugccagaagggcaacaucagaugcaacaucugcaucuga

SEQ ID NO: 173544 - RNA, 1701 nt, Artificial Sequence; identical to SEQ ID NO: 172501
  derived and/or modified CDS sequence (opt4) from hemagglutinin__InfluenzaA__ALE31998

SEQ ID NO: 173545 - RNA, 1701 nt, Artificial Sequence
  derived and/or modified CDS sequence (opt4) from hemagglutinin__InfluenzaA__ALE31999
augaagaccaucaucgcccugagcuacauccugugccugguguucgcccagaagauccccggcaacgacaacagcaccgccacccugugccugggccaccacgccgugcccaacggcaccaucgugaagaccaucaccaacgacagaaucgaggugaccaacgccaccgagcuggugcagaacagcagcaucggcgagaucugcgacagcccccaccagauccuggacggcgagaacugcacccugaucgacgcccugcugggcgacccccagugcgacggcuuccagaacaagaagugggaccuguucguggagagaagcaaggccuacagcaacugcuaccccuacgacgugcccgacuacgccagccugagaagccugguggccagcagcggcacccuggaguucaacaacgagagcuucaacuggaccggcgugacccagaacggcaccagcagcgccugcaucagaagaagcagcagcagcuucuucagcagacugaacuggcugacccaccugcacuacaccuaccccgcccugaacgugaccaugcccaacaacgagcaguucgacaagcuguacaucuggggcgugcaccaccccggcaccgacaaggaccagaucuuccuguacgcccagagcagcggcagaaucaccgugagcaccaagagaagccagcaggccgugauccccaacaucggcagcagacccagaaucagagacauccccagcagaaucagcaucuacuggaccaucgugaagcccggcgacauccugcugaucaacagcaccggcaaccugaucgcccccagaggcuacuucaagaucagaagcggcaagagcagcaucaugagaagcgacgcccccaucggcaagugcaagagcgagugcaucacccccaacggcagcauccccaacgacaagcccuuccagaacgugaacagaaucaccuacggcgccugccccagauacgugaagcacagcacccugaagcuggccaccggcaugagaaacgugcccgagaagcagaccagaggcaucuucggcgccaucgccggcuucaucgagaacggcugggagggcaugguggacggcugguacggcuucagacaccagaacagcgagggcagaggccaggccgccgaccugaagagcacccaggccgccaucgaccagaucaacggcaagcugaacagacugaucggcaagaccaacgagaaguuccaccagaucgagaaggaguucagcgagguggagggcagaauccaggaccuggagaaguacguggaggacaccaagaucgaccuguggagcuacaacgccgagcugcugguggcccuggagaaccagcacaccaucgaccugaccgacagcgagaugaacaagcuguucgagaagaccaagaagcagcugagagagaacgccgaggacaugggcaacggcugcuucaagaucuaccacaagugcgacaacgccugcaucggcagcaucagaaacggcaccuacgaccacaacguguacagagacgaggcccugaacaacagauuccagaucaagggcguggagcugaagagcggcuacaaggacuggauccuguggaucagcuucgccaucagcugcuuccugcugugcguggcccugcugggcuucaucaugugggccugccagaagggcaacaucagaugcaacaucugcaucuga

SEQ ID NO: 173546 - RNA, 1701 nt, Artificial Sequence
  derived and/or modified CDS sequence (opt4) from hemagglutinin__InfluenzaA__ALE32000
augaagaccaucaucgcccugagccacauccugugccugguguucgcccagaagcugcccgagaacgacaacagcaccgccacccugugccugggccaccacgccgugcccaacggcaccaucgugaagaccaucaccagcgacagaaucgaggugaccaacgccaccgagcuggugcagaacagcagcaucggcgagaucugcgacagcccccaccagauccuggacggcaagaacugcacccugaucgacgcccugcugggcgacccccagugcgacggcuuccagaacaagaagugggaccuguucguggagagaagcaaggccuacagcaacugcuaccccuacgacgugcccgacuacgccagccugagaagccugguggccagcagcggcacccuggaguucaacgacgagagcuucaacugggccggcgugacccagaacggcaccagcagcgccugcaucagaggcagcaacagcagcuucuucagcagacugaacuggcugacccacagcaacuucaaguaccccgcccugaacgugaccaugcccaacaacgagcaguucgacaagcuguacaucuggggcgugcaccaccccggcaccgacaaggaccagaucuuccuguacgcccagagcagcggcagaaucaccgugagcaccaagagaagccagcaggccgugauccccaacaucggcagcagacccagaaucagaaacauccccagcagaaucagcaucuacuggaccaucgugaagcccggcgacauccugcugaucaacagcaccggcaaccugaucgcccccagaggcuacuucaagaucagaagcggcaagagcagcaucaugagaagcgacgcccccaucggcaagugcaagagcgagugcaucacccccaacggcagcauccccaacgacaagcccuuccagaacgugaacagaaucaccuacggcgccugccccagauacgugaagcagagcacccugaagcuggccaccggcaugagaaacgugcccgagaagcagaccagaggcaucuucggcgccaucgccggcuucaucgagaacggcugggagggcaugaaggacggcugguacggcuucagacaccagaacagcgagggcagaggccaggccgccgaccugaagagcacccaggccgccaucgaccagaucaacggcaagcugaacagacugaucggcaagaccaacgagaaguuccaccagaucgagaaggaguucagcgagguggagggcagaauccaggaccuggagaaguacguggaggacaccaagaucgaccuguggagcuacaacgccgagcugcugguggcccuggagaaccagcacaccaucgaccugaccgacagcgagaugaacaagcuguucgagaagaccaagaagcagcugagagagaacgccgaggacaugggcaacggcugcuucaagaucuaccacaagugcgacaacgccugcaucggcagcaucagaaacggcaccuacgaccacgacguguacagagacgaggcccugaacaacagauuccagaucaagggcguggagcugaagagcggcuacaaggacuggauccuguggaucagcuucgccaucagcugcuuccugcugugcguggcccugcugggcuucaucaugugggccugccagaagggcaacaucagaugcaacaucugcaucuga

SEQ ID NO: 173547 - RNA, 1701 nt, Artificial Sequence; identical to SEQ ID NO: 172501
  derived and/or modified CDS sequence (opt4) from hemagglutinin__InfluenzaA__ALE32001

SEQ ID NO: 173548 - RNA, 1701 nt, Artificial Sequence; identical to SEQ ID NO: 172501
  derived and/or modified CDS sequence (opt4) from hemagglutinin__InfluenzaA__ALE32002

SEQ ID NO: 173549 - RNA, 1701 nt, Artificial Sequence; identical to SEQ ID NO: 172601
  derived and/or modified CDS sequence (opt4) from hemagglutinin__InfluenzaA__ALE32003

SEQ ID NO: 173550 - RNA, 1701 nt, Artificial Sequence; identical to SEQ ID NO: 172501
  derived and/or modified CDS sequence (opt4) from hemagglutinin__InfluenzaA__ALE32004

SEQ ID NO: 173551 - RNA, 1701 nt, Artificial Sequence; identical to SEQ ID NO: 172501
  derived and/or modified CDS sequence (opt4) from hemagglutinin__InfluenzaA__ALE32005

SEQ ID NO: 173552 - RNA, 1701 nt, Artificial Sequence; identical to SEQ ID NO: 173045
  derived and/or modified CDS sequence (opt4) from hemagglutinin__InfluenzaA__ALE32006

SEQ ID NO: 173553 - RNA, 1701 nt, Artificial Sequence; identical to SEQ ID NO: 172501
  derived and/or modified CDS sequence (opt4) from hemagglutinin__InfluenzaA__ALE32007

SEQ ID NO: 173554 - RNA, 1701 nt, Artificial Sequence; identical to SEQ ID NO: 173052
  derived and/or modified CDS sequence (opt4) from hemagglutinin__InfluenzaA__ALE32008

SEQ ID NO: 173555 - RNA, 1701 nt, Artificial Sequence
  derived and/or modified CDS sequence (opt4) from hemagglutinin__InfluenzaA__ALE32009
augaagaccaucaucgcccugagcuacauccugugccugguguucgcccagaagcugcccgagaacgacaacagcaccgccacccugugccugggccaccacgccgugcccaacggcaccaucgugaagaccaucaccagcgacagaaucgaggugaccaacgccaccgagcuggugcagaacagcagcaucggcgagaucugcgacagcccccaccagauccuggacggcaagaacugcacccugaucgacgcccugcugggcgacccccagugcgacggcuuccagaacaagaagugggaccuguucguggagagaagcaaggccuacagcaacugcuaccccuacgacgugcccgacuacgccagccugagaagccugguggccagcagcggcacccuggaguucaacgacgagagcuucaacugggccggcgugacccagaacggcaccagcagcgccugcaucagaggcagcaacagcagcuucuucagcagacugaacuggcugacccacagcaacuucaaguaccccgcccugaacgugaccaugcccaacaacgagcaguucgacaagcuguacaucuggggcgugcaccaccccggcaccgacaaggaccagaucuuccuguacgcccagagcagcggcagaaucaccgugagcaccaagagaagccagcaggccgugauccccaacaucggcagcagacccagaaucagaaacauccccagcagaaucagcaucuacuggaccaucgugaagcccggcgacauccugcugaucaacagcaccggcaaccugaucgcccccagaggcuacuucaagaucagaagcggcaagagcagcaucaugagaagcgacgcccccaucggcaagugcaagagcgagugcaucacccccaacggcagcauccccaacgacaagcccuuccagaacgugaacagaaucaccuacggcgccugccccagauacgugaagcagagcacccugaagcuggccaccggcaugagaaacgugcccgagaagcagaccagaggcaucuucggcgccaucgccggcuucaucgagaacggcugggagggcaugaaggacggcugguacggcuucagacaccagaacagcgagggcagaggccaggccgccgaccugaagagcacccaggccgccaucgaccagaucaacggcaagcugaacagacugaucggcaagaccaacgagaaguuccaccagaucgagaaggaguucagcgagguggagggcagaauccaggaccuggagaaguacguggaggacaccaagaucgaccuguggagcuacaacgccgagcugcugguggcccuggagaaccagcacaccaucgugcugaccgacagcgagaugaacaagcuguucgagaagaccaagaagcagcugagagagaacgccgaggacaugggcaacggcugcuucaagaucuaccacaagugcgacaacgccugcaucggcagcaucagaaacggcaccuacgaccacgacguguacagagacgaggcccugaacaacagauuccagaucaagggcguggagcugaagagcggcuacaaggacuggauccuguggaucagcuucgccaucagcugcuuccugcugugcguggcccugcugggcuucaucaugugggccugccaggagggcaacaucagaugcaacaucugcaucuga

SEQ ID NO: 173556 - RNA, 1701 nt, Artificial Sequence
  derived and/or modified CDS sequence (opt4) from hemagglutinin__InfluenzaA__ALE32010
augaagaccaucaucgcccugagcuacauccugugccuggccuucgcccagaagauccccggcaacgacaacagcaccgccacccugugccugggccaccacgccgugcccaacggcaccaucgugaagaccaucaccaacgacagaaucgaggugaccaacgccaccgagcuggugcagaacagcagcaucggcgagaucugcgacagcccccaccagauccuggacggcgagaacugcacccugaucgacgcccugcugggcgacccccagugcgacggcuuccagaacaagaagugggaccuguucguggagagaagcaaggccuacagcaacugcuaccccuacgacgugcccgacuacgccagccugagaagccugguggccagcagcggcacccuggaguucaacaacgagagcuucaacuggaccggcgugacccagaacggcaccagcagcgccugcaucagaagaagcagcagcagcuucuucagcagacugaacuggcugacccaccugcacuacaccuaccccgcccugaacgugaccaugcccaacaacgagcaguucgacaagcuguacaucuggggcgugcaccaccccggcaccgacaaggaccagaucuuccuguacgcccagagcagcggcagaaucaccgugagcaccaagagaagccagcaggccgugauccccaacaucggcagcagacccagaaucagagacauccccagcagaaucagcaucuacuggaccaucgugaagcccggcgacauccugcugaucaacagcaccggcaaccugaucgcccccagaggcuacuucaagaucagaagcggcaagagcagcaucaugagaagcgacgcccccaucggcaagugcaagagcgagugcaucacccccaacggcagcauccccaacgacaagcccuuccagaacgugaacagaaucaccuacggcgccugccccagauacgugaagcacagcacccugaagcuggccaccggcaugagaaacgugcccgagaagcagaccagaggcaucuucggcgccaucgccggcuucaucgagaacggcugggagggcaugguggacggcugguacggcuucagacaccagaacagcgagggcagaggccaggccgccgaccugaagagcacccaggccgccaucgaccagaucaacggcaagcugaacagacugaucggcaagaccaacgagaaguuccaccagaucgagaaggaguucagcgagguggagggcagaauccaggaccuggagaaguacguggaggacaccaagaucgaccuguggagcuacaacgccgagcugcugguggcccuggagaaccagcacaccaucgaccugaccgacagcgagaugaacaagcuguucgagaagaccaagaagcagcugagagagaacgccgaggacaugggcaacggcugcuucaagaucuaccacaagugcgacaacgccugcaucggcagcaucagaaacggcaccuacgaccacaacguguacagagacgaggcccugaacaacagauuccagaucaagggcguggagcugaagagcggcuacaaggacuggauccuguggaucagcuucgccaucagcugcuuccugcugugcguggcccugcugggcuucaucaugugggccugccagaagggcaacaucagaugcaacaucugcaucuga

SEQ ID NO: 173557 - RNA, 1701 nt, Artificial Sequence; identical to SEQ ID NO: 173515
  derived and/or modified CDS sequence (opt4) from hemagglutinin__InfluenzaA__ALE32011

SEQ ID NO: 173558 - RNA, 1701 nt, Artificial Sequence; identical to SEQ ID NO: 173058
  derived and/or modified CDS sequence (opt4) from hemagglutinin__InfluenzaA__ALE32012

SEQ ID NO: 173559 - RNA, 1701 nt, Artificial Sequence; identical to SEQ ID NO: 172501
  derived and/or modified CDS sequence (opt4) from hemagglutinin__InfluenzaA__ALE32013

SEQ ID NO: 173560 - RNA, 1701 nt, Artificial Sequence
  derived and/or modified CDS sequence (opt4) from hemagglutinin__InfluenzaA__ALE32014
augaagaccaucaucgcccugagcuacauccugugccugguguucgcccagaagauccccggcaacgacaacagcaccgccacccugugccugggccaccacgccgugcccaacggcaccaucgugaagaccaucaccaacgacagaaucgaggugaccaacgccaccgagcuggugcagaacagcagcaucggcgagaucugcgacagcccccaccagauccuggacggcgagaacugcacccugaucgacgcccugcugggcgacccccagugcgacggcuuccagaacaagaagugggaccuguucguggagagaagcaaggccuacagcaacugcuaccccuacgacgugcccgacuacgccagccugagaagccugguggccagcagcggcacccuggaguucaacaacgagagcuucaacuggaccggcgugacccagaacggcaccagcagcgccugcaucagaaagagcagcagcagcuucuucagcagacugaacuggcugacccagcugaacuacaccuaccccgcccugaacgugaccaugcccaacaacgagcaguucgacaagcuguacaucuggggcgugcaccaccccggcaccgacaaggaccagaucuuccuguacgcccagagcagcggcagaaucaccgugagcaccaagagaagccagcaggccgugauccccaacaucggcagcagacccagaaucagagacauccccagcagaaucagcaucuacuggaccaucgugaagcccggcgacauccugcugaucaacagcaccggcaaccugaucgcccccagaggcuacuucaagaucagaagcggcaagagcagcaucaugagaagcgacgcccccaucggcaagugcaagagcgagugcaucacccccaacggcagcauccccaacgacaagcccuuccagaacgugaacagaaucaccuacggcgccugccccagauacgugaagcacagcacccugaagcuggccaccggcaugagaaacgugcccgagaagcagaccagaggcaucuucggcgccaucgccggcuucaucgagaacggcugggagggcaugguggacggcugguacggcuucagacaccagaacagcgagggcagaggccaggccgccgaccugaagagcacccaggccgccaucgaccagaucaacggcaagcugaacagacugaucggcaagaccaacgagaaguuccaccagaucgagaaggaguucagcgagguggagggcagaauccaggaccuggagaaguacguggaggacaccaagaucgaccuguggagcuacaacgccgagcugcugguggcccuggagaaccagcacaccaucgaccugaccgacagcgagaugaacaagcuguucgagaagaccaagaagcagcugagagagaacgccgaggacaugggcaacggcugcuucaagaucuaccacaagugcgacaacgccugcaucggcagcaucagaaacggcaccuacgaccacaacguguacagagacgaggcccugaacaacagauuccagaucaagggcguggagcugaagagcggcuacaaggacuggauccuguggaucagcuucgccaucagcugcuuccugcugugcguggcccugcugggcuucaucaugugggccugccagaagggcaacaucagaugcaacaucugcaucuga

SEQ ID NO: 173561 - RNA, 1701 nt, Artificial Sequence; identical to SEQ ID NO: 173386
  derived and/or modified CDS sequence (opt4) from hemagglutinin__InfluenzaA__ALE32015

SEQ ID NO: 173562 - RNA, 1701 nt, Artificial Sequence; identical to SEQ ID NO: 172501
  derived and/or modified CDS sequence (opt4) from hemagglutinin__InfluenzaA__ALE32016

SEQ ID NO: 173563 - RNA, 1701 nt, Artificial Sequence; identical to SEQ ID NO: 172501
  derived and/or modified CDS sequence (opt4) from hemagglutinin__InfluenzaA__ALE32017

SEQ ID NO: 173564 - RNA, 1701 nt, Artificial Sequence; identical to SEQ ID NO: 172501
  derived and/or modified CDS sequence (opt4) from hemagglutinin__InfluenzaA__ALE32018

SEQ ID NO: 173565 - RNA, 1701 nt, Artificial Sequence; identical to SEQ ID NO: 173045
  derived and/or modified CDS sequence (opt4) from hemagglutinin__InfluenzaA__ALE32020

SEQ ID NO: 173566 - RNA, 1701 nt, Artificial Sequence; identical to SEQ ID NO: 173152
  derived and/or modified CDS sequence (opt4) from hemagglutinin__InfluenzaA__ALE32021

SEQ ID NO: 173567 - RNA, 1701 nt, Artificial Sequence; identical to SEQ ID NO: 173232
  derived and/or modified CDS sequence (opt4) from hemagglutinin__InfluenzaA__ALE32022

SEQ ID NO: 173568 - RNA, 1701 nt, Artificial Sequence; identical to SEQ ID NO: 172501
  derived and/or modified CDS sequence (opt4) from hemagglutinin__InfluenzaA__ALE32023

SEQ ID NO: 173569 - RNA, 1701 nt, Artificial Sequence
  derived and/or modified CDS sequence (opt4) from hemagglutinin__InfluenzaA__ALE32024
augaagaccaucaucgcccugagcuacauccugugccugguguucgcccagaagcugcccggcaacgacaacagcaccgccacccugugccugggccaccacgccgugcccaacggcaccaucgugaagaccaucaccaacgacagaaucgaggugaccaacgccaccgagcuggugcagaacagcagcaucggcgagaucugcgacagcccccaccagauccuggacggcaagaacugcacccugaucgacgcccugcugggcgacccccagugcgacggcuuccagaacaagagaugggaccuguucguggagagaagcaaggccuacagcaacugcuaccccuacgacgugcccgacuacgccagccugagaagccugguggccagcagcggcacccuggaguucaacgacgagagcuucaacugggccggcgugacccagaacggcaagagcagcgccugcaucagaggcagcaacagcagcuucuucagcagacugaacuggcugacccacagcaacuucaaguaccccgcccugaacgugaccaugcccaacaacgagcaguucgacaagcuguacaucuggggcgugcaccaccccggcaccgacaaggaccagaucuuccuguacgcccacagcagcggcagaaucaccgugagcaccaagagaagccagcaggccgugauccccaacaucggcagcagacccagaaucagaaacauccccagcagaaucagcaucuacuggaccaucgugaagcccggcgacauccugcugaucaacagcaccggcaaccugaucgcccccagaggcuacuucaagauccagagcggcaagagcagcaucaugagaagcgacgcccccaucggcaagugcaagagcgagugcaucacccccaacggcagcauccccaacgacaagcccuuccagaacgugaacagaaucaccuacggcaccugccccagauacgugaagcagagcacccugaagcuggccaccggcaugagaaacgugcccgagaagcagaccagaggcaucuucggcgccaucgccggcuucaucgagaacggcugggagggcaugaaggacggcugguacggcuucagacaccagaacagcgagggcagaggccaggccgccgaccugaagagcacccaggccgccaucgaccagaucaacggcaagcugaacagacugaucggcaagaccaacgagaaguuccaccagaucgagaaggaguucagcgagguggagggcagaauccaggaccuggagaaguacguggaggacaccaagaucgaccuguggagcuacaacgccgagcugcugguggcccuggagaaccagcacaccaucgaccugaccgacagcgagaugaacaagcuguucgagaagaccaagaagcagcugagagagaacgccgaggacaugggcaacggcugcuucaagaucuaccacaagugcgacaacgccugcaucggcagcaucagaaacggcaccuacgaccacuacguguacagagacgaggcccugaacaacagauuccagaucaagggcguggagcugaagagcggcuacaaggacuggauccuguggaucagcuucgccaucagcugcuuccugcugugcguggcccugcugggcuucaucaugugggccugccagaagggcaacaucagaugcaacaucugcaucuga

SEQ ID NO: 173570 - RNA, 1701 nt, Artificial Sequence
  derived and/or modified CDS sequence (opt4) from hemagglutinin__InfluenzaA__ALE32025
augaagaccaucaucgcccugagcuacauccugugccugguguucgcccagaagauccccggcaacgacaacagcaccgccacccugugccugggccaccacgccgugcccaacggcaccaucgugaagaccaucaccaacgacagaaucgaggugaccaacgccaccgagcuggugcagaacagcagcaucggcgagaucugcgacagcccccaccagauccuggacggcgagaacugcacccugaucgacgcccugcugggcgacccccagugcgacggcuuccagaacaagaagugggaccuguucguggagagaagcaaggccuacagcaacugcuaccccuacgacgugcccgacuacgccagccugagaagccugguggccagcagcggcacccuggaguucaacaacgagagcuucaacuggaccggcgugacccagaacggcaccagcagcgccugcaucagaaagagcagcagcagcuucuucagcagacugaacuggcugacccaccugaacuacaccuaccccgcccugaacgugaccaugcccaacaacgagcaguucgacaagcuguacaucuggggcgugcaccaccccggcaccgacaaggaccagaucuuccuguacgccagaagcagcggcagaaucaccgugagcaccaagagaagccagcaggccgugauccccaacaucggcagcagacccagaaucagagacauccccagcagaaucagcaucuacuggaccaucgugaagagcggcgacauccugcugaucaacagcaccggcaaccugaucgcccccagaggcuacuucaagaucagaagcggcaagagcagcaucaugagaagcgacgcccccaucggcaagugcaagagcgagugcaucacccccaacggcagcauccccaacgacaagcccuuccagaacgugaacagaaucaccuacggcgccugccccagauacgugaagcacagcacccugaagcuggccaccggcaugagaaacgugcccgagaagcagaccagaggcaucuucggcgccaucgccggcuucaucgagaacggcugggagggcaugguggacggcugguacggcuucagacaccagaacagcgagggcagaggccaggccgccgaccugaagagcacccaggccgccaucgaccagaucaacggcaagcugaacagacugaucggcaagaccaacgagaaguuccaccagaucgagaaggaguucagcgagguggagggcagaauccaggaccuggagaaguacguggaggacaccaagaucgaccuguggagcuacaacgccgagcugcugguggcccuggagaaccagcacaccaucgaccugaccgacagcgagaugagcaagcuguucgagaagaccaagaagcagcugagagagaacgccgaggacaugggcaacggcugcuucaagaucuaccacaagugcgacaacgccugcaucggcagcaucagaaacggcaccuacgaccacaacguguacagagacgaggcccugaacaacagauuccagaucaagggcguggagcugaagagcggcuacaaggacuggauccuguggaucagcuucgccaucagcugcuuccugcugugcguggcccugcugggcuucaucaugugggccugccagaagggcaacaucagaugcaacaucugcaucuga

SEQ ID NO: 173571 - RNA, 1701 nt, Artificial Sequence; identical to SEQ ID NO: 172501
  derived and/or modified CDS sequence (opt4) from hemagglutinin__InfluenzaA__ALE32026

SEQ ID NO: 173572 - RNA, 1701 nt, Artificial Sequence; identical to SEQ ID NO: 173045
  derived and/or modified CDS sequence (opt4) from hemagglutinin__InfluenzaA__ALE32027

SEQ ID NO: 173573 - RNA, 1701 nt, Artificial Sequence
  derived and/or modified CDS sequence (opt4) from hemagglutinin__InfluenzaA__ALE32028
augaagaccaucaucgcccugagccacauccugugccugguguucgcccagaagauccccggcaacgacaacagcaccgccacccugugccugggccaccacgccgugcccaacggcaccaucgugaagaccaucaccaacgacagaaucgaggugaccaacgccaccgagcuggugcagaacagcagcaucggcgagaucugcgacagcccccaccagauccuggacggcgagaacugcacccugaucgacgcccugcugggcgacccccagugcgacggcuuccagaacaagaagugggaccuguucguggagagaagcaaggccuacagcaacugcuaccccuacgacgugcccgacuacgccagccugagaagccugguggccagcagcggcacccuggaguucaacaacgagagcuucaacuggaccggcgugacccagaacggcaccagcagcgccugcaucagaagaagcagcagcagcuucuucagcagacugaacuggcugacccaccugaacuacaccuaccccgcccugaacgugaccaugcccaacaacgagcaguucgacaagcuguacaucuggggcgugcaccaccccggcaccgacaaggaccagaucuuccuguacgcccagagcagcggcagaaucaccgugagcaccaagagaagccagcaggccgugauccccaacaucggcagcagacccagaaucagagacauccccagcagaaucagcaucuacuggaccaucgugaagcccggcgacauccugcugaucaacagcaccggcaaccugaucgcccccagaggcuacuucaagaucagaagcggcaagagcagcaucaugagaagcgacgcccccaucggcaagugcaagagcgagugcaucacccccaacggcagcauccccaacgacaagcccuuccagaacgugaacagaaucaccuacggcgccugccccagauacgugaagcacagcacccugaagcuggccaccggcaugagaaacgugcccgagaagcagaccagaggcaucuucggcgccaucgccggcuucaucgagaacggcugggagggcaugauggacggcugguacggcuucagacaccagaacagcgagggcagaggccaggccgccgaccugaagagcacccaggccgccaucgaccagaucaacggcaagcugaacagacugaucggcaagaccaacgagaaguuccaccagaucgagaaggaguucagcgagguggagggcagaauccaggaccuggagaaguacguggaggacaccaagaucgaccuguggagcuacaacgccgagcugcugguggcccuggagaaccagcacaccaucgaccugaccgacagcgagaugaacaagcuguucgagaagaccaagaagcagcugagagagaacgccgaggacaugggcaacggcugcuucaagaucuaccacaagugcgacaacgccugcaucggcagcaucagaaacggcaccuacgaccacaacguguacagagacgaggcccugaacaacagauuccagaucaagggcguggagcugaagagcggcuacaaggacuggauccuguggaucagcuucgccaucagcugcuuccugcugugcguggcccugcugggcuucaucaugugggccugccagaagggcaacaucagaugcaacaucugcaucuga

SEQ ID NO: 173574 - RNA, 1701 nt, Artificial Sequence; identical to SEQ ID NO: 173152
  derived and/or modified CDS sequence (opt4) from hemagglutinin__InfluenzaA__ALE32029

SEQ ID NO: 173575 - RNA, 1701 nt, Artificial Sequence
  derived and/or modified CDS sequence (opt4) from hemagglutinin__InfluenzaA__ALE32030
augaagaccaucaucgcccugagccacauccugugccugguguucgcccagaagauccccggcaacgacaacagcaccgccacccugugccugggccaccacgccgugcccaacggcaccaucgugaagaccaucaccaacgacagaaucgaggugaccaacgccaccgagcuggugcagaacagcagcaucggcgagaucugcgacagcccccaccagauccuggacggcgagaacugcacccugaucgacgcccugcugggcgacccccagugcgacggcuuccagaacaagaagugggaccuguucguggagagaagcaaggccuacagcaacugcuaccccuacgacgugcccgacuacgccagccugagaagccugguggccagcagcggcacccuggaguucaacaacgagagcuucaacuggaccggcgugacccagaacggcaccagcagcgccugcaucagaagaagcagcagcagcuucuucagcagacugaacuggcugacccaccugaacuacaucuaccccgcccugaacgugaccaugcccaacaacgagcaguucgacaagcuguacaucuggggcgugcaccaccccggcaccgacaaggaccagaucuuccuguacgcccagagcagcggcagaaucaccgugagcaccaagagaagccagcaggccgugauccccaacaucggcagcagacccagaaucagagacauccccagcagaaucagcaucuacuggaccaucgugaagcccggcgacauccugcugaucaacagcaccggcaaccugaucgcccccagaggcuacuucaagaucagaagcggcaagagcagcaucaugagaagcgacgcccccaucggcaagugcaagagcgagugcaucacccccaacggcagcauccccaacgacaagcccuuccagaacgugaacagaaucaccuacggcgccugccccagauacgugaagcacagcacccugaagcuggccaccggcaugagaaacgugcccgagaagcagaccagaggcaucuucggcgccaucgccggcuucaucgagaacggcugggagggcaugauggacggcugguacggcuucagacaccagaacagcgagggcagaggccaggccgccgaccugaagagcacccaggccgccaucgaccagaucaacggcaagcugaacagacugaucggcaagaccaacgagaaguuccaccagaucgagaaggaguucagcgagguggagggcagaauccaggaccuggagaaguacguggaggacaccaagaucgaccuguggagcuacaacgccgagcugcugguggcccuggagaaccagcacaccaucgaccugaccgacagcgagaugaacaagcuguucgagaagaccaagaagcagcugagagagaacgccgaggacaugggcaacggcugcuucaagaucuaccacaagugcgacaacgccugcaucggcagcaucagaaacggcaccuacgaccacaacguguacagagacgaggcccugaacaacagauuccagaucaagggcguggagcugaagagcggcuacaaggacuggauccuguggaucagcuucgccaucagcugcuuccugcugugcguggcccugcugggcuucaucaugugggccugccagaagggcaacaucagaugcaacaucugcaucuga

SEQ ID NO: 173576 - RNA, 1701 nt, Artificial Sequence
  derived and/or modified CDS sequence (opt4) from hemagglutinin__InfluenzaA__ALE32031
augaagaccaucaucgcccugagcuacauccugugccugguguucgcccagaagauccccggcaacgacaacagcaccgccacccugugccugggccaccacgccgugcccaacggcaccaucgugaagaccaucaccaacgacagaaucgaggugaccaacgccaccgagcuggugcagaacagcagcaucggcgagaucugcgacagcccccaccagauccuggacggcgagaacugcacccugaucgacgcccugcugggcgacccccagugcgacggcuuccagaacaagaagugggaccuguucguggagagaagcaaggccuacagcaacugcuaccccuacgacgugcccgacuacgccagccugagaagccugguggccagcagcggcacccuggaguucaacaacgagagcuucaacuggaccggcgugacccagaacggcaccagcagcgccugcaucagaagaagcagcagcagcuucuucagcagacugaacuggcugacccaccugaacuacaccuaccccgcccugaacgugaccaugcccaacaacgagcaguucgacaagcuguacaucuggggcgugcaccaccccggcaccgacaaggaccagaucuuccuguacgcccagagcagcggcagaaucaccgugagcaccaagagaagccagcaggccgugauccccaacaucggcagcagacccagaaucagagacauccccagcagaaucagcaucuacuggaccaucgugaagcccggcgacauccugcugaucaacagcaccggcaaccugaucgcccccagaggcuacuucaagaucagaagcggcaagagcagcaucaugagaagcgacgcccccaucggcaagugcaagagcgagugcaucacccccaacggcagcauccccaacgacaagcccuuccagaacgugaacagaaucaccuacggcgccugccccagauacgugaagcacagcacccugaagcuggccaccggcaugagaaacgugcccgagaagcagaccagaggcaucuucggcgccaucgccggcuucaucgagaacggcugggagggcaugauggacggcugguacggcuucagacaccagaacagcgagggcagaggccaggccgccgaccugaagagcacccaggccgccaucgaccagaucaacggcaagcugaacagacugaucggcaagaccaacgagaaguuccaccagaucgagaaggaguucagcgagguggagggcagaauccaggaccuggagaaguacguggaggacaccaagaucgaccuguggagcuacaacgccgagcugcugguggcccuggagaaccagcacaccaucgaccugaccgacagcgagaugaacaagcuguucgagaagaccaagaagcagcugagagagaacgccgaggacaugggcaacggcugcuucaagaucuaccacaagugcgacaacgccugcaucggcagcaucagaaacggcaccuacgaccacaacguguacagagacgaggcccugaacaacagauuccagaucaagggcguggagcugaagagcggcuacaaggacuggauccuguggaucagcuucgccaucagcugcuuccugcugugcguggcccugcugggcuucaucaugugggccugccagaagggcaacaucagaugcaacaucugcaucuga

SEQ ID NO: 173577 - RNA, 1701 nt, Artificial Sequence
  derived and/or modified CDS sequence (opt4) from hemagglutinin__InfluenzaA__ALE32032
augaagaccaucaucgcccugagcuacauccugugccugguguucgcccagaagauccccggcaacgacaacagcaccgccacccugugccugggccaccacgccgugcccaacggcaccaucgugaagaccaucaccaacgacagaaucgaggugaccaacgccaccgagcuggugcagaacagcagcaucggcgagaucugcgacagcccccaccagauccuggacggcgagaacugcacccugaucgacgcccugcugggcgacccccagugcgacggcuuccagaacaagaagugggaccuguucguggagagaagcaaggccuacagcaacugcuaccccuacgacgugcccgacuacgccagccugagaagccugguggccagcagcggcacccuggaguucaacaacgagagcuucaacuggaccggcgugacccagaacggcaccagcagcgccugcaucagaagaagcagcagcagcuucuucagcagacugaacuggcugacccaccugaacuacaccuaccccgcccugaacgugaccaugcccaacaacgagcaguucgacaagcuguacaucuggggcgugcaccaccccggcaccgacaaggaccagaucuuccuguacgcccagagcagcggcagaaucgccgugagcaccaagagaagccagcaggccgugauccccaacaucggcagcagacccagaaucagagacauccccagcagaaucagcaucuacuggaccaucgugaagcccggcgacauccugcugaucaacagcaccggcaaccugaucgcccccagaggcuacuucaagaucagaagcggcaagagcagcaucaugagaagcgacgcccccaucggcaagugcaagagcgagugcaucacccccaacggcagcauccccaacgacaagcccuuccagaacgugaacagaaucaccuacggcgccugccccagauacgugaagcacagcacccugaagcuggccaccggcaugagaaacgugcccgagaagcagaccagaggcaucuucggcgccaucgccggcuucaucgagaacggcugggagggcaugauggacggcugguacggcuucagacaccagaacagcgagggcagaggccaggccgccgaccugaagagcacccaggccgccaucgaccagaucaacggcaagcugaacagacugaucggcaagaccaacgagaaguuccaccagaucgagaaggaguucagcgagguggagggcagaauccaggaccuggagaaguacguggaggacaccaagaucgaccuguggagcuacaacgccgagcugcugguggcccuggagaaccagcacaccaucgaccugaccgacagcgagaugaacaagcuguucgagaagaccaagaagcagcugagagagaacgccgaggacaugggcaacggcugcuucaagaucuaccacaagugcgacaacgccugcaucggcagcaucagaaacggcaccuacgaccacaacguguacagagacgaggcccugaacaacagauuccagaucaagggcguggagcugaagagcggcuacaaggacuggauccuguggaucagcuucgccaucagcugcuuccugcugugcguggcccugcugggcuucaucaugugggccugccagaagggcaacaucagaugcaacaucugcaucuga

SEQ ID NO: 173578 - RNA, 1701 nt, Artificial Sequence; identical to SEQ ID NO: 172501
  derived and/or modified CDS sequence (opt4) from hemagglutinin__InfluenzaA__ALE32033

SEQ ID NO: 173579 - RNA, 1701 nt, Artificial Sequence
  derived and/or modified CDS sequence (opt4) from hemagglutinin__InfluenzaA__ALE32034
augaagaccaucaucgcccugggcuacauccugugccugguguucgcccagaagauccccggcaacgacaacagcaccgccacccugugccugggccaccacgccgugcccaacggcaccaucgugaagaccaucaccaacgacagaaucgaggugaccaacgccaccgagcuggugcagaacagcagcaucggcgagaucugcgacagcccccacaagauccuggacggcgagaacugcacccugaucgacgcccugcugggcgacccccagugcgacggcuuccagaacaagaagugggaccuguucguggagagaagcaaggccuacagcaacugcuaccccuacgacgugcccgacuacgccagccugagaagccugguggccagcagcggcacccuggaguucaacaacgagagcuucaacuggaccggcgugacccagaacggcaccagcagcgccugcaucagaagaagcagcagcagcuucuucagcagacugaacuggcugacccaccugaaguacaccuaccccgcccugaacgugaccaugcccaacaacgagcaguucgacaagcuguacaucuggggcgugcaccaccccggcaccgacaaggaccagaucuuccuguacgcccagagcagcggcagaaucaccgugagcaccaagagaagccagcaggccgugauccccaacaucggcagcagacccagaaucagagacauccccagcagaaucagcaucuacuggaccaucgugaagcccggcgacauccugcugaucaacagcaccggcaaccugaucgcccccagaggcuacuucaagaucagaagcggcaagagcagcaucaugagaagcgacgcccccaucggcaagugcaagagcgagugcaucacccccaacggcagcauccccaacgacaagcccuuccagaacgugaacagaaucaccuacggcgccugccccagauacgugaagcacagcacccugaagcuggccaccggcaugagaaacgugcccgagaagcagaccagaggcaucuucggcgccaucgccggcuucaucgagaacggcugggagggcaugguggacggcugguacggcuucagacaccagaacagcgagggcagaggccaggccgccgaccugaagagcacccaggccgccaucgaccagaucaacggcaagcugaacagacugaucggcaagaccaacgagaaguuccaccagaucgagaaggaguucagcgagguggagggcagaauccaggaccuggagaaguacguggaggacaccaagaucgaccuguggagcuacaacgccgagcugcugguggcccuggagaaccagcacaccaucgaccugaccgacagcgagaugaacaagcuguucgagaagaccaagaagcagcugagagagaacgccgaggacaugggcaacggcugcuucaagaucuaccacaagugcgacaacgccugcaucggcagcaucagaaacggcaccuacgaccacaacguguacagagacgaggcccugaacaacagauuccagaucaagggcguggagcugaagagcggcuacaaggacuggauccuguggaucagcuucgccaucagcugcuuccugcugugcguggcccugcugggcuucaucaugugggccugccagaagggcaacaucagaugcaacaucugcaucuga

SEQ ID NO: 173580 - RNA, 1701 nt, Artificial Sequence; identical to SEQ ID NO: 173391
  derived and/or modified CDS sequence (opt4) from hemagglutinin__InfluenzaA__ALE32035

SEQ ID NO: 173581 - RNA, 1701 nt, Artificial Sequence
  derived and/or modified CDS sequence (opt4) from hemagglutinin__InfluenzaA__ALE32036
augaagaccaucaucgcccugggcuacauccugugccugguguucgcccagaagauccccggcaacgacaacagcaccgccacccugugccugggccaccacgccgugcccaacggcaccaucgugaagaccaucaccaacgacagaaucgaggugaccaacgccaccgagcuggugcagaacagcagcaucggcgagaucugcgacagcccccacaagauccuggacggcgagaacugcacccugaucgacgcccugcugggcgacccccagugcgacggcuuccagaacaagaagugggaccuguucguggagagaagcaaggccuacagcaacugcuaccccuacgacgugcccgacuacgccagccugagaagccugguggccagcagcggcacccuggaguucaacaacgagagcuucaacuggaccggcgugacccagaacggcaccagcagcgccugcaucagaagaagcagcagcagcuucuucagcagacugaacuggcugacccaccugcacuacaccuaccccgcccugaacgugaccaugcccaacaacgagcaguucgacaagcuguacaucuggggcgugcaccaccccggcaccgacaaggaccagaucuuccuguacgcccagagcagcggcagaaucaccgugagcaccaagagaagccagcaggccgugauccccaacaucggcagcagacccagaaucagagacauccccagcagaaucagcaucuacuggaccaucgugaagcccggcgacauccugcugaucaacagcaccggcaaccugaucgcccccagaggcuacuucaagaucagaagcggcaagagcagcaucaugagaagcgacgcccccaucggcaagugcaagagcgagugcaucacccccaacggcagcauccccaacgacaagcccuuccagaacgugaacagaaucaccuacggcgccugccccagauacgugaagcacagcacccugaagcuggccaccggcaugagaaacgugcccgagaagcagaccagaggcaucuucggcgccaucgccggcuucaucgagaacggcugggagggcaugguggacggcugguacggcuucagacaccagaacagcgagggcagaggccaggccgccgaccugaagagcacccaggccgccaucgaccagaucaacggcaagcugaacagacugaucggcaagaccaacgagaaguuccaccagaucgagaaggaguucagcgagguggagggcagaauccaggaccuggagaaguacguggaggacaccaagaucgaccuguggagcuacaacgccgagcugcugguggcccuggagaaccagcacaccaucgaccugaccgacagcgagaugaacaagcuguucgagaagaccaagaagcagcugagagagaacgccgaggacaugggcaacggcugcuucaagaucuaccacaagugcgacaacgccugcaucggcagcaucagaaacggcaccuacgaccacaacguguacagagacgaggcccugaacaacagauuccagaucaagggcguggagcugaagagcggcuacaaggacuggauccuguggaucagcuucgccaucagcugcuuccugcugugcguggcccugcugggcuucaucaugugggccugccagaagggcaacaucagaugcaacaucugcaucuga

SEQ ID NO: 173582 - RNA, 1701 nt, Artificial Sequence
  derived and/or modified CDS sequence (opt4) from hemagglutinin__InfluenzaA__ALE32037
augaagaccaucaucgcccugagcuacauccugugccugguguucgcccagaagauccccggcaacgacaacagcaccgccacccugugccugggccaccacgccgugcccaacggcaccaucgugaagaccaucaccaacgacagaaucgaggugaccaacgccaccgagcuggugcagaacagcagcaucggcgagaucugcgacagcccccaccagauccuggacggcgagaacugcacccugaucgacgcccugcugggcgacccccagugcgacggcuuccagaacaagaagugggaccuguucguggagagaagcaaggccuacagcaacugcuaccccuacgacgugcccgacuacgccagccugagaagccugguggccagcagcggcacccuggaguucaacaacgagagcuucaacuggaccggcgugacccagaacggcaccagcagcgccugcaucagaagaagcagcagcagcuucuucagcagacugaacuggcugacccaccugaacuacaaguaccccgcccugaacgugaccaugcccaacaacgagcaguucgacaagcuguacaucuggggcgugcaccaccccggcaccgacaaggaccagaucuuccuguacgcccagagcagcggcagaaucaccgugagcaccaagagaagccagcaggccgugauccccaacaucggcagcagacccagaaucagagacauccccagcagaaucagcaucuacuggaccaucgugaagcccggcgacauccugcugaucaacagcaccggcaaccugaucgcccccagaggcuacuucaagauccugagcggcaagagcagcaucaugagaagcgacgcccccaucggcaagugcaagagcgagugcaucacccccaacggcagcauccccaacgacaagcccuuccagaacgugaacagaaucaccuacggcgccugccccagauacgugaagcacagcacccugaagcuggccaccggcaugagaaacgugcccgagaagcagaccagaggcaucuucggcgccaucgccggcuucaucgagaacggcugggagggcaugguggacggcugguacggcuucagacaccagaacagcgagggcagaggccaggccgccgaccugaagagcacccaggccgccaucgaccagaucaacggcaagcugaacagacugaucggcaagaccaacgagaaguuccaccagaucgagaaggaguucagcgagguggagggcagaauccaggaccuggagaaguacguggaggacaccaagaucgaccuguggagcuacaacgccgagcugcugguggcccuggagaaccagcacaccaucgaccugaccgacagcgagaugaacaagcuguucgagaagaccaagaagcagcugagagagaacgccgaggacaugggcaacggcugcuucaagaucuaccacaagugcgacaacgccugcaucggcagcaucagaaacggcaccuacgaccacaacguguacagagacgaggcccugaacaacagauuccagaucaagggcguggagcugaagagcggcuacaaggacuggauccuguggaucagcuucgccaucagcugcuuccugcugugcguggcccugcugggcuucaucaugugggccugccagaagggcaacaucagaugcaacaucugcaucuga

SEQ ID NO: 173583 - RNA, 1701 nt, Artificial Sequence
  derived and/or modified CDS sequence (opt4) from hemagglutinin__InfluenzaA__ALE32038
augaagaccaucaucgcccugagcuacauccugugccugguguucgcccagaagauccccggcaacgacaacagcaccgccacccugugccugggccaccacgccgugcccaacggcaccaucgugaagaccaucaccaacgacagaaucgaggugaccaacgccaccgagcuggugcagaacagcagcaucggcgagaucugcgacagcccccaccagauccuggacggcgagaacugcacccugaucgacgcccugcugggcgacccccagugcgacggcuuccagaacaagaagugggaccuguucguggagagaagcaaggccuacagcaacugcuaccccuacgacgugcccgacuacgccagccugagaagccugguggccagcagcggcacccuggaguucaacaacgagagcuucaacuggaccggcgugacccagaacggcaccagcagcgccugcaucagaagaagcagcagcagcuucuucagcagacugaacuggcugacccaccugaacuacaccuaccccgcccugaacgugaccaugcccaacaacgagcaguucgacaagcuguacaucuggggcgugcaccaccccggcaccgacaaggaccagaucuuccuguacgcccagagcagcggcagaaucaccgugagcaccaagagaagccagcaggccgugauccccaacaucggcagcagacccagaaucagagacauccccagcagaaucagcaucuacuggaccaucgugaagcccggcgacauccugcugaucaacagcaagggcaaccugaucgcccccagaggcuacuucaagaucagaagcggcaagagcagcaucaugagaagcgacgcccccaucggcaagugcaagagcgagugcaucacccccaacggcagcauccccaacgacaagcccuuccagaacgugaacagaaucaccuacggcgccugccccagauacgugaagcacagcacccugaagcuggccaccggcaugagaaacgugcccgagaagcagaccagaggcaucuucggcgccaucgccggcuucaucgagaacggcugggagggcaugguggacggcugguacggcuucagacaccugaacagcgagggcagaggccaggccgccgaccugaagagcacccaggccgccaucgaccagaucaacggcaagcugaacagacugaucggcaagaccaacgagaaguuccaccagaucgagaaggaguucagcgagguggagggcagaauccaggaccuggagaaguacguggaggacaccaagaucgaccuguggagcuacaacgccgagcugcugguggcccuggagaaccagcacaccaucgaccugaccgacagcgagaugaacaagcuguucgagaagaccaagaagcagcugagagagaacgccgaggacaugggcaacggcugcuucaagaucuaccacaagugcgacaacgccugcaucggcagcaucagaaacggcaccuacgaccacaacguguacagagacgaggcccugaacaacagauuccagaucaagggcguggagcugaagagcggcuacaaggacuggauccuguggaucagcuucgccaucagcugcuuccugcugugcguggcccugcugggcuucaucaugugggccugccagaagggcaacaucagaugcaacaucugcaucuga

SEQ ID NO: 173584 - RNA, 1701 nt, Artificial Sequence; identical to SEQ ID NO: 173159
  derived and/or modified CDS sequence (opt4) from hemagglutinin__InfluenzaA__ALE32039

SEQ ID NO: 173585 - RNA, 1701 nt, Artificial Sequence
  derived and/or modified CDS sequence (opt4) from hemagglutinin__InfluenzaA__ALE32040
augaagaccaucaucgcccugagcuacauccugugccugguguucgcccagaagauccccggcaacgacaacagcaccgccacccugugccugggccaccacgccgugcccaacggcaccaucgugaagaccaucaccaacgacagaaucgaggugaccaacgccaccgagcuggugcagaacagcagcaucggcgagaucugcgacagcccccaccagauccuggacggcgagaacugcacccugaucgacgcccugcugggcgacccccagugcgacggcuuccagaacaagaagugggaccuguucguggagagaagcaaggccuacagcaacugcuaccccuacgacgugcccgacuacgccagccugagaagccugguggccagcagcggcacccuggaguucaacaacgagagcuucaacuggaccggcgugacccagaacggcaccagcagcgccugcaucagaagaagcagcagcagcuucuucagcagacugaacuggcugacccaccugaacuacaccuaccccgcccugaacgugaccaugcccaacaacgagcaguucgacaagcuguacaucuggggcgugcaccaccccggcaccgacaaggaccagaucuuccuguacgcccagagcagcggcagaaucaccgugagcaccaagagaagccagcaggccgugauccccaacaucggcagcagacccagaaucagagacauccccagcagaaucagcaucuacuggaccaucgugaagcccggcgacauccugcugaucaacagcaccggcaaccugaucgcccccagaggcuacuucaagaucagaagcggcaccagcagcaucaugagaagcgacgcccccaucggcaagugcaagagcgagugcaucacccccaacggcagcauccccaacgacaagcccuuccagaacgugaacagaaucaccuacggcgccugccccagauacgugaagcacagcacccugaagcuggccaccggcaugagaaacgugcccgagaagcagaccagaggcaucuucggcgccaucgccggcuucaucgagaacggcugggagggcaugguggacggcugguacggcuucagacaccagaacagcgagggcagaggccaggccgccgaccugaagagcacccaggccgccaucgaccagaucaacggcaagcugaacagacugaucggcaagaccaacgagaaguuccaccagaucgagaaggaguucagcgagguggagggcagaauccaggaccuggagaaguacguggaggacaccaagaucgaccuguggagcuacaacgccgagcugcugguggcccuggagaaccagcacaccaucgaccugaccgacagcgagaugaacaagcuguucgagaagaccaagaagcagcugagagagaacgccgaggacaugggcaacggcugcuucaagaucuaccacaagugcgacaacgccugcaucggcagcaucagaaacggcaccuacgaccacaacguguacagagacgaggcccugaacaacagauuccagaucaagggcguggagcugaagagcggcuacaaggacuggauccuguggaucagcuucgccaucagcugcuuccugcugugcguggcccugcugggcuucaucaugugggccugccagaagggcaacaucagaugcaacaucugcaucuga

SEQ ID NO: 173586 - RNA, 1701 nt, Artificial Sequence; identical to SEQ ID NO: 172501
  derived and/or modified CDS sequence (opt4) from hemagglutinin__InfluenzaA__ALE32041

SEQ ID NO: 173587 - RNA, 1701 nt, Artificial Sequence; identical to SEQ ID NO: 172501
  derived and/or modified CDS sequence (opt4) from hemagglutinin__InfluenzaA__ALE32042

SEQ ID NO: 173588 - RNA, 1701 nt, Artificial Sequence
  derived and/or modified CDS sequence (opt4) from hemagglutinin__InfluenzaA__ALE32043
augaagaccaucaucgcccugagcuacauccugugccugguguucgcccagaagauccccggcaacgacaacagcaccgccacccugugccugggccaccacgccgugcccaacggcaccaucgugaagaccaucaccaacgacagaaucgaggugaccaacgccaccgagcuggugcagaacagcagcaucggcgagaucugcgacagcccccaccagauccuggacggcgagaacugcacccugaucgacgcccugcugggcgacccccagugcgacggcuuccagaacaagaagugggaccuguucguggagagaagcaaggccuacagcaacugcuaccccuacgacgugcccgacuacaccagccugagaagccugguggccagcagcggcacccuggaguucaacaacgagagcuucaacuggaccggcgugacccagaacggcaccagcagcgccugcaucagaagaagcagcagcagcuucuucagcagacugaacuggcugacccaccugaacuacaccuaccccgcccugaacgugaccaugcccaacaacgagcaguucgacaagcuguacaucuggggcgugcaccaccccggcaccgacaaggaccagaucuuccuguacgcccagagcagcggcagaaucaccgugagcaccaagagaagccagcaggccgugauccccaacaucggcagcagacccagaaucagagacauccccagcagaaucagcaucuacuggaccaucgugaagcccggcgacauccugcugaucaacagcaccggcaaccugaucgcccccagaggcuacuucaagaucagaagcggcaagagcagcaucaugagaagcgacgcccccaucggcaagugcaagagcgagugcaucacccccaacggcagcauccccaacgacaagcccuuccagaacgugaacagaaucaccuacggcgccugccccagauacgugaagcacagcacccugaagcuggccaccggcaugagaaacgugcccgagaagcagaccagaggcaucuucggcgccaucgccggcuucaucgagaacggcugggagggcaugguggacggcugguacggcuucagacaccagaacagcgagggcagaggccaggccgccgaccugaagagcacccaggccgccaucgaccagaucaacggcaagcugaacagacugaucggcaagaccaacgagaaguuccaccagaucgagaaggaguucagcgagguggagggcagaauccaggaccuggagaaguacguggaggacaccaagaucgaccuguggagcuacaacgccgagcugcugguggcccuggagaaccagcacaccaucgaccugaccgacagcgagaugaacaagcuguucgagaagaccaagaagcagcugagagagaacgccgaggacaugggcaacggcugcuucaagaucuaccacaagugcgacaacgccugcaucggcagcaucagaaacggcaccuacgaccacaacguguacagagacgaggcccugaacaacagauuccagaucaagggcguggagcugaagagcggcuacaaggacuggauccuguggaucagcuucgccaucagcugcuuccugcugugcguggcccugcugggcuucaucaugugggccugccagaagggcaacaucagaugcaacaucugcaucuga

SEQ ID NO: 173589 - RNA, 1701 nt, Artificial Sequence; identical to SEQ ID NO: 172501
  derived and/or modified CDS sequence (opt4) from hemagglutinin__InfluenzaA__ALE32044

SEQ ID NO: 173590 - RNA, 1701 nt, Artificial Sequence; identical to SEQ ID NO: 172501
  derived and/or modified CDS sequence (opt4) from hemagglutinin__InfluenzaA__ALE32045

SEQ ID NO: 173591 - RNA, 1701 nt, Artificial Sequence; identical to SEQ ID NO: 172501
  derived and/or modified CDS sequence (opt4) from hemagglutinin__InfluenzaA__ALE32046

SEQ ID NO: 173592 - RNA, 1701 nt, Artificial Sequence
  derived and/or modified CDS sequence (opt4) from hemagglutinin__InfluenzaA__ALE32047
augaagaccaucaucgcccugagcuacauccugugccugguguucgcccagaagauccccggcaacgacaacagcaccgccacccugugccugggccaccacgccgugcccaacggcaccaucgugaagaccaucaccaacgacagaaucgaggugaccaacgccaccgagcuggugcagaacagcagcaucggcgagaucugcgacagcccccaccaggugcuggacggcgagaacugcacccugaucgacgcccugcugggcgacccccagugcgacggcuuccagaacaagaagugggaccuguucguggagagaagcaaggccuacagcaacugcuaccccuacgacgugcccgacuacgccagccugagaagccugguggccagcagcggcacccuggaguucaacaacgagagcuucaacuggaccggcgugacccagaacggcaccagcagcgccugcaucagaagaagcagcagcagcuucuucagcagacugaacuggcugacccaccugaacuacaccuaccccgcccugaacgugaccaugcccaacaacgagcaguucgacaagcuguacaucuggggcgugcaccaccccggcaccgacaaggaccagaucuuccuguacgcccagagcagcggcagaaucaccgugagcaccaagagaagccagcaggccgugauccccaacaucggcagcagacccagaaucagagacauccccagcagaaucagcaucuacuggaccaucgugaagcccggcgacauccugcugaucaacagcaccggcaaccugaucgcccccagaggcuacuucaagaucagaagcggcaagagcagcaucaugaucagcgacgcccccaucggcaagugcaagagcgagugcaucacccccaacggcagcauccccagcgacaagcccuuccagaacgugaacagaaucaccuacggcgccugccccagauacgugaagcacagcacccugaagcuggccaccggcaugagaaacgugcccgagaagcagaccagaggcaucuucggcgccaucgccggcuucaucgagaacggcugggagggcaugguggacggcugguacggcuucagacaccagaacagcgagggcagaggccaggccgccgaccugaagagcacccaggccgccaucgaccagaucaacggcaagcugaacagacugaucggcaagaccaacgagaaguuccaccagaucgagaaggaguucagcgagguggagggcagaauccaggaccuggagaaguacguggaggacaccaagaucgaccuguggagcuacaacgccgagcugcugguggcccuggagaaccagcacaccaucgaccugaccgacagcgagaugaacaagcuguucgagaagaccaagaagcagcugagagagaacgccgaggacaugggcaacggcugcuucaagaucuaccacaagugcgacaacgccugcaucggcagcaucagaaacggcaccuacgaccacaacguguacagagacgaggcccugaacaacagauuccagaucaagggcguggagcugaagagcggcuacaaggacuggauccuguggaucagcuucgccaucagcugcuuccugcugugcguggcccugcugggcuucaucaugugggccugccagaagggcaacaucagaugcaacaucugcaucuga

SEQ ID NO: 173593 - RNA, 1701 nt, Artificial Sequence; identical to SEQ ID NO: 172501
  derived and/or modified CDS sequence (opt4) from hemagglutinin__InfluenzaA__ALE32048

SEQ ID NO: 173594 - RNA, 1701 nt, Artificial Sequence; identical to SEQ ID NO: 173159
  derived and/or modified CDS sequence (opt4) from hemagglutinin__InfluenzaA__ALE32049

SEQ ID NO: 173595 - RNA, 1701 nt, Artificial Sequence
  derived and/or modified CDS sequence (opt4) from hemagglutinin__InfluenzaA__ALE32050
augaagaccaucaucgcccugagcuacauccugugccugguguucgcccagaagauccccggcaacgacaacagcaccgccacccugugccugggccaccacgccgugcccaacggcaccaucgugaagaccaucaccaacgacagaaucgaggugaccaacgccaccgagcuggugcagaacagcagcaucggcgagaucugcgacagcccccaccagauccuggacggcgagaacugcacccugaucgacgcccugcugggcgacccccagugcgacggcuuccagaacaagaagugggaccuguucguggagagaagcaaggccuacagcaacugcuaccccuacgacgugcccgacuacgccagccugagaagccugguggccagcagcggcacccuggaguucaacaacgagagcuucaacuggaccggcgugacccaggacggcaccagcagcgccugcaucagaagaagcagcagcagcuucuucagcagacugaacuggcugacccaccugaacuacaccuaccccgcccugaacgugaccaugcccaacaacgagcaguucgacaagcuguacaucuggggcgugcaccaccccggcaccgacaaggaccagaucuuccuguacgcccagagcagcggcagaaucaccgugagcaccaagagaagccagcaggccgugauccccaacaucggcagcagacccagaaucagagacauccccagcagaaucagcaucuacuggaccaucgugaagcccggcgacauccugcugaucaacagcaccggcaaccugaucgcccccagaggcuacuucaagaucagaagcggcaagagcagcaucaugagaagcgacgcccccaucggcaagugcaagagcgagugcaucacccccaacggcagcauccccaacgacaagcccuuccagaacgugaacagaaucaccuacggcgccugccccagauacgugaagcacagcacccugaagcuggccaccggcaugagaaacgugcccgagaagcagaccagaggcaucuucggcgccaucgccggcuucaucgagaacggcugggagggcaugguggacggcugguacggcuucagacaccagaacagcgagggcagaggccaggccgccgaccugaagagcacccaggccgccaucgaccagaucaacggcaagcugaacagacugaucggcaagaccaacgagaaguuccaccagaucgagaaggaguucagcgagguggagggcagaauccaggaccuggagaaguacguggaggacaccaagaucgaccuguggagcuacaacgccgagcugcugguggcccuggagaaccagcacaccaucgaccugaccgacagcgagaugaacaagcuguucgagaagaccaagaagcagcugagagagaacgccgaggacaugggcaacggcugcuucaagaucuaccacaagugcgacaacgccugcaucggcagcaucagaaacggcaccuacgaccacaacguguacagagacgaggcccugaacaacagauuccagaucaagggcguggagcugaagagcggcuacaaggacuggauccuguggaucagcuucgccaucagcugcuuccugcugugcguggcccugcugggcuucaucaugugggccugccagaagggcaacaucagaugcaacaucugcaucuga

SEQ ID NO: 173596 - RNA, 1701 nt, Artificial Sequence
  derived and/or modified CDS sequence (opt4) from hemagglutinin__InfluenzaA__ALE32051
augaagaccaucaucgcccugagcuacauccugugccugguguucgcccagaagauccccggcaacgacaacagcaccgccacccugugccugggccaccacgccgugcccaacggcaccaucgugaagaccaucaccaacgacagaaucgaggugaccaacgccaccgagcuggugcagaacagcagcaucggcgagaucugcgacagcccccaccagauccuggacggcgagaacugcacccugaucgacgcccugcugggcgacccccagugcgacggcuuccagaacaagaagugggaccuguucguggagagaagcaaggccuacagcaacugcuaccccuacgacgugcccgacuacgccagccugagaagccugguggccagcagcggcacccuggaguucaacaacgagagcuucaacuggaccggcgugacccagaacggcaccagcagcgccugcaucagaagaagcagcagcagcuucuucagcagacugaacuggcugacccaccugaacuacaccuaccccgcccugaacgugaccaugcccaacaacgagcaguucgacaagcuguacaucuggggcgugcaccaccccggcaccgacaaggaccagaucuuccuguacgcccagagcagcggcagaaucaccgugagcaccaagagaagccagcaggccgugauccccaacaucggcagcagacccagaaucagagacauccccagcagaaucagcaucuacuggaccaucgugaagcccggcgacauccugcugaucaacagcaccggcaaccugaucgcccccagaggcuacuucaagaucagaagcggcaagagcagcaucaugagaagcgacgcccccaucggcaagugcaagagcgagugcaucacccccaacggcagcauccccaacgacaagcccuuccagaacgugaacagagugaccuacggcgccugccccagauacgugaagcacagcacccugaagcuggccaccggcaugagaaacgugcccgagaagcagaccagaggcaucuucggcgccaucgccggcuucaucgagaacggcugggagggcaugguggacggcugguacggcuucagacaccagaacagcgagggcagaggccaggccgccgaccugaagagcacccaggccgccaucgaccagaucaacggcaagcugaacagacugaucggcaagaccaacgagaaguuccaccagaucgagaaggaguucagcgagguggagggcagaauccaggaccuggagaaguacguggaggacaccaagaucgaccuguggagcuacaacgccgagcugcugguggcccuggagaaccagcacaccaucgaccugaccgacagcgagaugaacaagcuguucgagaagaccaagaagcagcugagagagaacgccgaggacaugggcaacggcugcuucaagaucuaccacaagugcgacaacgccugcaucggcagcaucagaaacggcaccuacgaccacaacguguacagagacgaggcccugaucaacagauuccagaucaagggcguggagcugaagagcggcuacaaggacuggauccuguggaucagcuucgccaucagcugcuuccugcugugcguggcccugcugggcuucaucaugugggccugccagaagggcaacaucagaugcaacaucugcaucuga

SEQ ID NO: 173597 - RNA, 1701 nt, Artificial Sequence; identical to SEQ ID NO: 172501
  derived and/or modified CDS sequence (opt4) from hemagglutinin__InfluenzaA__ALE32052

SEQ ID NO: 173598 - RNA, 1701 nt, Artificial Sequence; identical to SEQ ID NO: 172501
  derived and/or modified CDS sequence (opt4) from hemagglutinin__InfluenzaA__ALE32053

SEQ ID NO: 173599 - RNA, 1701 nt, Artificial Sequence
  derived and/or modified CDS sequence (opt4) from hemagglutinin__InfluenzaA__ALE32054
augaagaccaucaucgcccugagcuacauccugugccugguguucgcccagaagauccccggcaacgacaacagcaccgccacccugugccugggccaccacgccgugcccaacggcaccaucgugaagaccaucaccaacgacagaaucgaggugaccaacgccaccgagcuggugcagaacagcagcaucggcgagaucugcgagagcccccaccagauccuggacggcgagaacugcacccugaucgacgcccugcugggcgacccccagugcgacggcuuccagaacaagaagugggaccuguucguggagagaagcaaggccuacagcaacugcuaccccuacgacgugcccgacuacgccagccugagaagccugguggccagcagcggcacccuggaguucaacaacgagagcuucaacuggaccggcgugacccagaacggcaccagcagcgccugcaucagaagaagcagcagcagcuucuucagcagacugaacuggcugacccaccugaacuacaccuaccccgcccugaacgugaccaugcccaacaacgagcaguucgacaagcuguacaucuggggcgugcaccaccccggcaccgacaaggaccagaucuuccuguacgcccagagcagcggcagaaucaccgugagcaccaagggcagccagcaggccgugauccccaacaucggcagcagacccagaaucagagacauccccagcagaaucagcaucuacuggaccaucgugaagcccggcgacauccugcugaucaacagcaccggcaaccugaucgcccccagaggcuacuucaagaucagaagcggcaagagcagcaucaugagaagcgacgcccccaucggcaagugcaagagcgagugcaucacccccaacggcagcauccccaacgacaagcccuuccagaacgugaacagaaucaccuacggcgccugccccagauacgugaagcacagcacccugaagcuggccaccggcaugagaaacgugcccgagaagcagaccagaggcaucuucggcgccaucgccggcuucaucgagaacggcugggagggcaugguggacggcugguacggcuucagacaccagaacagcgagggcagaggccaggccgccgaccugaagagcacccaggccgccaucgaccagaucaacggcaagcugaacagacugaucggcaagaccaacgagaaguuccaccagaucgagaaggaguucagcgagguggagggcagaauccaggaccuggagaaguacguggaggacaccaagaucgaccuguggagcuacaacgccgagcugcugguggcccuggagaaccagcacaccaucgaccugaccgacagcgagaugaacaagcuguucgagaagaccaagaagcagcugagagagaacgccgaggacaugggcaacggcugcuucaagaucuaccacaagugcgacaacgccugcaucggcagcaucagaaacggcaccuacgaccacaacguguacagagacgaggcccugaacaacagauuccagaucaagggcguggagcugaagagcggcuacaaggacuggauccuguggaucagcuucgccaucagcugcuuccugcugugcguggcccugcugggcuucaucaugugggccugccagaagggcaacaucagaugcaaccacugcaucuga

SEQ ID NO: 173600 - RNA, 1701 nt, Artificial Sequence
  derived and/or modified CDS sequence (opt4) from hemagglutinin__InfluenzaA__ALE32055
augaagaccaucaucgcccugagcuacauccugugccugguguucgcccagaagauccccggcaacgacaacagcaccgccacccugugccugggccaccacgccgugcccaacggcaccaucgugaagaccaucaccaacgacagaaucgaggugaccaacgccaccgagcuggugcagaacagcagcaucggcgagaucugcgacagcccccaccagauccuggacggcgagaacugcacccugaucgacgcccugcugggcgacccccagugcgacggcuuccagaacaagaagugggaccuguucguggagagaagcaaggccuacagcaacugcuaccccuacgacgugcccgacuacgccagccugagaagccugguggccagcagcggcacccuggaguucaacaacgagagcuucaacuggaccggcgugacccagaacggcaccagcagcgccugcaucagaagaagcagcagcagcuucuucagcagacugaacuggcugacccaccugaacuacaaguaccccgcccugaacgugaccaugcccaacaacgagcaguucgacaagcuguacaucuggggcgugcaccaccccggcaccgacaaggaccagaucuuccuguacgcccagagcagcggcagaaucaccgugagcaccaagagaagccagcaggccgugauccccaacaucggcagcagacccagaaucagagacauccccagcagaaucagcaucuacuggaccaucgugaagcccggcgacauccugcugaucaacagcaccggcaaccugaucgcccccagaggcuacuucaagaucagaagcggcaagagcagcaucaugagaagcgacgcccccaucggcaagugcaagagcgagugcaucacccccaacggcagcauccccaacgacaagcccuuccagaacgugaacagaaucaccuacggcgccugccccagauacgugaagcacagcacccugaagcuggccaccggcaugagaaacgugcccgagaagcagaccagaggcaucuucggcgccaucgccggcuucaucgagaacggcugggagggcaugguggacggcugguacggcuucagacaccagaacagcgagggcagaggccaggccgccgaccugaagagcacccaggccgccaucgaccagaucaacggcaagcugaacagacugaucggcaagaccaacgagaaguuccaccagaucgagaaggaguucagcgagguggagggcagaauccaggaccuggagaaguacguggaggacaccaagaucgaccuguggagcuacaacgccgagcugcugguggcccuggagaaccagcacaccaucgaccugaccgacagcgagaugaacaagcuguucgagaagaccaagaagcagcugagagagaacgccgaggacaugggcaacggcugcuucaagaucuaccacaagugcgacaacgccugcaucggcagcaucagaaacggcaccuacgaccacaacguguacagagacgaggcccugaacaacagauuccagaucaagggcguggagcugaagagcggcuacaaggacuggauccuguggaucagcuucgccaucagcugcuuccugcugugcguggcccugcugggcuucaucaugugggccugccagaacggcaacaucagaugcaacaucugcaucuga

SEQ ID NO: 173601 - RNA, 1701 nt, Artificial Sequence; identical to SEQ ID NO: 173152
  derived and/or modified CDS sequence (opt4) from hemagglutinin__InfluenzaA__ALE32056

SEQ ID NO: 173602 - RNA, 1701 nt, Artificial Sequence
  derived and/or modified CDS sequence (opt4) from hemagglutinin__InfluenzaA__ALE32057
augaagaccaucaucgcccugagcuacgugcugugccugguguucgcccagaagauccccggcaacgacaacagcaccgccacccugugccugggccaccacgccgugcccaacggcaccaucgugaagaccaucaccaacgacagaaucgaggugaccaacgccaccgagcuggugcagaacagcagcaucggcgagaucugcgacagcccccaccagauccuggacggcgagaacugcacccugaucgacgcccugcugggcgacccccagugcgacggcuuccagaacaagaagugggaccuguucguggagagaagcaaggccuacagcaacugcuaccccuacgacgugcccgacuacgccagccugagaagccugguggccagcagcggcacccuggaguucaacaacgagagcuucaacuggaccggcgugacccagaacggcaccagcagcgccugcaucagaagaagcagcagcagcuucuucagcagacugaacuggcugacccaccugaacuacaccuaccccgcccugaacgugaccaugcccaacaacgagcaguucgacaagcuguacaucuggggcgugcaccaccccggcaccgacaaggaccagaucuuccuguacgcccagagcagcggcagaaucaccgugagcaccaagagaagccagcaggccgugauccccaacaucggcagcagacccagaaucagagacauccccagcagaaucagcaucuacuggaccaucgugaagcccggcgacauccugcugaucaacagcaccggcaaccugaucgcccccagaggcuacuucaagaucagaagcggcaagagcagcaucaugagaagcgacgcccccaucggcaagugcaagagcgagugcaucacccccaacggcagcauccccaacgacaagcccuuccagaacgugaacagaaucaccuacggcgccugccccagauacgugaagcacagcacccugaagcuggccaccggcaugagaaacgugcccgagaagcagaccagaggcaucuucggcgccaucgccggcuucaucgagaacggcugggagggcaugguggacggcugguacggcuucagacaccagaacagcgagggcagaggccaggccgccgaccugaagagcacccaggccgccaucgaccagaucaacggcaagcugaacagacugaucggcaagaccaacgagaaguuccaccagaucgagaaggaguucagcgagguggagggcagaauccaggaccuggagaaguacguggaggacaccaagaucgaccuguggagcuacaacgccgagcugcugguggcccuggagaaccagcacaccaucgaccugaccgacagcgagaugaacaagcuguucgagaagaccaagaagcagcugagagagaacgccgaggacaugggcaacggcugcuucaagaucuaccacaagugcgacaacgccugcaucggcagcaucagaaacggcaccuacgaccacaacguguacagagacgaggcccugaacaacagauuccagaucaagggcguggagcugaagagcggcuacaaggacuggauccuguggaucagcuucgccaucagcugcuuccugcugugcguggcccugcugggcuucaucaugugggccugccagaagggcaacaucagaugcaacaucugcaucuga

SEQ ID NO: 173603 - RNA, 1701 nt, Artificial Sequence; identical to SEQ ID NO: 172501
  derived and/or modified CDS sequence (opt4) from hemagglutinin__InfluenzaA__ALE32058

SEQ ID NO: 173604 - RNA, 1701 nt, Artificial Sequence; identical to SEQ ID NO: 172501
  derived and/or modified CDS sequence (opt4) from hemagglutinin__InfluenzaA__ALE32059

SEQ ID NO: 173605 - RNA, 1701 nt, Artificial Sequence
  derived and/or modified CDS sequence (opt4) from hemagglutinin__InfluenzaA__ALE32060
augaagaccaucaucgcccugagcuacauccugugccugguguucgcccagaagauccccggcaacgacaacagcaccgccacccugugccugggccaccacgccgugcccaacggcaccaucgugaagaccaucaccaacgacagaaucgaggugaccaacgccaccgagcuggugcagaacagcagcaucggcgagaucugcgacagcccccaccagauccuggacggcgagaacugcacccugaucgacgcccugcugggcgacccccagugcgacggcuuccagaacaagaagugggaccuguucguggagagaagcaaggccuacagcaacugcuaccccuacgacgugcccgacuacgccagccugagaagccugguggccagcagcggcacccuggaguucaacaacgagagcuucaacuggaccggcgugacccagaacggcaccagcagcgccugcaucagaagaagcagcagcagcuucuucagcagacugaacuggcugacccaccugaacuacaccuaccccgcccugaacgugaccaugcccaacaacgagcaguucgacaagcuguacaucuggggcgugcaccaccccggcaccgacaaggaccagguguuccuguacgcccagagcagcggcagaaucaccgugagcaccaagagaagccagcaggccgugauccccaacaucggcagcagacccagaaucagagacauccccagcagaaucagcaucuacuggaccaucgugaagcccggcgacauccugcugauccacagcaccggcaaccugaucgcccccagaggcuacuucaagaucagaagcggcaagagcagcaucaugagaagcgacgcccccaucggcaagugcaagagcgagugcaucacccccaacggcagcauccccaacgacaagcccuuccagaacgugaacagaaucaccuacggcgccugccccagauacgugaagcacagcacccugaagcuggccaccggcaugagaaacgugcccgagaagcagaccagaggcaucuucggcgccaucgccggcuucaucgagaacggcugggagggcaugguggacggcugguacggcuucagacaccagaacagcgagggcagaggccaggccgccgaccugaagagcacccaggccgccaucgaccagaucaacggcaagcugaacagacugaucggcaagaccaacgagaaguuccaccagaucgagaaggaguucagcgagguggagggcagaauccaggaccuggagaaguacguggaggacaccaagaucgaccuguggagcuacaacgccgagcugcugguggcccuggagaaccagcacaccaucgaccugaccgacagcgagaugaacaagcuguucgagaagaccaagaagcagcugagagagaacgccgaggacaugggcaacggcugcuucaagaucuaccacaagugcgacaacgccugcaucggcagcaucagaaacggcaccuacgaccacaacguguacagagacgaggcccugaacaacagauuccagaucaagggcguggagcugaagagcggcuacaaggacuggauccuguggaucagcuucgccaucagcugcuuccugcugugcguggcccugcugggcuucaucaugugggccugccagaagggcaacaucagaugcaacaucugcaucuga

SEQ ID NO: 173606 - RNA, 1701 nt, Artificial Sequence
  derived and/or modified CDS sequence (opt4) from hemagglutinin__InfluenzaA__ALE32061
augaagaccaucaucgcccugagcuacauccugugccugguguucgcccagaagauccccggcaacgacaacagcaccgccacccugugccugggccaccacgccgugcccaacggcaccaucgugaagaccaucaccaacgacagaaucgaggugaccaacgccaccgagcuggugcagaacagcagcaucggcgagaucugcgacagcccccaccagauccuggacggcgagaacugcacccugaucgacgcccugcugggcgacccccagugcgacggcuuccagaacaagaagugggaccuguucguggagagaagcaaggccuacagcaacugcuaccccuacgacgugcccgacuacgccagccugagaagccugguggccagcagcggcacccuggaguucaacaacgagagcuucaacuggaccggcgugacccagaacggcaccagcagcgccugcaucagaagaagcagcagcagcuucuucagcagacugaacuggcugacccaccugaaguacaccuaccccgcccugaacgugaccaugcccaacaacgagcaguucgacaagcuguacaucuggggcgugcaccaccccggcaccgacaacgaccagaucuuccuguacgccagaagcagcggcagaaucaccgugagcaccaagggcagccagcaggccgugauccccaacaucggcagcagacccagaaucagagacauccccagcagaaucagcaucuacuggaccaucgugaagcccggcgacauccugcugaucaacagcaccggcaaccugaucgcccccagaggcuacuucaagaucagaagcggcaagagcagcaucaugagaagcgacgcccccaucggcaagugcaagagcgagugcaucacccccaacggcagcauccccaacgacaagcccuuccagaacgugaacagaaucaccuacggcgccugccccagauacgugaagcacagcacccugaagcuggccaccggcaugagaaacgugcccgagaagcagaccagaggcaucuucggcgccaucgccggcuucaucgagaacggcugggagggcaugguggacggcugguacggcuucagacaccagaacagcgagggcagaggccaggccgccgaccugaagagcacccaggccgccaucgaccagaucaacggcaagcugaacagacugaucggcaagaccaacgagaaguuccaccagaucgagaaggaguucagcgagguggagggcagaauccaggaccuggagaaguacguggaggacaccaagaucgaccuguggagcuacaacgccgagcugcugguggcccuggagaaccagcacaccaucgaccugaccgacagcgagaugaacaagcuguucgagaagaccaagaagcagcugagagagaacgccgaggacaugggcaacggcugcuucaagaucuaccacaagugcgacaacgccugcaucggcagcaucagaaacggcaccuacgaccacaacguguacagagacgaggcccugaacaacagauuccagaucaagggcguggagcugaagagcggcuacaaggacuggauccuguggaucagcuucgccaucagcugcuuccugcugugcguggcccugcugggcuucaucaugugggccugccagaagggcaacaucagaugcaacaucugcaucuga

SEQ ID NO: 173607 - RNA, 1701 nt, Artificial Sequence
  derived and/or modified CDS sequence (opt4) from hemagglutinin__InfluenzaA__ALE32062
augaagaccaucaucgcccugagcuacauccugugccugguguucgcccagaagauccccggcaacgacaacagcaccgccacccugugccugggccaccacgccgugcccaacggcaccaucgugaagaccaucaccaacgacagaaucgaggugaccaacgccaccgagcuggugcagaacagcagcaucggcgagaucugcgacagcccccaccagauccuggacggcgagaacugcacccugaucgacgcccugcugggcgacccccagugcgacggcuuccagaacaagaagugggaccuguucguggagagaagcaaggccuacagcaacugcuaccccuacgacgugcccgacuacgccagccugagaagccugguggccagcagcggcacccuggaguucaacaacgagagcuucaacuggaccggcgugacccagaacggcaccagcagcgccugcaucagaagaagcagcagcagcuucuucagcagacugaacuggcugacccaccugaacuacaccuaccccgcccugaacgugaccaugcccaacaacgagcaguucgacaagcuguacaucuggggcgugcaccaccccggcaccgacaaggaccagaucuuccuguacgcccagagcagcggcagaaucaccgugagcaccaagagaagccagcaggccgugauccccaacaucggcagcagacccagaaucagagacauccccagcagaaucagcaucuacuggaccaucgugaagcccggcgacauccugcugaucuacagcaccggcaaccugaucgcccccagaggcuacuucaagaucagaagcggcaagagcagcaucaugagaagcgacgcccccaucggcaagugcaagagcgagugcaucacccccaacggcagcauccccaacgacaagcccuuccagaacgugaacagaaucaccuacggcgccugccccagauacgugaagcacagcacccugaagcuggccaccggcaugagaaacgugcccgagaagcagaccagaggcaucuucggcgccaucgccggcuucaucgagaacggcugggagggcaugguggacggcugguacggcuucagacaccagaacagcgagggcagaggccaggccgccgaccugaagagcacccaggccgccaucgaccagaucaacggcaagcugaacagacugaucggcaagaccaacgagaaguuccaccagaucgagaaggaguucagcgagguggagggcagaauccaggaccuggagaaguacguggaggacaccaagaucgaccuguggagcuacaacgccgagcugcugguggcccuggagaaccagcacaccaucgaccugaccgacagcgagaugaacaagcuguucgagaagaccaagaagcagcugagagagaacgccgaggacaugggcaacggcugcuucaagaucuaccacaagugcgacaacgccugcaucggcagcaucagaaacggcaccuacgaccacaacguguacagagacgaggcccugaacaacagauuccagaucaagggcguggagcugaagagcggcuacaaggacuggauccuguggaucagcuucgccaucagcugcuuccugcugugcguggcccugcugggcuucaucaugugggccugccagaagggcaacaucagaugcaacaucugcaucuga

SEQ ID NO: 173608 - RNA, 1701 nt, Artificial Sequence; identical to SEQ ID NO: 172501
  derived and/or modified CDS sequence (opt4) from hemagglutinin__InfluenzaA__ALE32063

SEQ ID NO: 173609 - RNA, 1701 nt, Artificial Sequence
  derived and/or modified CDS sequence (opt4) from hemagglutinin__InfluenzaA__ALE32064
augaagaccaucaucgcccugagcuacauccugugccugguguucgcccagaagauccccggcaacgacaacagcaccgccacccugugccugggccaccacgccgugcccaacggcaccaucgugaagaccaucaccaacgacagaaucgaggugaccaacgccaccgagcuggugcagaacagcagcaucggcgagaucugcgacagcccccaccagauccuggacggcgagaacugcacccugaucgacgcccugcugggcgacccccagugcgacggcuuccagaacaagaagugggaccuguucguggagagaagcaaggccuacagcaacugcuaccccuacgacgugcccgacuacgccagccugagaagccugguggccagcagcggcacccuggaguucaacaacgagagcuucaacuggaccggcgugacccagaacggcaccagcagcgccugcaucagaagaagcagcaacagcuucuucagcagacugaacuggcugacccaccugaacuacaccuaccccgcccugaacgugaccaugcccaacaacgagcaguucgacaagcuguacaucuggggcgugcaccaccccggcaccgacaaggaccagaucuuccuguacgcccagagcagcggcagaaucaccgugagcaccaagagaagccagcaggccgugauccccaacaucggcagcagacccagaaucagagacauccccagcagaaucagcaucuacuggaccaucgugaagcccggcgacauccugcugaucaacagcaccggcaaccugaucgcccccagaggcuacuucaagaucagaagcggcaagagcagcaucaugagaagcgacgcccccaucggcaagugcaagagcgagugcaucacccccaacggcagcauccccaacgacaagcccuuccagaacgugaacagaaucaccuacggcgccugccccagauacgugaagcacagcacccugaagcuggccaccggcaugagaaacgugcccgagaagcagaccagaggcaucuucggcgccaucgccggcuucaucgagaacggcugggagggcaugguggacggcugguacggcuucagacaccagaacagcgagggcagaggccaggccgccgaccugaagagcacccaggccgccaucgaccagaucaacggcaagcugaacagacugaucggcaagaccaacgagaaguuccaccagaucgagaaggaguucagcgagguggagggcagaauccaggaccuggagaaguacguggaggacaccaagaucgaccuguggagcuacaacgccgagcugcugguggcccuggagaaccagcacaccaucgaccugaccgacagcgagaugaacaagcuguucgagaagaccaagaagcagcugagagagaacgccgaggacaucggcaacggcugcuucaagaucuaccacaagugcgacaacgccugcaucggcagcaucagaaacggcaccuacgaccacaacguguacagagacgaggcccugaacaacagauuccagaucaagggcguggagcugaagagcggcuacaaggacuggauccuguggaucagcuucgccaucagcugcuuccugcugugcguggcccugcugggcuucaucaugugggccugccagaagggcaacaucagaugcaacaucugcaucuga

SEQ ID NO: 173610 - RNA, 1701 nt, Artificial Sequence; identical to SEQ ID NO: 172501
  derived and/or modified CDS sequence (opt4) from hemagglutinin__InfluenzaA__ALE32065

SEQ ID NO: 173611 - RNA, 1701 nt, Artificial Sequence
  derived and/or modified CDS sequence (opt4) from hemagglutinin__InfluenzaA__ALE32066
augaagaccaucaucgcccugagcuacauccugugccugguguucgcccagaagauccccggcaacgacaacagcaccgccacccugugccugggccaccacgccgugcccaacggcaccaucgugaagaccaucaccaacgacagaaucgaggugaccaacgccaccgagcuggugcagaacagcagcaucggcgagaucugcgacagcccccaccagauccuggacggcgagaacugcacccugaucgacgcccugcugggcgacccccagugcgacggcuuccagaacaagaagugggaccuguucguggagagaagcaaggccuacagcaacugcuaccccuacgacgugcccgacuacgccagccugagaagccugguggccagcagcggcacccuggaguucaacaacgagagcuucaacuggaccggcgugacccagaacggcaccagcagcgccugcaucagaagaagcagcagcagcuucuucagcagacugaacuggcugacccaccugaacuacaccuaccccgcccugaacgugagcaugcccaacaacgagcaguucgacaagcuguacaucuggggcgugcaccaccccggcaccgacaaggaccagaucuuccuguacgcccagagcagcggcagaaucaccgugagcaccaagagaagccagcaggccgugauccccaacaucggcagcagacccagaaucagagacauccccagcagaaucagcaucuacuggaccaucgugaagcccggcgacauccugcugaucaacagcaccggcaaccugaucgcccccagaggcuacuucaagaucagaagcggcaagagcagcaucaugagaagcgacgcccccaucggcaagugcaagagcgagugcaucacccccaacggcagcauccccaacgacaagcccuuccagaacgugaacagaaucaccuacggcgccugccccagauacgugaagcacagcacccugaagcuggccaccggcaugagaaacgugcccgagaagcagaccagaggcaucuucggcgccaucgccggcuucaucgagaacggcugggagggcaugguggacggcugguacggcuucagacaccagaacagcgagggcagaggccaggccgccgaccugaagagcacccaggccgccaucgaccagaucaacggcaagcugaacagacugaucggcaagaccaacgagaaguuccaccagaucgagaaggaguucagcgagguggagggcagaauccaggaccuggagaaguacguggaggacaccaagaucgaccuguggagcuacaacgccgagcugcugguggcccuggagaaccagcacaccaucgaccugaccgacagcgagaugaacaagcuguucgagaagaccaagaagcagcugagagagaacgccgaggacaugggcaacggcugcuucaagaucuaccacaagugcgacaacgccugcaucggcagcaucagaaacggcaccuacgaccacaacguguacagagacgaggcccugaacaacagauuccagaucaagggcguggagcugaagagcggcuacaaggacuggauccuguggaucagcuucgccaucagcugcuuccugcugugcguggcccugcugggcuucaucaugugggccugccagaagggcaacaucagaugcaacaucugcaucuga

SEQ ID NO: 173612 - RNA, 1701 nt, Artificial Sequence; identical to SEQ ID NO: 173283
  derived and/or modified CDS sequence (opt4) from hemagglutinin__InfluenzaA__ALE32067

SEQ ID NO: 173613 - RNA, 1701 nt, Artificial Sequence; identical to SEQ ID NO: 172501
  derived and/or modified CDS sequence (opt4) from hemagglutinin__InfluenzaA__ALE32068

SEQ ID NO: 173614 - RNA, 1701 nt, Artificial Sequence; identical to SEQ ID NO: 172501
  derived and/or modified CDS sequence (opt4) from hemagglutinin__InfluenzaA__ALE32069

SEQ ID NO: 173615 - RNA, 1701 nt, Artificial Sequence
  derived and/or modified CDS sequence (opt4) from hemagglutinin__InfluenzaA__ALE32070
augaagaccaucaucgcccugagcuacauccugugccugguguucgcccagaagauccccggcaacgacaacagcaccgccacccugugccugggccaccacgccgugcccaacggcaccaucgugaagaccaucaccaacgacagaaucgaggugaccaacgccaccgagcuggugcagaacagcagcaucggcgagaucugcgacagcccccaccagauccuggacggcgagaacugcacccugaucgacgcccugcugggcgacccccagugcgacggcuuccagaacaagaagugggaccuguucguggagagaagcaaggccuacagcaacugcuaccccuacgacgugcccgacuacgccagccugagaagccugguggccagcagcggcacccuggaguucaacaacgagagcuucaacuggaccggcgugacccagaacggcaccagcagcgccugcaucagaagaagcagcagcagcuucuucagcagacugaacuggcugacccaccugaacuacaccuaccccgcccugaacgugaccaugcccaacaacgagcaguucgacaagcuguacaucuggggcgugcaccaccccggcaccgacaaggaccagaucuuccuguacgcccagagcagcggcagaaucaccgugagcaccaagagaagccagcaggccgugauccccaacaucggcagcagacccagaaucagagacauccccagcagaaucagcaucuacuggaccaucgugaagcccggcgacauccugcugaucaacagcaccggcaaccugaucgcccccagaggcuacuucaagaucagaagcggcaagagcagcaucaugagaagcgacgcccccaucggcaagugcaagagcgagugcaucacccccaacggcagcauccccaacgacaagcccuuccagaacgugaacagaaucaccuacggcgugugccccagauacgugaagcacagcacccugaagcuggccaccggcaugagaaacgugcccgagaagcagaccagaggcaucuucggcgccaucgccggcuucaucgagaacggcugggagggcaugguggacggcugguacggcuucagacaccagaacagcgagggcagaggccaggccgccgaccugaagagcacccaggccgccaucgaccagaucaacggcaagcugaacagacugaucggcaagaccaacgagaaguuccaccagaucgagaaggaguucagcgagguggagggcagaauccaggaccuggagaaguacguggaggacaccaagaucgaccuguggagcuacaacgccgagcugcugguggcccuggagaaccagcacaccaucgaccugaccgacagcgagaugaacaagcuguucgagaagaccaagaagcagcugagagagaacgccgaggacaugggcaacggcugcuucaagaucuaccacaagugcgacaacgccugcaucggcagcaucagaaacggcaccuacgaccacaacguguacagagacgaggcccugaacaacagauuccagaucaagggcguggagcugaagagcggcuacaaggacuggauccuguggaucagcuucgccaucagcugcuuccugcugugcguggcccugcugggcuucaucaugugggccugccagaagggcaacaucagaugcaacaucugcaucuga

SEQ ID NO: 173616 - RNA, 1701 nt, Artificial Sequence; identical to SEQ ID NO: 172501
  derived and/or modified CDS sequence (opt4) from hemagglutinin__InfluenzaA__ALE32071

SEQ ID NO: 173617 - RNA, 1701 nt, Artificial Sequence; identical to SEQ ID NO: 173498
  derived and/or modified CDS sequence (opt4) from hemagglutinin__InfluenzaA__ALE32072

SEQ ID NO: 173618 - RNA, 1701 nt, Artificial Sequence
  derived and/or modified CDS sequence (opt4) from hemagglutinin__InfluenzaA__ALE32073
augaagaccaucaucgcccugagcuacauccugugccugguguucgcccagaagauccccggcaacgacaacagcaccgccacccugugccugggccaccacgccgugcccaacggcaccaucgugaagaccaucaccaacgacagaaucgaggugaccaacgccaccgagcuggugcagaacagcagcaucggcgagaucugcgacagcccccaccagauccuggacggcgagaacugcacccugaucgacgcccugcugggcgacccccagugcgacggcuuccagaacaagaagugggaccuguucguggagagaagcaaggccuacagcaacugcuaccccuacgacgugcccgacuacgccagccugagaagccugguggccagcagcggcacccuggaguucaacaacgagagcuucaacuggaccggcgugacccagaacggcaccagcagcgccugcaucagaaagagcagcagcagcuucuucagcagacugaacuggcugacccaccugaacuacaccuaccccgcccugaacgugaccaugcccaacaacgagcaguucgacaagcuguacaucuggggcgugcaccaccccggcaccgacaaggaccagaucuuccuguacgcccagagcagcggcagaaucaccgugagcaccaagagaagccagcaggccgugauccccaacaucggcagcagacccagaaucagagacauccccagcagaaucagcaucuacuggaccaucgugaagcccggcgacauccugcugaucaacagcaccggcaaccugaucgcccccagaggcuacuucaagauccugagcggcaagagcagcaucaugagaagcgacgcccccaucggcaagugcaagagcgagugcaucacccccaacggcagcauccccaacgacaagcccuuccagaacgugaacagaaucaccuacggcgccugccccagauacgugaagcacagcacccugaagcuggccaccggcaugagaaacgugcccgagaagcagaccagaggcaucuucggcgccaucgccggcuucaucgagaacggcugggagggcaugguggacggcugguacggcuucagacaccagaacagcgagggcagaggccaggccgccgaccugaagagcacccaggccgccaucgaccagaucaacggcaagcugaacagacugaucggcaagaccaacgagaaguuccaccagaucgagaaggaguucagcgagguggagggcagaauccaggaccuggagaaguacguggaggacaccaagaucgaccuguggagcuacaacgccgagcugcugguggcccuggagaaccagcacaccaucgaccugaccgacagcgagaugaacaagcuguucgagaagaccaagaagcagcugagagagaacgccgaggacaugggcaacggcugcuucaagaucuaccacaagugcgacaacgccugcaucggcagcaucagaaacggcaccuacgaccacaacguguacagagacgaggcccugaacaacagauuccagaucaagggcguggagcugaagagcggcuacaaggacuggauccuguggaucagcuucgccaucagcugcuuccugcugugcguggcccugcugggcuucaucaugugggccugccagaagggcaacaucagaugcaacaucugcaucuga

SEQ ID NO: 173619 - RNA, 1701 nt, Artificial Sequence
  derived and/or modified CDS sequence (opt4) from hemagglutinin__InfluenzaA__ALE32074
augaagaccaucaucgcccugagcuacauccugugccugguguucgcccagaagauccccggcaacgacaacagcaccgccacccugugccugggccaccacgccgugcccaacggcaccaucgugaagaccaucaccaacgacagaaucgaggugaccaacgccaccgagcuggugcagaacagcagcaucggcgagaucugcgacagcccccaccagauccuggacggcgagaacugcacccugaucgacgcccugcugggcgacccccagugcgacggcuuccagaacaagaagugggaccuguucguggagagaagcaaggccuacagcaacugcuaccccuacgacgugcccgacuacgccagccugagaagccugguggccagcagcggcacccuggaguucaacaacgagagcuucaacuggaccggcgugacccagaacggcaccagcagcagcugcaucagaagaagcagcagcagcuucuucagcagacugaacuggcugacccaccugaacuacaccuaccccgcccugaacgugaccaugcccaacaacgagcaguucgacaagcuguacaucuggggcgugcaccaccccggcaccgacaaggaccagaucuuccuguacgcccagagcagcggcagaaucaccgugagcaccaagagaagccagcaggccgugauccccaacaucggcagcagacccagaaucagagacauccccagcagaaucagcaucuacuggaccaucgugaagcccggcgacauccugcugaucaacagcaccggcaaccugaucgcccccagaggcuacuucaagauccugagcggcaagagcagcaucaugagaagcgacgcccccaucggcaagugcaagagcgagugcaucacccccaacggcagcauccccaacgacaagcccuuccagaacgugaacagaaucaccuacggcgccugccccagauacgugaagcacagcacccugaagcuggccaccggcaugagaaacgugcccgagaagcagaccagaggcaucuucggcgccaucgccggcuucaucgagaacggcugggagggcaugguggacggcugguacggcuucagacaccagaacagcgagggcagaggccaggccgccgaccugaagagcacccaggccgccaucgaccagaucaacggcaagcugaacagacugaucggcaagaccaacgagaaguuccaccagaucgagaaggaguucagcgagguggagggcagaauccaggaccuggagaaguacguggaggacaccaagaucgaccuguggagcuacaacgccgagcugcugguggcccuggagaaccagcacaccaucgaccugaccgacagcgagaugaacaagcuguucgagaagaccaagaagcagcugagagagaacgccgaggacaugggcaacggcugcuucaagaucuaccacaagugcgacaacgccugcaucggcagcaucagaaacggcaccuacgaccacaacguguacagagacgaggcccugaacaacagauuccagaucaagggcguggagcugaagagcggcuacaaggacuggauccuguggaucagcuucgccaucagcugcuuccugcugugcguggcccugcugggcuucaucaugugggccugccagaagggcaacaucagaugcaacaucugcaucuga

SEQ ID NO: 173620 - RNA, 1701 nt, Artificial Sequence
  derived and/or modified CDS sequence (opt4) from hemagglutinin__InfluenzaA__ALE32075
augaagaccaucaucgcccugagcuacauccugugccugguguucgcccagaagcugcccgagaacgacaacagcaccgccacccugugccugggccaccacgccgugcccaacggcaccaucgugaagaccaucaccagcgacagaaucgaggugaccaacgccaccgagcuggugcagaacagcagcaucggcgagaucugcgacagcccccaccagauccuggacggcaagaacugcacccugaucgacgcccugcugggcgacccccagugcgacggcuuccagaacaagaagugggaccuguucguggagagaagcaaggccuacagcaacugcuaccccuacgacgugcccgacuacgccagccugagaagccugguggccagcagcggcacccuggaguucaacgacgagagcuucaacugggccggcgugacccagaacggcaccagcagcagcugcaucagaggcagcaacagcagcuucuucagcagacugaacuggcugacccacagcaacuucaaguaccccgcccugaacgugaccaugcccaacaacgagcaguucgacaagcuguacaucuggggcgugcaccaccccggcaccgacaaggaccagaucuuccuguacgcccagagcagcggcagaaucaccgugagcaccaagagaagccagcaggccgugauccccaacaucggcagcagacccagaaucagaaacauccccagcagaaucagcaucuacuggaccaucgugaagcccggcgacauccugcugaucaacagcaccggcaaccugaucgcccccagaggcuacuucaagaucagaagcggcaagagcagcaucaugagaagcgacgcccccaucggcaagugcaagagcgagugcaucacccccaacggcagcauccccaacgacaagcccuuccagaacgugaacagaaucaccuacggcgccugccccagauacgugaagcagagcacccugaagcuggccaccggcaugagaaacgugcccgagaagcagaccagaggcaucuucggcgccaucgccggcuucaucgagaacggcugggagggcaugaaggacggcugguacggcuucagacaccagaacagcgagggcagaggccaggccgccgaccugaagagcacccaggccgccaucgaccagaucaacggcaagcugaacagacugaucggcaagaccaacgagaaguuccaccagaucgagaaggaguucagcgagguggagggcagaauccaggaccuggagaaguacguggaggacaccaagaucgaccuguggagcuacaacgccgagcugcugguggcccuggagaaccagcacaccaucgaccugaccgacagcgagaugaacaagcuguucgagaagaccaagaagcagcugagagagaacgccgaggacaugggcaacggcugcuucaagaucuaccacaagugcgacaacgccugcaucggcagcaucagaaacggcaccuacgaccacgacguguacagagacgaggcccugaacaacagauuccagaucaagggcguggagcugaagagcggcuacaaggacuggauccuguggaucagcuucgccaucagcugcuuccugcugugcguggcccugcugggcuucaucaugugggccugccagaagggcaacaucagaugcaacaucugcaucuga

SEQ ID NO: 173621 - RNA, 1701 nt, Artificial Sequence; identical to SEQ ID NO: 173058
  derived and/or modified CDS sequence (opt4) from hemagglutinin__InfluenzaA__ALE32076

SEQ ID NO: 173622 - RNA, 1701 nt, Artificial Sequence
  derived and/or modified CDS sequence (opt4) from hemagglutinin__InfluenzaA__ALE32077
augaagaccaucaucgcccugagcuacauccugugccugguguucgcccagaagauccccggcaacgacaacagcaccgccacccugugccugggccaccacgccgugcccaacggcaccaucgugaagaccaucaccaacgacagaaucgaggugaccaacgccaccgagcuggugcagaacagcagcaucggcgagaucugcgacagcccccaccagauccuggacggcgagaacugcacccugaucgacgcccugcugggcgacccccagugcgacggcuuccagaacaagaagugggaccuguucguggagagaagcaaggcccacagcaacugcuaccccuacgacgugcccgacuacgccagccugagaagccugguggccagcagcggcacccuggaguucaacaacgagagcuucaacuggaccggcgugacccagaacggcaccagcagcgccugcaucagaagaagcagcagcagcuucuucagcagacugaacuggcugacccaccugaacuacaccuaccccgcccugaacgugaccaugcccaacaacgagcaguucgacaagcuguacaucuggggcgugcaccaccccggcaccgacaaggaccagaucuuccuguacgccagaagcagcggcagaaucaccgugagcaccaagggcagccagcaggccgugauccccaacaucggcagcagacccagaaucagagacauccccagcagaaucagcaucuacuggaccaucgugaagcccggcgacauccugcugaucaacagcaccggcaaccugaucgcccccagaggcuacuucaagaucagaagcggcaagagcagcaucaugagaagcgacgcccccaucggcaagugcaagagcgagugcaucacccccaacggcagcauccccaacgacaagcccuuccagaacgugaacagaaucaccuacggcgccugccccagauacgugaagcacagcacccugaagcuggccaccggcaugagaaacgugcccgagaagcagaccagaggcaucuucggcgccaucgccggcuucaucgagaacggcugggagggcaugguggacggcugguacggcuucagacaccagaacagcgagggcagaggccaggccgccgaccugaagagcacccaggccgccaucgaccagaucaacggcaagcugaacagacugaucggcaagaccaacgagaaguuccaccagaucgagaaggaguucagcgagguggagggcagaauccaggaccuggagaaguacguggaggacaccaagaucgaccuguggagcuacaacgccgagcugcugguggcccuggagaaccagcacaccaucgaccugaccgacagcgagaugaacaagcuguucgagaagaccaagaagcagcugagagagaacgccgaggacaugggcaacggcugcuucaagaucuaccacaagugcgacaacgccugcaucggcagcaucagaaacggcaccuacgaccacaacguguacagagacgaggcccugaacaacagauuccagaucaagggcguggagcugaagagcggcuacaaggacuggauccuguggaucagcuucgccaucagcugcuuccugcugugcguggcccugcugggcuucaucaugugggccugccagaagggcaacaucagaugcaacaucugcaucuga

SEQ ID NO: 173623 - RNA, 1701 nt, Artificial Sequence; identical to SEQ ID NO: 173159
  derived and/or modified CDS sequence (opt4) from hemagglutinin__InfluenzaA__ALE32078

SEQ ID NO: 173624 - RNA, 1701 nt, Artificial Sequence; identical to SEQ ID NO: 173045
  derived and/or modified CDS sequence (opt4) from hemagglutinin__InfluenzaA__ALE32079

SEQ ID NO: 173625 - RNA, 1701 nt, Artificial Sequence
  derived and/or modified CDS sequence (opt4) from hemagglutinin__InfluenzaA__ALE32080
augaagaccaucaucgcccugagcuacauccugugccugguguucgcccagaagauccccggcaacgacaacagcaccgccacccugugccugggccaccacgccgugcccaacggcaccaucgugaagaccaucaccaacgacagaaucgaggugaccaacgccaccgagcuggugcagaacagcagcaucggcgagaucugcgacagcccccaccagauccuggacggcgagaacugcacccugaucgacgcccugcugggcgacccccagugcgacggcuuccagaacaagaagugggaccuguucguggagagaagcaaggccuacagcaacugcuaccccuacgacgugcccgacuacgccagccugagaagccugguggccagcagcggcacccuggaguucaacaacgagagcuucaacuggaccggcgugacccagaacggcaccagcagcagcugcaucagaagaagcagcagcagcuucuucagcagacugaacuggcugacccaccugaacuacaccuaccccgcccugaacgugaccaugcccaacaacgagcaguucgacaagcuguacaucuggggcgugcaccaccccggcaccgacaaggaccagaucuuccuguacgcccagagcagcggcagaaucaccgugagcaccaagagaagccagcaggccgugauccccaacaucggcagcagacccagaaucagagacauccccagcagaaucagcaucuacuggaccaucgugaagcccggcgacauccugcugaucaacagcaccggcaaccugaucgcccccagaggcuacuucaagaucagaagcggcaagagcagcaucaugagaagcgacgcccccaucggcaagugcaagagcgagugcaucacccccaacggcagcauccccaacgacaagcccuuccagaacgugaacagaaucaccuacggcgccugccccagauacgugaagcacagcacccugaagcuggccaccggcaugagaaacgugcccgagaagcagaccagaggcaucuucggcgccaucgccggcuucaucgagaacggcugggagggcaugguggacggcugguacggcuucagacaccagaacagcgagggcagaggccaggccgccgaccugaagagcacccaggccgccaucgaccagaucaacggcaagcugaacagacugaucggcaagaccaacgagaaguuccaccagaucgagaaggaguucagcgagguggagggcagaauccaggaccuggagaaguacguggaggacaccaagaucgaccuguggagcuacaacgccgagcugcugguggcccuggagaaccagcacaccaucgaccugaccgacagcgagaugaacaagcuguucgagaagaccaagaagcagcugagagagaacgccgaggacaugggcaacggcugcuucaagaucuaccacaagugcgacaacgccugcaucggcagcaucagaaacggcaccuacgaccacaacguguacagagacgaggcccugaacaacagauuccagaucaagggcguggagcugaagagcggcuacaaggacuggauccuguggaucagcuucgccaucagcugcuuccugcugugcguggcccugcugggcuucaucaugugggccugccagaagggcaacaucagaugcaacaucugcaucuga

SEQ ID NO: 173626 - RNA, 1701 nt, Artificial Sequence; identical to SEQ ID NO: 173159
  derived and/or modified CDS sequence (opt4) from hemagglutinin__InfluenzaA__ALE32081

SEQ ID NO: 173627 - RNA, 1701 nt, Artificial Sequence; identical to SEQ ID NO: 173159
  derived and/or modified CDS sequence (opt4) from hemagglutinin__InfluenzaA__ALE32082

SEQ ID NO: 173628 - RNA, 1701 nt, Artificial Sequence
  derived and/or modified CDS sequence (opt4) from hemagglutinin__InfluenzaA__ALE32083
augaagaccaucaucgcccugagcuacauccugugccugguguucgcccagaagauccccggcaacgacaacagcaccgccacccugugccugggccaccacgccgugcccaacggcaccaucgugaagaccaucaccaacgacagaaucgaggugaccaacgccaccgagcuggugcagaacagcagcaucggcgagaucugcgacagcccccaccagauccuggacggcgagaacugcacccugaucgacgcccugcugggcgacccccagugcgacggcuuccagaacaagaagugggaccuguucguggagagaagcaaggccuacagcaacugcuaccccuacgacgugcccgacuacgccagccugagaagccugguggccagcagcggcacccuggaguucaacaacgagagcuucaacuggaccggcgugacccagaacggcaccagcagcgccugcaucagaagaagcagcagcagcuucuucagcagacugaacuggcugacccaccugaacuacaaguaccccgcccugaacgugaccaugcccaacaacgagcaguucgacaagcuguacaucuggggcgugcaccaccccggcaccgacaaggaccagaucuuccuguacgccagaagcagcggcagaaucaccgugagcaccaagggcagccagcaggccgugauccccaacaucggcagcagacccagaaucagagacauccccagcagaaucagcaucuacuggaccaucgugaagcccggcgacauccugcugaucaacagcaccggcaaccugaucgcccccagaggcuacuucaagaucagaagcggcaagagcagcaucaugagaagcgacgcccccaucggcaagugcaagagcgagugcaucacccccaacggcagcauccccaacgacaagcccuuccagaacgugaacagaaucaccuacggcgccugccccagauacgugaagcacagcacccugaagcuggccaccggcaugagaaacgugcccgagaagcagaccagaggcaucuucggcgccaucgccggcuucaucgagaacggcugggagggcaugguggacggcugguacggcuucagacaccagaacagcgagggcagaggccaggccgccgaccugaagagcacccaggccgccaucgaccagaucaacggcaagcugaacagacugaucggcaagaccaacgagaaguuccaccagaucgagaaggaguucagcgagguggagggcagaauccaggaccuggagaaguacguggaggacaccaagaucgaccuguggagcuacaacgccgagcugcugguggcccuggagaaccagcacaccaucgaccugaccgacagcgagaugaacaagcuguucgagagaaccaagaagcagcugagagagaacgccgaggacaugggcaacggcugcuucaagaucuaccacaagugcgacaacgccugcaucggcagcaucagaaacggcaccuacgaccacaacguguacagagacgaggcccugaacaacagauuccagaucaagggcguggagcugaagagcggcuacaaggacuggauccuguggaucagcuucgccaucagcugcuuccugcugugcguggcccugcugggcuucaucaugugggccugccagaagggcaacaucagaugcaacaucugcaucuga

SEQ ID NO: 173629 - RNA, 1701 nt, Artificial Sequence; identical to SEQ ID NO: 173116
  derived and/or modified CDS sequence (opt4) from hemagglutinin__InfluenzaA__ALE32084

SEQ ID NO: 173630 - RNA, 1701 nt, Artificial Sequence; identical to SEQ ID NO: 173159
  derived and/or modified CDS sequence (opt4) from hemagglutinin__InfluenzaA__ALE32085

SEQ ID NO: 173631 - RNA, 1701 nt, Artificial Sequence
  derived and/or modified CDS sequence (opt4) from hemagglutinin__InfluenzaA__ALE32086
augaagaccaucaucgcccugagcuacauccugugccugguguucgcccagaagauccccggcaacgacaacagcaccgccacccugugccugggccaccacgccgugcccaacggcaccaucgugaagaccaucaccaacgacagaaucgaggugaccaacgccaccgagcuggugcagaacagcagcaucggcgagaucugcgacagcccccaccagauccuggacggcgagaacugcacccugaucgacgcccugcugggcgacccccagugcgacggcuuccagaacaagaagugggaccuguucguggagagaagcaaggccuacagcaacugcuaccccuacgacgugcccgacuacgccagccugagaagccugguggccagcagcggcacccuggaguucaacaacgagagcuucaacuggaccggcgugacccagaacggcaccagcagcgccugcaucagaaagagcagcagcagcuucuucagcagacugaacuggcugacccaccugaacuacaccuaccccgcccugaacgugaccaugcccaacaacgagcaguucgacaagcuguacaucuggggcgugcaccaccccggcaccgacaaggaccagaucuuccuguacgccagaagcagcggcagaaucaccgugagcaccaagagaagccagcaggccgugauccccaacaucggcagcagacccagaaucagagacauccccagcagaaucagcaucuacuggaccaucgugaagcccggcgacauccugcugaucaacagcaccggcaaccugaucgcccccagaggcuacuucaagaucagaagcggcaagagcagcaucaugagaagcgacgcccccaucagcaagugcaagagcgagugcaucacccccaacggcagcauccccaacgacaagcccuuccagaacgugaacagaaucaccuacggcgccugccccagauacgugaagcacagcacccugaagcuggccaccggcaugagaaacgugcccgagaagcagaccagaggcaucuucggcgccaucgccggcuucaucgagaacggcugggagggcaugguggacggcugguacggcuucagacaccagaacagcgagggcagaggccaggccgccgaccugaagagcacccaggccgccaucgaccagaucaacggcaagcugaacagacugaucggcaagaccaacgagaaguuccaccagaucgagaaggaguucagcgagguggagggcagaauccaggaccuggagaaguacguggaggacaccaagaucgaccuguggagcuacaacgccgagcugcugguggcccuggagaaccagcacaccaucgaccugaccgacagcgagaugaacaagcuguucgagaagaccaagaagcagcugagagagaacgccgaggacaugggcaacggcugcuucaagaucuaccacaagugcgacaacgccugcaucggcagcaucagaaacggcaccuacgaccacaacguguacagagacgaggcccugaacaacagauuccagaucaagggcguggagcugaagagcggcuacaaggacuggauccuguggaucagcuucgccaucagcugcuuccugcugugcguggcccugcugggcuucaucaugugggccugccagaagggcaacaucagaugcaacaucugcaucuga

SEQ ID NO: 173632 - RNA, 1701 nt, Artificial Sequence
  derived and/or modified CDS sequence (opt4) from hemagglutinin__InfluenzaA__ALE32087
augaagaccaucaucgcccugagcuacauccugugccugguguucgcccagaagauccccggcaacgacaacagcaccgccacccugugccugggccaccacgccgugcccaacggcaccaucgugaagaccaucaccaacgacagaaucgaggugaccaacgccaccgagcuggugcagaacagcagcaucggcgagaucugcgacagcccccaccagauccuggacggcgagaacugcacccugaucgacgcccugcugggcgacccccagugcgacggcuuccagaacaagaagugggaccuguucguggagagaagcaaggccuacagcaacugcuaccccuacgacgugcccgacuacgccagccugagaagccugguggccagcagcggcacccuggaguucaacaacgagagcuucaacuggaccggcgugacccagaacggcaccagcagcgccugcaucagaaagagcagcagcagcuucuucagcagacugaacuggcugacccaccuggacuacaccuaccccgcccugaacgugaccaugcccaacaacgagcaguucgacaagcuguacaucuggggcgugcaccaccccggcaccgacaaggaccagaucuuccuguacgccagaagcagcggcagaaucaccgugagcaccaagagaagccagcaggccgugauccccaacaucggcagcagacccagaaucagagacauccccagcagaaucagcaucuacuggaccaucgugaagcccggcgacauccugcugaucaacagcaccggcaaccugaucgcccccagaggcuacuucaagaucagaagcggcaagagcagcaucaugagaagcgacgcccccaucggcaagugcaagagcgagugcaucacccccaacggcagcauccccaacgacaagcccuuccagaacgugaacagaaucaccuacggcgccugccccagauacgugaagcacagcacccugaagcuggccaccggcaugagaaacgugcccgagaagcagaccagaggcaucuucggcgccaucgccggcuucaucgagaacggcugggagggcaugguggacggcugguacggcuucagacaccagaacagcgagggcagaggccaggccgccgaccugaagagcacccaggccgccaucgaccagaucaacggcaaccugaacagacugaucggcaagaccaacgagaaguuccaccagaucgagaaggaguucagcgagguggagggcagaauccaggaccuggagaaguacguggaggacaccaagaucgaccuguggagcuacaacgccgagcugcugguggcccuggagaaccagcacaccaucgaccugaccgacagcgagaugaacaagcuguucgagaagaccaagaagcagcugagagagaacgccgaggacaugggcaacggcugcuucaagaucuaccacaagugcgacaacgccugcaucggcagcaucagaaacggcaccuacgaccacaacguguacagagacgaggcccugaacaacagauuccagaucaagggcguggagcugaagagcggcuacaaggacuggauccuguggaucagcuucgccaucagcugcuuccugcugugcguggcccugcugggcuucaucaugugggccugccagaagggcaacaucagaugcaacaucugcaucuga

SEQ ID NO: 173633 - RNA, 1701 nt, Artificial Sequence
  derived and/or modified CDS sequence (opt4) from hemagglutinin__InfluenzaA__ALE32088
augaagaccaucaucgcccugagcuacauccugugccugguguucgcccagaagauccccggcaacgacaacagcaccgccacccugugccugggccaccacgccgugcccaacggcaccaucgugaagaccaucaccaacgacagaaucgaggugaccaacgccaccgagcuggugcagaacagcagcaucggcgagaucugcgacagcccccaccagauccuggacggcgagaacugcacccugaucgacgcccugcugggcgacccccagugcgacggcuuccagaacaagaagugggaccuguucguggagagaagcaaggccuacagcaacugcuaccccuacgacgugcccgacuacgccagccugagaagccugguggccagcagcggcacccuggaguucaacaacgagagcuucaacuggaccggcgugacccagaacggcaccagcagcgccugcaucagaaagagcagcagcagcuucuucagcagacugaacuggcugacccaccugaacuacaccuaccccgcccugaacgugaccaugcccaacaacgagcaguucgacaagcuguacaucuggggcgugcugcaccccggcaccgacaaggaccagaucuuccuguacgccagaagcagcggcagaaucaccgugagcaccaagagaagccagcaggccgugauccccaacaucggcagcagacccagaaucagagacauccccagcagaaucagcaucuacuggaccaucgugaagcccggcgacauccugcugaucaacagcaccggcaaccugaucgcccccagaggcuacuucaagaucagaagcggcaagagcagcaucaugagaagcgacgcccccaucggcaagugcaagagcgagugcaucacccccaacggcagcauccccaacgacaagcccuuccagaacgugaacagaaucaccuacggcgccugccccagauacgugaagcacagcacccugaagcuggccaccggcaugagaaacgugcccgagaagcagaccagaggcaucuucggcgccaucgccggcuucaucgagaacggcugggagggcaugguggacggcugguacggcuucagacaccagaacagcgagggcagaggccaggccgccgaccugaagagcacccaggccgccaucgaccagaucaacggcaagcugaacagacugaucggcaagaccaacgagaaguuccaccagaucgagaaggaguucagcgagguggagggcagaauccaggaccuggagaaguacguggaggacaccaagaucgaccuguggagcuacaacgccgagcugcugguggcccuggagaaccagcacaccguggaccugaccgacagcgagaugaacaagcuguucgagaagaccaagaagcagcugagagagaacgccgaggacaugggcaacggcugcuucaagaucuaccacaagugcgacaacgccugcaucggcagcaucagaaacggcaccuacgaccacaacguguacagagacgaggcccugaacaacagauuccagaucaagggcguggagcugaagagcggcuacaaggacuggauccuguggaucagcuucgccaucagcugcuuccugcugugcguggcccugcugggcuucaucaugugggccugccagaagggcaacaucagaugcaacaucugcaucuga

SEQ ID NO: 173634 - RNA, 1701 nt, Artificial Sequence; identical to SEQ ID NO: 172501
  derived and/or modified CDS sequence (opt4) from hemagglutinin__InfluenzaA__ALE32089

SEQ ID NO: 173635 - RNA, 1701 nt, Artificial Sequence; identical to SEQ ID NO: 172501
  derived and/or modified CDS sequence (opt4) from hemagglutinin__InfluenzaA__ALE32090

SEQ ID NO: 173636 - RNA, 1701 nt, Artificial Sequence; identical to SEQ ID NO: 172501
  derived and/or modified CDS sequence (opt4) from hemagglutinin__InfluenzaA__ALE32091

SEQ ID NO: 173637 - RNA, 1701 nt, Artificial Sequence
  derived and/or modified CDS sequence (opt4) from hemagglutinin__InfluenzaA__ALE32092
augaagaccaucaucgcccugagcuacauccugugccugguguucgcccagaagauccccggcaacgacaacagcaccgccacccugugccugggccaccacgccgugcccaacggcaccaucgugaagaccaucaccaacgacagaaucgaggugaccaacgccaccgagcuggugcagaacagcagcaucggcgagaucugcgacagcccccaccagauccuggacggcgagaacugcacccugaucgacgcccugcugggcgacccccagugcgacggcuuccagaacaagaagugggaccuguucguggagagaagcaaggccuacagcaacugcuaccccuacgacgugcccgacuacgccagccugagaagccugguggccagcagcggcacccuggaguucaacaacgagagcuucaacuggaccggcgugacccagaacggcaccagcagcgccugcaucagaagaagcagcagcagcuucuucagcagacugaacuggcugacccaccugaacuacaccuaccccgcccugaacgugaccaugcccaacaacgagcaguucgacaagcuguacaucuggggcgugcaccaccccggcaccgacaaggaccagaucuuccuguacgcccagagcagcggcagaaucaccgugagcaccaagagaagccagcaggccgugauccccaacaucggcagcagacccagaaucagagacauccccagcagaaucagcaucuacuggaccaucgugaagcccggcgacauccugcugaucaacagcaccggcaaccugaucgcccccagaggcuacuucaagaucagaagcggcaagagcagcaucaugagaagcgacgcccccaucggcaagugcagaagcgagugcaucacccccaacggcagcauccccaacgacaagcccuuccagaacgugaacagaaucaccuacggcgccugccccagauacgugaagcacagcacccugaagcuggccaccggcaugagaaacgugcccgagaagcagaccagaggcaucuucggcgccaucgccggcuucaucgagaacggcugggagggcaugguggacggcugguacggcuucagacaccagaacagcgagggcagaggccaggccgccgaccugaagagcacccaggccgccaucgaccagaucaacggcaagcugaacagacugaucggcaagaccaacgagaaguuccaccagaucgagaaggaguucagcgagguggagggcagaauccaggaccuggagaaguacguggaggacaccaagaucgaccuguggagcuacaacgccgagcugcugguggcccuggagaaccagcacaccaucgaccugaccgacagcgagaugaacaagcuguucgagaagaccaagaagcagcugagagagaacgccgaggacaugggcaacggcugcuucaagaucuaccacaagugcgacaacgccugcaucggcagcaucagaaacggcaccuacgagcacaacguguacagagacgaggcccugaacaacagauuccagaucaagggcguggagcugaagagcggcuacaaggacuggauccuguggaucagcuucgccaucagcugcuuccugcugugcguggcccugcugggcuucaucaugugggccugccagaagggcaacaucagaugcaacaucugcaucuga

SEQ ID NO: 173638 - RNA, 1701 nt, Artificial Sequence; identical to SEQ ID NO: 173107
  derived and/or modified CDS sequence (opt4) from hemagglutinin__InfluenzaA__ALE32093

SEQ ID NO: 173639 - RNA, 1701 nt, Artificial Sequence
  derived and/or modified CDS sequence (opt4) from hemagglutinin__InfluenzaA__ALE32094
augaagaccaucaucgcccugagcuacauccugugccugguguucgcccagaagauccccggcaacgacaacagcaccgccacccugugccugggccaccacgccgugcccaacggcaccaucgugaagaccaucaccaacgacagaaucgaggugaccaacgccaccgagcuggugcagaacagcagcaucggcgagaucugcgacagcccccaccagauccuggacggcgagaacugcacccugaucgacgcccugcugggcgacccccagugcgacggcuuccagaacaagaagugggaccuguucguggagagaagcaaggccuacagcaacugcuaccccuacgacgugcccgacuacgccagccugagaagccugguggccagcagcggcacccuggaguucaacaacgagagcuucaacuggaccggcgugacccagaacggcaccagcagcgccugcaucagaagaagcagcagcagcuucuucagcagacugaacuggcugacccaccugaacuacaccuaccccgcccugaacgugaccaugcccaacaacgagcaguucgacaagcuguacaucuggggcgugcaccaccccggcaccgacaaggaccagaucuuccuguacgcccagagcagcggcagaaucaccgugagcaccaagagaagccagcaggccgugauccccaacaucggcagcagacccagaaucagagacauccccagcagaaucagcaucuacuggaccaucgugaagcccggcgacauccugcugaucaccagcaccggcaaccugaucgcccccagaggcuacuucaagaucagaagcggcaagagcagcaucaugagaagcgacgcccccaucggcaagugcaagagcgagugcaucacccccaacggcagcauccccaacgacaagcccuuccagaacgugaacagaaucaccuacggcgccugccccagauacgugaagcacagcacccugaagcuggccaccggcaugagaaacgugcccgagaagcagaccagaggcaucuucggcgccaucgccggcuucaucgagaacggcugggagggcaugguggacggcugguacggcuucagacaccagaacagcgagggcagaggccaggccgccgaccugaagagcacccaggccgccaucgaccagaucaacggcaagcugaacagacugaucggcaagaccaacgagaaguuccaccagaucgagaaggaguucagcgagguggagggcagaauccaggaccuggagaaguacguggaggacaccaagaucgaccuguggagcuacaacgccgagcugcugguggcccuggagaaccagcacaccaucgaccugaccgacagcgagaugaacaagcuguucgagaagaccaagaagcagcugagagagaacgccgaggacaugggcaacggcugcuucaagaucuaccacaagugcgacaacgccugcaucggcagcaucagaaacggcaccuacgaccacaacguguacagagacgaggcccugaacaacagauuccagaucaagggcguggagcugaagagcggcuacaaggacuggauccuguggaucagcuucgccaucagcugcuuccugcugugcguggcccugcugggcuucaucaugugggccugccagaagggcaacaucagaugcaacaucugcaucuga

SEQ ID NO: 173640 - RNA, 1701 nt, Artificial Sequence; identical to SEQ ID NO: 172501
  derived and/or modified CDS sequence (opt4) from hemagglutinin__InfluenzaA__ALE32095

SEQ ID NO: 173641 - RNA, 1701 nt, Artificial Sequence
  derived and/or modified CDS sequence (opt4) from hemagglutinin__InfluenzaA__ALE32096
augaagaccaucaucgcccugagcuacauccugugccugguguucgcccagaagauccccggcaacgacaacagcaccgccacccugugccugggccaccacgccgugcccaacggcaccaucgugaagaccaucaccaacgacagaaucgaggugaccaacgccaccgagcuggugcagaacagcagcaucggcgagaucugcgacagcccccaccagauccuggacggcgagaacugcacccugaucgacgcccugcugggcgacccccagugcgacggcuuccagaacaagaagugggaccuguucguggagagaagcaaggccuacagcaacugcuaccccuacgacgugcccgacuacgccagccugagaagccugguggccagcagcggcacccuggaguucaacaacgagagcuucaacuggaccggcgugacccagaacggcaccagcagcgccugcaucagaagaagcagcagcagcuucuucagcagacugaacuggcugacccaccugagcuacaccuaccccgcccugaacgugaccaugcccaacaacgagcaguucgacaagcuguacaucuggggcgugcaccaccccggcaccgacaaggaccagaucuuccuguacgcccagagcagcggcagaaucaccgugagcaccaagagaagccagcaggccgugauccccaacaucggcagcagacccagaaucagagacauccccagcagaaucagcaucuacuggaccaucgugaagcccggcgacauccugcugaucaacagcaccggcaaccugaucgcccccagaggcuacuucaagaucagaagcggcaagagcagcaucaugagaagcgacgcccccaucggcaagugcaagagcgagugcaucacccccaacggcagcauccccaacgacaagcccuuccagaacgugaacagaaucaccuacggcgccugccccagauacgugaagcacagcacccugaagcuggccaccggcaugagaaacgugcccgagaagcagaccagaggcaucuucggcgccaucgccggcuucaucgagaacggcugggagggcaugguggacggcugguacggcuucagacaccagaacagcgagggcagaggccaggccgccgaccugaagagcacccaggccgccaucgaccagaucaacggcaagcugaacagacugaucggcaagaccaacgagaaguuccaccagaucgagaaggaguucagcgagguggagggcagaauccaggaccuggagaaguacguggaggacaccaagaucgaccuguggagcuacaacgccgagcugcugguggcccuggagaaccagcacaccaucgaccugaccgacagcgagaugaacaagcuguucgagaagaccaagaagcagcugagagagaacgccgaggacaugggcaacggcugcuucaagaucuaccacaagugcgacaacgccugcaucggcagcaucagaaacggcaccuacgaccacaacguguacagagacgaggcccugaacaacagauuccagaucaagggcguggagcugaagagcggcuacaaggacuggauccuguggaucagcuucgccaucagcugcuuccugcugugcguggcccugcugggcuucaucaugugggccugccagaagggcaacaucagaugcaacaucugcaucuga

SEQ ID NO: 173642 - RNA, 1701 nt, Artificial Sequence; identical to SEQ ID NO: 172501
  derived and/or modified CDS sequence (opt4) from hemagglutinin__InfluenzaA__ALE32097

SEQ ID NO: 173643 - RNA, 1701 nt, Artificial Sequence; identical to SEQ ID NO: 173107
  derived and/or modified CDS sequence (opt4) from hemagglutinin__InfluenzaA__ALE32099

SEQ ID NO: 173644 - RNA, 1701 nt, Artificial Sequence
  derived and/or modified CDS sequence (opt4) from hemagglutinin__InfluenzaA__ALE32100
augaagaccaucaucgcccugagcuacauccugugccugguguucgcccagaagauccccggcaacgacaacagcaccgccacccugugccugggccaccacgccgugcccaacggcaccaucgugaagaccaucaccaacgacagaaucgaggugaccaacgccaccgagcuggugcagaacagcagcaucggcgagaucugcgacagcccccaccagauccuggacggcgagaacugcacccugaucgacgcccugcugggcgacccccagugcgacggcuuccagaacaagaagugggaccuguucguggagagaagcaaggccuacagcaacugcuaccccuacgacgugcccgacuacgccagccugagaagccugguggccagcagcggcacccuggaguucaacaacgagagcuucaacuggaccggcgugacccagaacggcaccagcagcgccugcaucagaagaagcagcagcagcuucuucagcagacugaacuggcugacccaccugaacuacaccuaccccgcccugaacgugaccaugcccaacaacgagcaguucgacaagcuguacaucuggggcgugcaccaccccggcaccgacaaggaccagaucuuccuguacgcccagagcagcggcagaaucaccgugagcaccaagagaagccagcaggccgugauccccaacaucggcagcagacccagaaucagagacauccccagcagaaucagcaucuacuggaccaucgugaagcccggcgacauccugcugaucaacagcaccggcaaccugaucgcccccagaggcuacuucaagaucagaagcggcaagagcagcaucaugagaagcgacgcccccaucggcaagugcaagagcgagugcaucacccccaacggcagcauccccaacgacaagcccuuccagaacgugaacagaaucaccuacggcgccugccccagauacgugaagcacagcacccugaagcuggccaccggcaugagaaacgugcccgagaagcagaccagaggcaucuucggcgccaucgccggcuucaucgagaacggcugggagggcaugguggacggcugguacggcuucagacaccagaacagcgagggcagaggccaggccgccgaccugaagagcacccaggccgccaucgaccagaucaacggcaagcugaacagacugaucggcaagaccaacgagaaguuccaccagaucgagaaggaguucagcgagguggagggcagaauccaggaccuggagaaguacguggaggacaccaagaucgaccuguggagcuacaacgccgaccugcugguggcccuggagaaccagcacaccaucgaccugaccgacagcgagaugaacaagcuguucgagaagaccaagaagcagcugagagagaacgccgaggacaugggcaacggcugcuucaagaucuaccacaagugcgacaacgccugcaucggcagcaucagaaacggcaccuacgaccacaacguguacagagacgaggcccugaacaacagauuccagaucaagggcguggagcugaagagcggcuacaaggacuggauccuguggaucagcuucgccaucagcugcuuccugcugugcguggcccugcugggcuucaucaugugggccugccagaagggcaacaucagaugcaacaucugcaucuga

SEQ ID NO: 173645 - RNA, 1701 nt, Artificial Sequence
  derived and/or modified CDS sequence (opt4) from hemagglutinin__InfluenzaA__ALE32101
augaagaccaucaucgcccugagcuacauccugugccugguguucgcccagaagauccccggcaacgacaacagcaccgccacccugugccugggccaccacgccgugcccaacggcaccaucgugaagaccaucaccaacgacagaaucgaggugaccaacgccaccgagcuggugcagaacagcagcaucggcgagaucugcgacagcccccaccagauccuggacggcgagaacugcacccugaucgacgcccugcugggcgacccccagugcgacggcuuccagaacaagaagugggaccuguucguggagagaagcaaggccuacagccagugcuaccccuacgacgugcccgacuacgccagccugagaagccugguggccagcagcggcacccuggaguucaacaacgagagcuucaacuggaccggcgugacccagaacggcaccagcagcgccugcaucagaaagagcagcggcagcuucuucagcagacugaacuggcugacccaccugaaguacaccuaccccgcccugaacgugaccaugcccaacaacgagcaguucgacaagcuguacaucuggggcgugcaccaccccggcaccgacaaggaccagaucuuccuguacgccagaagcagcggcagaaucaccgugagcaccaagagaagccagcaggccgugauccccaacaucggcagcagacccagaaucagagacauccccagcagaaucagcaucuacuggaccaucgugaagcccggcgacauccugcugaucaacagcaccggcaaccugaucgcccccagaggcuacuucaagaucagaagcggcaagagcagcaucaugagaagcgacgcccccaucggcaagugcaagagcgagugcaucacccccaacggcagcauccccaacgacaagcccuuccagaacgugaacagaaucaccuacggcgccugccccagauacgugaagcacagcacccugaagcuggccaccggcaugagaaacgugcccgagaagcagaccagaggcaucuucggcgccaucgccggcuucaucgagaacggcugggagggcaugguggacggcugguacggcuucagacaccagaacagcgagggcagaggccaggccgccgaccugaagagcacccaggccgccaucgaccagaucaacggcaagcugaacagacugaucggcaagaccaacgagaaguuccaccagaucgagaaggaguucagcgagguggagggcagaauccaggaccuggagaaguacguggaggacaccaagaucgaccuguggagcuacaacgccgagcugcugguggcccuggagaaccagcacaccaucgaccugaccgacagcgagaugaacaagcuguucgagaagaccaagaagcagcugagagagaacgccgaggacaugggcaacggcugcuucaagaucuaccacaagugcgacaacgccugcaucggcagcaucagaaacggcaccuacgaccacaacguguacagagacgaggcccugaacaacagauuccagaucaagggcguggagcugaagagcggcuacaaggacuggauccuguggaucagcuucgccaucagcugcuuccugcugugcguggcccugcugggcuucaucaugugggccugccagaagggcaacaucagaugcaacaucugcaucuga

SEQ ID NO: 173646 - RNA, 1701 nt, Artificial Sequence
  derived and/or modified CDS sequence (opt4) from hemagglutinin__InfluenzaA__ALE32102
augaagaccaucaucgcccugagcuacauccugugccugguguucgcccagaagauccccggcaacgacaacagcaccgccacccugugccugggccaccacgccgugcccaacggcaccaucgugaagaccaucaccaacgacagaaucgaggugaccaacgccaccgagcuggugcagaacagcagcaucggcgagaucugcgacagcccccaccagauccuggacggcgagaacugcacccugaucgacgcccugcugggcgacccccagugcgacggcuuccagaacaagaagugggaccuguucguggagagaagcaaggccuacagcaacugcuaccccuacgacgugcccgacuacgccagccugagaagccugguggccagcagcggcacccuggaguucaacaacgagagcuucaacuggaccggcgugacccagaacggcaccagcagcgccugcaucagaaagagcagcagcagcuucuucagcagacugaacuggcugacccaccugaaguacaccuaccccgcccugaacgugaccaugcccaacaacgagcaguucgacaagcuguacaucuggggcgugcaccaccccggcaccgacaaggaccagaucuuccuguacgccagaagcagcggcagaaucaccgugagcaccaagagaagccagcaggccgugauccccaacaucggcagcagacccagaaucagagacauccccagcagaaucagcaucuacuggaccaucgugaagcccggcgacauccugcugaucaacagcaccggcaaccugaucgcccccagaggcuacuucaagaucagaagcggcaagagcagcaucaugagaagcgacgcccccaucggcaagugcaagagcgagugcaucacccccaacggcagcauccccaacgacaagcccuuccagaacgugaacagaaucaccuacggcgccugccccagauacgugaagcacagcacccugaagcuggccaccggcaugagaaacgugcccgagaagcagaccagaggcaucuucggcgccaucgccggcuucaucgagaacggcugggagggcaugguggacggcugguacggcuucagacaccagaacagcgagggcagaggccaggccgccgaccugaagagcacccaggccgccaucgaccagaucaacggcaagcugaacagacugaucggcaagaccaacgagaaguuccaccagaucgagaaggaguucagcgagguggagggcagaauccaggaccuggagaaguacguggaggacaccaagaucgaccuguggagcuacaacgccgagcugcugguggcccuggagaaccagcacaccaucgaccugaccgacagcgagaugaacaagcuguucgagaagaccaagaagcagcugagagagaacgccgaggacaugggcaacggcugcuucaagaucuaccacaagugcgacaacgccugcaucggcagcaucagaaacggcaccuacgaccacaacguguacagagacgaggcccugagcaacagauuccagaucaagggcguggagcugaagagcggcuacaaggacuggauccuguggaucagcuucgccaucagcugcuuccugcugugcguggcccugcugggcuucaucaugugggccugccagaagggcaacaucagaugcaacaucugcaucuga

SEQ ID NO: 173647 - RNA, 1701 nt, Artificial Sequence; identical to SEQ ID NO: 173214
  derived and/or modified CDS sequence (opt4) from hemagglutinin__InfluenzaA__ALE32103

SEQ ID NO: 173648 - RNA, 1701 nt, Artificial Sequence
  derived and/or modified CDS sequence (opt4) from hemagglutinin__InfluenzaA__ALE32104
augaagaccaucaucgcccugagcuacauccugugccugguguucgcccagaagauccccggcaacgacaacagcaccgccacccugugccugggccaccacgccgugcccaacggcaccaucgugaagaccaucaccaacgaccagaucgaggugaccaacgccaccgagcuggugcagaacagcagcaucggcgagaucugcgacagcccccaccagauccuggacggcgagaacugcacccugaucgacgcccugcugggcgacccccagugcgacggcuuccagaacaagaagugggaccuguucguggagagaagcaaggccuacagcaacugcuaccccuacgacgugcccgacuacgccagccugagaagccugguggccagcagcggcacccuggaguucaacaacgagagcuucaacuggaccggcgugacccagaacggcaccagcagcgccugcaucagaagaagcagcagcagcuucuucagcagacugaacuggcugacccaccugaacuacaccuaccccgcccugaacgugaccaugcccaacaacgagcaguucgacaagcuguacaucuggggcgugcaccaccccggcaccgacaaggaccagaucuuccuguacgcccagagcagcggcagaaucaccgugagcaccaagagaagccagcaggccgugauccccaacaucggcagcagacccagaaucagagacauccccagcagaaucagcaucuacuggaccaucgugaagcccggcgacauccugcugaucaacagcaccggcaaccugaucgcccccagaggcuacuucaagaucagaagcggcaagagcagcaucaugagaagcgacgcccccaucggcaagugcaagagcgagugcaucacccccaacggcagcauccccaacgacaagcccuuccagaacgugaacagaaucaccuacggcgccugccccagauacgugaagcacagcacccugaagcuggccaccggcaugagaaacgugcccgagaagcagaccagaggcaucuucggcgccaucgccggcuucaucgagaacggcugggagggcaugguggacggcugguacggcuucagacaccagaacagcgagggcagaggccaggccgccgaccugaagagcacccaggccgccaucgaccagaucaacggcaagcugaacagacugaucggcaagaccaacgagaaguuccaccagaucgagaaggaguucagcgagguggagggcagaauccaggaccuggagaaguacguggaggacaccaagaucgaccuguggagcuacaacgccgagcugcugguggcccuggagaaccagcacaccaucgaccugaccgacagcgagaugaacaagcuguucgagaagaccaagaagcagcugagagagaacgccgaggacaugggcaacggcugcuucaagaucuaccacaagugcgacaacgccugcaucggcagcaucagaaacggcaccuacgaccacaacguguacagagacgaggcccugaacaacagauuccagaucaagggcguggagcugaagagcggcuacaaggacuggauccuguggaucagcuucgccaucagcugcuuccugcugugcguggcccugcugggcuucaucaugugggccugccagaagggcaacaucagaugcaacaucugcaucuga

SEQ ID NO: 173649 - RNA, 1701 nt, Artificial Sequence; identical to SEQ ID NO: 173159
  derived and/or modified CDS sequence (opt4) from hemagglutinin__InfluenzaA__ALE32105

SEQ ID NO: 173650 - RNA, 1701 nt, Artificial Sequence; identical to SEQ ID NO: 173159
  derived and/or modified CDS sequence (opt4) from hemagglutinin__InfluenzaA__ALE32106

SEQ ID NO: 173651 - RNA, 1701 nt, Artificial Sequence; identical to SEQ ID NO: 173214
  derived and/or modified CDS sequence (opt4) from hemagglutinin__InfluenzaA__ALE32107

SEQ ID NO: 173652 - RNA, 1701 nt, Artificial Sequence; identical to SEQ ID NO: 173444
  derived and/or modified CDS sequence (opt4) from hemagglutinin__InfluenzaA__ALE32108

SEQ ID NO: 173653 - RNA, 1701 nt, Artificial Sequence; identical to SEQ ID NO: 173058
  derived and/or modified CDS sequence (opt4) from hemagglutinin__InfluenzaA__ALE32109

SEQ ID NO: 173654 - RNA, 1701 nt, Artificial Sequence; identical to SEQ ID NO: 173045
  derived and/or modified CDS sequence (opt4) from hemagglutinin__InfluenzaA__ALE32110

SEQ ID NO: 173655 - RNA, 1701 nt, Artificial Sequence; identical to SEQ ID NO: 172501
  derived and/or modified CDS sequence (opt4) from hemagglutinin__InfluenzaA__ALE32111

SEQ ID NO: 173656 - RNA, 1701 nt, Artificial Sequence
  derived and/or modified CDS sequence (opt4) from hemagglutinin__InfluenzaA__ALE32112
augaagaccaucaucgcccugagcuacauccugugccugguguucgcccagaagauccccggcaacgacaacagcaccgccacccugugccugggccaccacgccgugcccaacggcaccaucgugaagaccaucaccaacgacagaaucgaggugaccaacgccaccgagcuggugcagaacagcagcaucggcgagaucugcgacagcccccaccagauccuggacggcgagaacugcacccugaucgacgcccugcugggcgacccccagugcgacggcuuccagaacaagaagugggaccuguucguggagagaagcaaggccuacagcaacugcuaccccuacgacgugcccgacuacgccagccugagaagccugguggccagcagcggcacccuggaguucaacaacgagagcuucaacuggaccggcgugacccagaacggcaccagcagcgccugcaucagaagaagcagcagcagcuucuucagcagacugaacuggcugacccaccugaacuacgccuaccccgcccugaacgugaccaugcccaacaacgagcaguucgacaagcuguacaucuggggcgugcaccaccccggcaccgacaaggaccagaucuuccuguacgcccagagcagcggcagaaucaccgugagcaccaagagaagccagcaggccgugauccccaacaucggcagcagacccagaaucagagacauccccagcagaaucagcaucuacuggaccaucgugaagcccggcgacauccugcugaucaacagcaccggcaaccugaucgcccccagaggcuacuucaagaucagaagcggcaagagcagcaucaugagaagcgacgcccccaucggcaagugcaagagcgagugcaucacccccaacggcagcauccccaacgacaagcccuuccagaacgugaacagaaucaccuacggcgccugccccagauacgugaagcacagcacccugaagcuggccaccggcaugagaaacgugcccgagaagcagaccagaggcaucuucggcgccaucgccggcuucaucgagaacggcugggagggcaugguggacggcugguacggcuucagacaccagaacagcgagggcagaggccaggccgccgaccugaagagcacccaggccgccaucgaccagaucaacggcaagcugaacagacugaucggcaagaccaacgagaaguuccaccagaucgagaaggaguucagcgagguggagggcagaauccaggaccuggagaaguacguggaggacaccaagaucgaccuguggagcuacaacgccgagcugcugguggcccuggagaaccagcacaccaucgaccugaccgacagcgagaugaacaagcuguucgagaagaccaagaagcagcugagagagaacgccgaggacaugggcaacggcugcuucaagaucuaccacaagugcgacaacgccugcaucggcagcaucagaaacggcaccuacgaccacaacguguacagagacgaggcccugaacaacagauuccagaucaagggcguggagcugaagagcggcuacaaggacuggauccuguggaucagcuucgccaucagcugcuuccugcugugcguggcccugcugggcuucaucaugugggccugccagaagggcaacaucagaugcaacaucugcaucuga

SEQ ID NO: 173657 - RNA, 1701 nt, Artificial Sequence
  derived and/or modified CDS sequence (opt4) from hemagglutinin__InfluenzaA__ALE32113
augaagaccaucaucgcccugagcuacauccugugccugguguucgcccagaagauccccggcaacgacaacagcaccgccacccugugccugggccaccacgccgugcccaacggcaccguggugaagaccaucaccaacgacagaaucgaggugaccaacgccaccgagcuggugcagaacagcagcaucggcgagaucugcgacagcccccaccagauccuggacggcgagaacugcacccugaucgacgcccugcugggcgacccccagugcgacggcuuccagaacaagaagugggaccuguucguggagagaagcaaggccuacagcaacugcuaccccuacgacgugcccgacuacgccagccugagaagccugguggccagcagcggcacccuggaguucaacaacgagagcuucaacuggaccggcgugacccagaacggcaccagcagcgccugcaucagaggcagcagcagcagcuucuucagcagacugaacuggcugacccaccugaacuacaccuaccccgcccugaacgugaccaugcccaacaacgagcaguucgacaagcuguacaucuggggcgugcaccaccccggcaccgacaaggaccagaucuuccuguacgcccagagcagcggcagaaucaccgugagcaccaagagaagccagcaggccgugauccccaacaucggcagcagacccagaaucagagacauccccagcagaaucagcaucuacuggaccaucgugaagcccggcgacauccugcugaucaacagcaccggcaaccugaucgcccccagaggcuacuucaagaugagaagcggcaagagcagcaucaugagaagcgacgcccccaucggcaagugcaagagcgagugcaucacccccaacggcagcauccccaacgacaagcccuuccagaacgugaacagaaucaccuacggcgccugccccagauacgugaagcacagcacccugaagcuggccaccggcaugagaaacgugcccgagaagcagaccagaggcaucuucggcgccaucgccggcuucaucgagaacggcugggagggcaugguggacggcugguacggcuucagacaccagaacagcgagggcagaggccaggccgccgaccugaagagcacccaggccgccaucgaccagaucaacggcaagcugaacagacugaucggcaagaccaacgagaaguuccaccagaucgagaaggaguucagcgagguggagggcagaauccaggaccuggagaaguacguggaggacaccaagaucgaccuguggagcuacaacgccgagcugcugguggcccuggagaaccagcacaccaucgaccugaccgacagcgagaugaacaagcuguucgagaagaccaagaagcagcugagagagaacgccgaggacaugggcaacggcugcuucaagaucuaccacaagugcgacaacgccugcaucggcagcaucagaaacggcaccuacgaccacaacguguacagagacgaggcccugaacaacagauuccagaucaagggcguggagcugaagagcggcuacaaggacuggauccuguggaucagcuucgccaucagcugcuuccugcugugcguggcccugcugggcuucaucaugugggccugccagaagggcaacaucagaugcaacaucugcaucuga

SEQ ID NO: 173658 - RNA, 1701 nt, Artificial Sequence; identical to SEQ ID NO: 173045
  derived and/or modified CDS sequence (opt4) from hemagglutinin__InfluenzaA__ALE32114

SEQ ID NO: 173659 - RNA, 1701 nt, Artificial Sequence; identical to SEQ ID NO: 173045
  derived and/or modified CDS sequence (opt4) from hemagglutinin__InfluenzaA__ALE32115

SEQ ID NO: 173660 - RNA, 1701 nt, Artificial Sequence
  derived and/or modified CDS sequence (opt4) from hemagglutinin__InfluenzaA__ALE32116
augaagaccaucaucgcccugagcuacauccugugccugguguucgcccagaagauccccggcaacgacaacagcaccgccacccugugccugggccaccacgccgugcccaacggcaccaucgugaagaccaucaccaacgacagaaucgaggugaccaacgccaccgagcuggugcagaacagcagcaucggcgagaucugcgacagcccccaccagauccuggacggcgagaacugcacccugaucgacgcccugcugggcgacccccagugcgacggcuuccagaacaagaagugggaccuguucguggagagaagcaaggccuacagcaacugcuaccccuacgacgugcccgacuacgccagccugagaagccugguggccagcagcggcacccuggaguucaacaacgagagcuucaacuggaccggcgugacccagaacggcaccagcagcgccugcaucagaagaagcagcagcagcuucuucagcagacugaacuggcugacccaccugaacuacaccuaccccgcccugaacgugaccaugcccaacaacgagcaguucgacaagcuguacaucuggggcgugcaccaccccggcaccgacaaggaccagaucuuccuguacgcccagagcagcggcagaaucaccgugagcaccaagagaagccagcaggccgugauccccaacaucggcagcagacccagaaucagagacauccccagcagaaucagcaucuacuggaccaucgugaagcccggcgacauccugcugaucaacagcaccggcaaccugaucgcccccagaggcuacuucaagaucagaagcggcaagagcagcaucaugagaagcgacgcccccaucggcaagugcaagagcgagugcaucacccccaacggcagcauccccaacgacaagcccuuccagaacgugaacagaaucaccuacggcgccugccccagauacgugaagcacagcacccugaagcuggccaccggcaugagaaacgugcccgagaagcagaccagaggcaucuucggcgccaucgccggcuucaucgagaacggcugggagggcaugguggacggcugguacggcuucagacaccagaacagcgagggcagaggccaggccgccgaccugaagagcacccaggccgccaucgaccagaucaacggcaagcugaacagacugaucggcaagaccaacgagaaguuccaccagaucgagaaggaguucagcgagguggagggcagaauccaggaccuggagaaguacguggaggacaccaagaucgaccuguggagcuacaacgccgagcugcugguggcccuggagaaccagcacaccaucgaccugaccgacagcgagaugaacaagcuguucgagaagaccaagaagcagcugagagagaacgccgaggacaugggcaacggcugcuucaagaucuaccacaagugcgacaacgccugcaucggcagcaucagaaacggcaccuacgaccacaacguguacagagacgaggcccugaacaacagauuccagaucaagggcguggagcugaagagcggcuacaaggacuggauccuguggaucagcuucgccaucagcugcuuccugcugugcguggcccugcugggcuucaucaugugggccugccagaagggcaacgugagaugcaacaucugcaucuga

SEQ ID NO: 173661 - RNA, 1701 nt, Artificial Sequence
  derived and/or modified CDS sequence (opt4) from hemagglutinin__InfluenzaA__ALE32117
augaagaccaucaucgcccugagcuacauccugugccugguguucgcccagaagauccccggcaacgacaacagcaccgccacccugugccugggccaccacgccgugcccaacggcaccaucgugaagaccaucaccaacgacagaaucgaggugaccaacgccaccgagcuggugcagaacagcagcaucggcgagaucugcgacagcccccaccagauccuggacggcgagaacugcacccugaucgacgcccugcugggcgacccccagugcgacggcuuccagaacaagaagugggaccuguucguggagagaagcaaggccuacagcaacugcuaccccuacgacgugcccgacuacgccagccugagaagccugguggccagcagcggcacccuggaguucaacaacgagagcuucaacuggaccggcgugacccagaacggcaccagcagcgccugcaucagaagaagcagcagcagcuucuucagcagacugaacuggcugacccaccugaacuacaccuaccccgcccugaacgugaccaugcccaacaacgagcaguucgacaagcuguacaucuggggcgugcaccaccccggcaccgacaaggaccagaucuuccuguacgcccagagcagcggcagaaucaccgugagcaccaagagaagccagcaggccgugauccccaacaucggcagcagacccagaaucagagacauccccagcagaaucagcaucuacuggaccaucgugaagcccggcgacauccugcugaucaacagcaccggcaaccugaucgcccccagaggcuacuucaagaucagaagcggcaagagcagcaucaugagaagcgacgcccccaucggcaagugcaagagcgagugcaucacccccaacggcagcauccccaacgacaagcccuuccagaacgugaacagaaucaccuacggcgccugccccagauacgugaagcacagcacccugaagcuggccaccggcaugagaaacgugcccgagaagcagaccagaggcaucuucggcgccaucgccggcuucaucgagaacggcugggagggcaugguggacggcugguacggcuucagacaccagaacagcgagggcagaggccaggccgccgacuucaagagcacccaggccgccaucgaccagaucaacggcaagcugaacagacugaucggcaagaccaacgagaaguuccaccagaucgagaaggaguucagcgagguggagggcagaauccaggaccuggagaaguacguggaggacaccaagaucgaccuguggagcuacaacgccgagcugcugguggcccuggagaaccagcacaccaucgaccugaccgacagcgagaugaacaagcuguucgagaagaccaagaagcagcugagagagaacgccgaggacaugggcaacggcugcuucaagaucuaccacaagugcgacaacgccugcaucggcagcaucagaaacggcaccuacgaccacaacguguacagagacgaggcccugaacaacagauuccagaucaagggcguggagcugaagagcgaguacaaggacuggauccuguggaucagcuucgccaucagcugcuuccugcugugcguggcccugcugggcuucaucaugugggccugccagaagggcaacaucagaugcaacaucugcaucuga

SEQ ID NO: 173662 - RNA, 1701 nt, Artificial Sequence; identical to SEQ ID NO: 173107
  derived and/or modified CDS sequence (opt4) from hemagglutinin__InfluenzaA__ALE32118

SEQ ID NO: 173663 - RNA, 1701 nt, Artificial Sequence; identical to SEQ ID NO: 162729
  derived and/or modified CDS sequence (opt4) from hemagglutinin__InfluenzaA__ALM06086

SEQ ID NO: 173664 - RNA, 1701 nt, Artificial Sequence; identical to SEQ ID NO: 170100
  derived and/or modified CDS sequence (opt4) from hemagglutinin__InfluenzaA__ALM06087

SEQ ID NO: 173665 - RNA, 1701 nt, Artificial Sequence
  derived and/or modified CDS sequence (opt4) from hemagglutinin__InfluenzaA__ALM06088
augaaggccauccugguggugcugcuguacaccuucgccaccgccaacgccgacacccugugcaucggcuaccacgccaacaacagcaccgacaccguggacaccgugcuggagaagaacgugaccgugacccacagcgugaaccugcuggaggacaagcacaacggcaagcugugcaagcugagaggcguggccccccugcaccugggcaagugcaacaucgccggcuggauccugggcaaccccgagugcgagagccugagcaccgccagcagcuggagcuacaucguggagaccagcagcagcgacaacggcaccugcuaccccggcgacuucaucaacuacgaggagcugagagagcagcugagcagcgugagcagcuucgagagauucgagaucuuccccaagaccagcagcuggcccaaccacgacagcaacaagggcgugaccgccgccugcccccacgccggcgccaagagcuucuacaagaaccugaucuggcuggugaagaagggcaacagcuaccccaagcugagccagagcuacaucaacgacaagggcaaggaggugcuggugcuguggggcauccaccaccccagcaccaccgccgaccagcagagccuguaccagaacgccgacgccuacguguucgugggcaccagcagauacagcaagaaguucaagcccgagaucgccaucagacccaaggugagaggccaggagggcagaaugaacuacuacuggacccugguggagcccggcgacaagaucaccuucgaggccaccggcaaccugguggugcccagauacgccuucaccauggagagaaacgccggcagcggcaucaucaucagcgacacccccgugcacgacugcaacaccaccugccagacccccgagggcgccaucaacaccagccugcccuuccagaacauccaccccaucaccaucggcaagugccccaaguacgugaagagcaccaagcugagacuggccaccggccugagaaacgugcccagcauccagagcagaggccuguucggcgccaucgccggcuucaucgagggcggcuggaccggcaugguggacggcugguacggcuaccaccaccagaacgagcagggcagcggcuacgccgccgaccugaagagcacccagaacgccaucgacaagaucaccaacaaggugaacagcgugaucgagaagaugaacacccaguucaccgccgugggcaaggaguucaaccaccuggagaagagaaucgagaaccugaacaagaagguggacgacggcuuccuggacaucuggaccuacaacgccgagcugcuggugcugcuggagaacgagagaacccuggacuaccacgacagcaacgugaagaaccuguacgagaaggugagaaaccagcugaagaacaacgccaaggagaucggcaacggcugcuucgaguucuaccacaagugcgacaacaccugcauggagagcgugaagaacggcaccuacgacuaccccaaguacagcgaggaggccaagcugaacagagagaagaucgacggcgugaagcuggagagcaccagaaucuaccagauccuggccaucuacagcaccguggccagcagccuggugcugguggugagccugggcgccaucagcuucuggaugugcagcaacggcagccugcagugcagaaucugcaucuga

SEQ ID NO: 173666 - RNA, 1701 nt, Artificial Sequence; identical to SEQ ID NO: 170100
  derived and/or modified CDS sequence (opt4) from hemagglutinin__InfluenzaA__ALM06089

SEQ ID NO: 173667 - RNA, 1701 nt, Artificial Sequence
  derived and/or modified CDS sequence (opt4) from hemagglutinin__InfluenzaA__ALN39661
augaagaccaucaucgcccugagcuacauccugugccugguguucgcccagaagauccccggcaacgacaacagcaccgccacccugugccugggccaccacgccgugcccaacggcaccaucgugaagaccaucaccaacgacagaaucgaggugaccaacgccaccgagcuggugcagaacagcagcaucggcgagaucugcgacagcccccaccagauccuggacggcgagaacugcacccugaucgacgcccugcugggcgacccccagugcgacggcuuccagaacaagaagugggaccuguucguggagagaagcaaggccuacagcaacugcuaccccuacgacgugcccgacuacgccagccugagaagccugguggccagcagcggcacccuggaguucaacaacgagagcuucaacuggaccggcgugacccagaacggcaccagcagcgccugcaucagaagaagcagcagcagcuucuucagcagacugaacuggcugacccaccugaacuacaccuaccccgcccugaacgugaccaugcccaacaacgagcaguucgacaagcuguacaucuggggcgugcaccaccccggcaccgacaaggaccagaucuuccuguacgcccagagcagcggcagaaucaccgugagcaccaagagaagccagcaggccgugauccccaacaucggcagcagacccagaaucagagacauccccagcagaaucagcaucuacuggaccaucgugaagcccggcgacauccugcugaucaacagcaccggcaaccugaucgcccccagaggcuacuucaagaucagaagcggcaagagcagcaucaugagaagcgacgcccccaucggcaagugcaagagcgagugcaucacccccaacggcagcauccccaacgacaagcccuuccagaacgugaacagaaucaccuacggcgccugccccagauacgugaagcacagcacccugaagcuggccaccggcaugagaaacgugcccgagaagcagaccagaggcaucuucggcgccaucgccggcuucaucgagaacggcugggagggcaugguggacggcugguacggcuucagacaccagaacagcgagggcagaggccaggccgccgaccugaagagcacccaggccgccaucgaccagaucaacggcaagcugaacagacugaucggcaagaccaacgagaaguuccaccagaucgagaaggaguucagcgagguggagggcagaauccaggaccuggagaaguacguggaggacaccaagaucgaccuguggagcuacaacgccgagcugcugguggcccuggagaaccagcacaccaucgaccugaccgacagcgagaugaacaagcuguucgagaagaccaagaagcagcugagagagaacgccgaggacaugggcaacggcugcuucaagaucuaccacaagugcgacaacgccugcaucggcagcaucagaaacggcaccuacgaccacaacguguacagagacgaggcccugaacaacagauuccagaucaagggcguggagcugaagagcggcuacaaggacuggauccuguggaucagcuucgccaucagcugcuuccugcugugcaucgcccugcugggcuucaucaugugggccugccagaagggcaacaucagaugcaacaucugcaucuga

SEQ ID NO: 173668 - RNA, 1701 nt, Artificial Sequence; identical to SEQ ID NO: 173034
  derived and/or modified CDS sequence (opt4) from hemagglutinin__InfluenzaA__ALN39662

SEQ ID NO: 173669 - RNA, 1701 nt, Artificial Sequence; identical to SEQ ID NO: 172501
  derived and/or modified CDS sequence (opt4) from hemagglutinin__InfluenzaA__ALN39663

SEQ ID NO: 173670 - RNA, 1701 nt, Artificial Sequence
  derived and/or modified CDS sequence (opt4) from hemagglutinin__InfluenzaA__ALN39664
augaagaccaucaucgcccugagcuacauccugugccugguguucgcccagaagcugcccggcaacgacaacagcaccgccacccugugccugggccaccacgccgugcccaacggcaccaucgugaagaccaucaccaacgacagaaucgaggugaccaacgccaccgagcuggugcagaacagcagcaucggcgagaucugcgacagcccccaccagauccuggacggcgagaacugcacccugaucgacgcccugcugggcgacccccagugcgacggcuuccagaacaagaagugggaccuguucguggagagaagcaaggccuacagcaacugcuaccccuacgacgugcccgacuacgccagccugagaagccugguggccagcagcggcacccuggaguucaacaacgagagcuucaacugggccggcgugacccagaacggcaccagcagcagcugcaucagaggcagcaacagcagcuucuucagcagacugaacuggcugacccaccugaacagcaaguaccccgcccugaacgugaccaugcccaacaacgagcaguucgacaagcuguacaucuggggcgugcaccaccccggcaccgacaaggaccagaucuuccuguacgcccagcccagcggcagagugaccgugagcaccaagagaagccagcaggccgugauccccaacaucggcagcagacccagaaucagagacauccccagcagaaucagcaucuacuggaccaucgugaagcccggcgacauccugcugaucaacagcaccggcaaccugaucgcccccagaggcuacuucaagaucagaagcggcaagagcagcaucaugagaagcgacgcccccaucggcaagugcaagagcgagugcaucacccccaacggcagcauccccaacgacaagcccuuccagaacgugaacagaaucaccuacggcgccugccccagauacgugaagcagagcacccugaagcuggccaccggcaugagaaacgugcccgagagacagaccagaggcaucuucggcgccaucgccggcuucaucgagaacggcugggagggcaugguggacggcugguacggcuucagacaccagaacagcgagggcagaggccaggccgccgaccugaagagcacccaggccgccaucgaccagaucaacggcaagcugaacagacugaucggcaagaccaacgagaaguuccaccagaucgagaaggaguucagcgagguggagggcagaauccaggaccuggagaaguacguggaggacaccaagaucgaccuguggagcuacaacgccgagcugcugguggcccuggagaaccagcacaccaucgaccugaccgacagcgagaugaacaagcuguucgagaagaccaagaagcagcugagagagaacgccgaggacaugggcaacggcugcuucaagaucuaccacaagugcgacaacgccugcaucggcagcaucagaaacggcaccuacgaccacgacguguacagagacgaggcccugaacaacagauuccagaucaagggcguggagcugaagagcggcuacaaggacuggauccuguggaucagcuucgccaucagcugcuuccugcugugcguggcccugcugggcuucaucaugugggccugccagaagggcaacaucagaugcaacaucugcaucuga

SEQ ID NO: 173671 - RNA, 1701 nt, Artificial Sequence; identical to SEQ ID NO: 172501
  derived and/or modified CDS sequence (opt4) from hemagglutinin__InfluenzaA__ALN39665

SEQ ID NO: 173672 - RNA, 1701 nt, Artificial Sequence; identical to SEQ ID NO: 173107
  derived and/or modified CDS sequence (opt4) from hemagglutinin__InfluenzaA__ALN39666

SEQ ID NO: 173673 - RNA, 1701 nt, Artificial Sequence
  derived and/or modified CDS sequence (opt4) from hemagglutinin__InfluenzaA__ALN39667
augaagaccaucaucgcccugagcuacauccugugccugguguucgcccagaagcugcccggcaacgacaacagcaccgccacccugugccugggccaccacgccgugcccaacggcaccaucgugaagaccaucaccaacgacagaaucgaggugaccaacgccaccgagcuggugcagaacagcagcaucggcgagaucugcaacagcccccaccagauccuggacggcgagaacugcacccugaucgacgcccugcugggcgacccccagugcgacggcuuccagaacaagaagugggaccuguucguggagagaagcaaggccuacagcaacugcuaccccuacgacgugcccgacuacgccagccugagaagccugguggccagcagcggcacccuggaguucaacaacgagagcuucaacugggccggcgugacccagaacggcaccagcagcgccugcaucagaggcagcaacagcagcuucuucagcagacugaacuggcugacccacagcaacuucaaguaccccgcccugaacgugaccaugcccaacaacgagcaguucgacaagcuguacaucuggggcgugcaccaccccggcaccgacaaggaccagaucuuccuguacgcccagagcagcggcagaaucaccgugagcaccaagagaagccagcaggccgugacccccaacaucggcagcagacccagaaucagaaacauccccagcagaaucagcaucuacuggaccaucgugaagcccggcgacauccugcugaucaacagcaccggcaaccugaucgcccccagaggcuacuucaagaucagaagcggcaagagcagcaucaugagaagcgacgcccccaucggcaagugcaagagcgagugcaucacccccaacggcagcauccccaacgacaagcccuuccagaacgugaacagaaucaccuacggcgccugccccagauacgugaagcagagcacccugaagcuggccaccggcaugagaaacgugcccgagaagcagaccagaggcaucuucggcgccaucgccggcuucaucgagaacggcugggagggcaugaaggacggcugguacggcuucagacaccagaacagcgagggcagaggccaggccgccgaccugaagagcacccaggccgccaucgaccagaucaacggcaagcugaacagacugaucggcaagaccaacgagaaguuccaccagaucgagaaggaguucagcgagguggagggcagaauccaggaccuggagaaguacguggaggacaccaagaucgaccuguggagcuacaacgccgagcugcugguggcccuggagaaccagcacaccaucgaccugaccgacagcgagaugaacaagcuguucgagaagaccaagaagcagcugagagagaacgccgaggacaugggcaacggcugcuucaagaucuaccacaagugcgacaacgccugcaucggcagcaucagaaacggcaccuacgaccacgacguguacagaaacgaggcccugaacaacagauuccagaucaagggcguggagcugaagagcggcuacaaggacuggauccuguggaucagcuucgccaucagcugcuuccugcugugcguggcccugcugggcuucaucaugugggccugccagaagggcaacaucagaugcaacaucugcaucuga

SEQ ID NO: 173674 - RNA, 1701 nt, Artificial Sequence; identical to SEQ ID NO: 173576
  derived and/or modified CDS sequence (opt4) from hemagglutinin__InfluenzaA__ALN39668

SEQ ID NO: 173675 - RNA, 1701 nt, Artificial Sequence
  derived and/or modified CDS sequence (opt4) from hemagglutinin__InfluenzaA__ALN39669
augaagaccaucaucgcccugagcuacauccugugccugguguucgcccagaagauccccggcaacgacaacagcaccgccacccugugccugggccaccacgccgugcccaacggcaccaucgugaagaccaucaccaacgacagaaucgaggugaccaacgccaccgagcuggugcagaacagcagcaucggcgagaucugcgacagcccccaccagauccuggacggcgagaacugcacccugaucgacgcccugcugggcgacccccagugcgacggcuuccagaacaagaagugggaccuguucguggagagaagcaaggccuacagcaacugcuaccccuacgacgugcccgacuacgccagccugagaagccugguggccagcagcggcacccuggaguucaacaacgagagcuucaacuggaccggcgugacccagaacggcaccagcagcgccugcaucagaagaagcagcagcagcuucuucagcagacugaacuggcugacccaccugaacuacaccuaccccgcccugaacgugaccaugcccaacaacgagcaguucgacaagcuguacaucuggggcgugcaccaccccggcaccgacaaggaccagaucuuccuguacgcccagcugagcggcagaaucaccgugagcaccaagagaagccagcaggccgugauccccaacaucggcagcagacccagaaucagagacauccccagcagaaucagcaucuacuggaccaucgugaagcccggcgacauccugcugaucaacagcaccggcaaccugaucgcccccagaggcuacuucaagaucagaagcggcaagagcagcaucaugagaagcgacgcccccaucggcaagugcaagagcgagugcaucacccccaacggcagcauccccaacgacaagcccuuccagaacgugaacagaaucaccuacggcgccugccccagauacgugaagcacagcacccugaagcuggccaccggcaugagaaacgugcccgagaagcagaccagaggcaucuucggcgccaucgccggcuucaucgagaacggcugggagggcaugguggacggcugguacggcuucagacaccagaacagcgagggcagaggccaggccgccgaccugaagagcacccaggccgccaucgaccagaucaacggcaagcugaacagacugaucggcaagaccaacgagaaguuccaccagaucgagaaggaguucagcgagguggagggcagaauccaggaccuggagaaguacguggaggacaccaagaucgaccuguggagcuacaacgccgagcugcugguggcccuggagaaccagcacaccaucgaccugaccgacagcgagaugaacaagcuguucgagaagaccaagaagcagcugagagagaacgccgaggacaugggcaacggcugcuucaagaucuaccacaagugcgacaacgccugcaucggcagcaucagaaacggcaccuacgaccacaacguguacagagacgaggcccugaacaacagauuccagaucaagggcguggagcugaagagcggcuacaaggacuggauccuguggaucagcuucgccaucagcugcuuccugcugugcguggcccugcugggcuucaucaugugggccugccagaagggcaacaucagaugcaacaucugcaucuga

SEQ ID NO: 173676 - RNA, 1701 nt, Artificial Sequence; identical to SEQ ID NO: 172501
  derived and/or modified CDS sequence (opt4) from hemagglutinin__InfluenzaA__ALN39670

SEQ ID NO: 173677 - RNA, 1701 nt, Artificial Sequence
  derived and/or modified CDS sequence (opt4) from hemagglutinin__InfluenzaA__ALN39671
augaagaccaucaucgcccugagcuacauccugugccugguguucgcccagaagauccccggcaacgacaacagcaccgccacccugugccugggccaccacgccgugcccaacggcaccaucgugaagaccaucaccaacgacagaaucgaggugaccaacgccaccgagcuggugcagaacagcagcaucggcgagaucugcgacagcccccaccagauccuggacggcgagaacugcacccugaucgacgcccugcugggcgacccccagugcgacggcuuccagaacaagaagugggaccuguucguggagagaagcaaggccuacagcaacugcuaccccuacgacgugcccgacuacgccagccugagaagccugguggccagcagcggcacccuggaguucaacaacgagagcuucaacuggaccggcgugacccagaacggcaccagcagcgccugcaucagaagaagcagcagcagcuucuucagcagacugaacuggcugacccaccugaacuacaccuaccccgcccugaacgugaccaugcccaacaacgagcaguucgacaagcuguacaucuggggcgugcaccaccccggcaccgacaaggaccagaucuuccuguacgcccagagcagcggcagaaucaccgugagcaccaagagaagccagcaggccgugauccccaacaucggcagcagacccagaaucagagacauccccagcagaaucagcaucuacuggaccaucgugaagcccggcgacauccugcugaucaacagcaccggcaaccugaucgcccccagaggcuacuucaagaucagaagcggcaagagcagcaucaugagaagcgacgcccccaucggcaagugcaagagcgagugcaucacccccaacggcagcauccccaacgacaagcccuuccagaacgugaacagaaucaccuacggcgccugccccagauacgugaagcacagcacccugaagcuggccaccggcaugagaaacgugcccgagaagcagaccagaggcaucuucggcgccaucgccggcuucaucgagaacggcugggagggcaugguggacggcugguacggcuucagacaccagaacagcgagggcagaggccaggccgccgaccugaagagcacccaggccgccaucgaccagaucaacggcaagcugaacagacugaucggcaagaccaacgagaaguuccaccagaucgagaaggaguucagcgagguggagggcagaauccaggaccuggagaaguacguggaggacaccaagaucgaccuguggagcuacaacgccgagcugcugguggcccuggagaaccagcacaccaucgaccugaccgacagcgagaugaacaagcuguucgagaagaccagaaagcagcugagagagaacgccgaggacaugggcaacggcugcuucaagaucuaccacaagugcgacaacgccugcaucggcagcaucagaaacggcaccuacgaccacaacguguacagagacgaggcccugaacaacagauuccagaucaagggcguggagcugaagagcggcuacaaggacuggauccuguggaucagcuucgccaucagcugcuuccugcugugcguggcccugcugggcuucaucaugugggccugccagaagggcaacaucagaugcaacaucugcaucuga

SEQ ID NO: 173678 - RNA, 1701 nt, Artificial Sequence; identical to SEQ ID NO: 172501
  derived and/or modified CDS sequence (opt4) from hemagglutinin__InfluenzaA__ALN39672

SEQ ID NO: 173679 - RNA, 1701 nt, Artificial Sequence
  derived and/or modified CDS sequence (opt4) from hemagglutinin__InfluenzaA__ALN39673
augaagaccaucaucgcccugagcuacauccugugccugguguucgcccagaagauccccggcaacgacaacagcaccgccacccugugccugggccaccacgccgugcccaacggcaccaucgugaagaccaucaccaacgacagaaucgaggugaccaacgccaccgagcuggugcagaacagcagcaucggcgagaucugcgacagcccccaccagauccuggacggcgagaacugcacccugaucgacgcccugcugggcgacccccagugcgacggcuuccagaacaagaagugggaccuguucguggagagaagcaaggccuacagcaacugcuaccccuacgacgugcccgacuacgccagccugagaagccugguggccagcagcggcacccuggaguucaacaacgagagcuucaacuggaccggcgugacccagaacggcaccagcagcgccugcaucagaagaagcagcagcagcuucuucagcagacugaacuggcugacccaccugaacuacaccuaccccgcccugaacgugaccaugcccaacaacgagcaguucgacaagcuguacaucuggggcgugcaccaccccggcaccgacaaggaccagaucuuccuguacgcccagagcagcggcagaaucaccgugagcaccaagagaagccagcaggccgugauccccgacaucggcagcagacccagaaucagagacauccccagcagaaucagcaucuacuggaccaucgugaagcccggcgacauccugcugaucaacagcaccggcaaccugaucgcccccagaggcuacuucaagaucagaagcggcaagagcagcaucaugagaagcgacgcccccaucggcaagugcaagagcgagugcaucacccccaacggcagcauccccaacgacaagcccuuccagaacgugaacagaaucaccuacggcgccugccccagauacgugaagcacagcacccugaagcuggccaccggcaugagaaacgugcccgagaagcagaccagaggcaucuucggcgccaucgccggcuucaucgagaacggcugggagggcaugguggacggcugguacggcuucagacaccagaacagcgagggcagaggccaggccgccgaccugaagagcacccaggccgccaucgaccagaucaacggcaagcugaacagacugaucggcaagaccaacgagaaguuccaccagaucgagaaggaguucagcgagguggagggcagaauccaggaccuggagaaguacguggaggacaccaagaucgaccuguggagcuacaacgccgagcugcugguggcccuggagaaccagcacaccaucgaccugaccgacagcgagaugaacaagcuguucgagaagaccaagaagcagcugagagagaacgccgaggacaugggcaacggcugcuucaagaucuaccacaagugcgacaacgccugcaucggcagcaucagaaacggcaccuacgaccacaacguguacagagacgaggcccugaacaacagauuccagaucaagggcguggagcugaagagcggcuacaaggacuggauccuguggaucagcuucgccaucagcugcuuccugcugugcguggcccugcugggcuucaucaugugggccugccagaagggcaacaucagaugcaacaucugcaucuga

SEQ ID NO: 173680 - RNA, 1701 nt, Artificial Sequence; identical to SEQ ID NO: 173041
  derived and/or modified CDS sequence (opt4) from hemagglutinin__InfluenzaA__ALN39674

SEQ ID NO: 173681 - RNA, 1701 nt, Artificial Sequence; identical to SEQ ID NO: 172501
  derived and/or modified CDS sequence (opt4) from hemagglutinin__InfluenzaA__ALN39675

SEQ ID NO: 173682 - RNA, 1701 nt, Artificial Sequence
  derived and/or modified CDS sequence (opt4) from hemagglutinin__InfluenzaA__ALN39676
augaagaccaucaucgcccugagcugcauccugugccugguguucgcccagaagcugcccggcaacgacaacagcaccgccacccugugccugggccaccacgccgugcccaacggcaccaucgugaagaccaucaccaacgacagaaucgaggugaccaacgccaccgagcuggugcagaacagcagcaucggcgagaucugcgacagcccccaccagauccuggacggcgagaacugcacccugaucgacgcccugcugggcgacccccagugcgacggcuuccagaacaagaagugggaccuguucguggagagaagcaaggccuacagcaacugcuaccccuacgacgugcccgacuacgccagccugagaagccugguggccagcagcggcacccuggaguucaacaacgagaacuucaacugggccggcgugacccagaacggcaccagcagcagcugcaucagaggcagcaacagcagcuucuucagcagacugaacuggcugacccaccugaacagcaaguaccccgcccugaacgugaccaugcccaacaacgagcaguucgacaagcuguacaucuggggcgugcaccaccccggcaccgacaaggaccagaucuuccuguacgcccagagcagcggcagaaucaccgugagcaccaagagaagccagcaggccgugauccccaacaucggcagcagacccagaaucagagacauccccagcagaaucagcaucuacuggaccaucgugaagcccggcgacauccugcugaucaacagcaccggcaaccugaucgcccccagaggcuacuucagaaucagaagcggcaagagcagcaucaugagaagcgacgcccccaucggcaagugcaagagcgagugcaucacccccaacggcagcauccccaacgacaagcccuuccagaacgugaacagaaucaccuacggcgccugccccagauacgugaagcagaacacccugaagcuggccaccggcaugagaaacgugcccgagagacagaccagaggcaucuucggcgccaucgccggcuucaucgagaacggcugggagggcaugguggacggcugguacggcuucagacaccagaacagcgagggcagaggccaggccgccgaccugaagagcacccagagcgccaucgaccagaucaacggcaagcugaacagacugaucggcaagaccaacgagaaguuccaccagaucgagaaggaguucagcgagguggagggcagaauccaggaccuggagaaguacguggaggacaccaagaucgaccuguggagcuacaacgccgagcugcugguggcccuggagaaccagcacaccaucgaccugaccgacagcgagaugaacaagcuguucgagaagaccaagaagcagcugagagagaacgccgaggacaugggcaacggcugcuucaagaucuaccacaagugcgacaacgccugcaucggcagcaucagaaacggcaccuacgaccacgacguguacagagacgaggcccugaacaacagauuccagaucaagggcguggagcugaagagcggcuacaaggacuggauccuguggaucagcuucgccaucagcugcuuccugcugugcguggcccugcugggcuucaucaugugggccugccagaagggcaacaucagaugcaacaucugcaucuga

SEQ ID NO: 173683 - RNA, 1701 nt, Artificial Sequence
  derived and/or modified CDS sequence (opt4) from hemagglutinin__InfluenzaA__ALN39677
augaagaccaucaucgcccugggcuacauccugugccugguguucgcccagaagauccccggcaacgacaacagcaccgccacccugugccugggccaccacgccgugcccaacggcaccaucgugaagaccaucaccaacgacagaaucgaggugaccaacgccaccgagcuggugcagaacagcagcaucggcgagaucugcgacagcccccacaagauccuggacggcgagaacugcacccugaucgacgcccugcugggcgacccccagugcgacggcuuccagaacaagaagugggaccuguucguggagagaagcaaggccuacagcaacugcuaccccuacgacgugcccgacuacgccagccugagaagccugguggccagcagcggcacccuggaguucaacaacgagagcuucaacuggaccggcgugacccagaacggcaccagcagcgccugcaucagaagaagcagcagcagcuucuucagcagacugaacuggcugacccaccugaacuacgccuaccccgcccugaacgugaccaugcccaacaacgagcaguucgacaagcuguacaucuggggcgugcaccaccccggcaccgacaaggaccagaucuuccuguacgcccagagcagcggcagaaucaccgugagcaccaagagaagccagcaggccgugauccccaacaucggcagcagacccagaaucagagacauccccagcagaaucagcaucuacuggaccaucgugaagcccggcgacauccugcugaucaacagcaccggcaaccugaucgcccccagaggcuacuucaagaucagaagcggcaagagcagcaucaugagaagcgacgcccccaucggcaagugcaagagcgagugcaucacccccaacggcagcauccccaacgacaagcccuuccagaacgugaacagaaucaccuacggcgccugccccagauacgugaagcacagcacccugaagcuggccaccggcaugagaaacgugcccgagaagcagaccagaggcaucuucggcgccaucgccggcuucaucgagaacggcugggagggcaugguggacggcugguacggcuucagacaccagaacagcgagggcagaggccaggccgccgaccugaagagcacccaggccgccaucgaccagaucaacggcaagcugaacagacugaucggcaagaccaacgagaaguuccaccagaucgagaaggaguucagcgagguggagggcagaauccaggaccuggagaaguacguggaggacaccaagaucgaccuguggagcuacaacgccgagcugcugguggcccuggagaaccagcacaccaucgaccugaccgacagcgagaugaacaagcuguucgagaagaccaagaagcagcugagagagaacgccgaggacaugggcaacggcugcuucaagaucuaccacaagugcgacaacgccugcaucggcagcaucagaaacggcaccuacgaccacaacguguacagagacgaggcccugaacaacagauuccagaucaagggcguggagcugaagagcggcuacaaggacuggauccuguggaucagcuucgccaucagcugcuuccugcugugcguggcccugcugggcuucaucaugugggccugccagaagggcaacaucagaugcaacaucugcaucuga

SEQ ID NO: 173684 - RNA, 1701 nt, Artificial Sequence; identical to SEQ ID NO: 173388
  derived and/or modified CDS sequence (opt4) from hemagglutinin__InfluenzaA__ALN39678

SEQ ID NO: 173685 - RNA, 1701 nt, Artificial Sequence
  derived and/or modified CDS sequence (opt4) from hemagglutinin__InfluenzaA__ALN39679
augaagaccaucaucgcccugggcuacauccugugccugguguucgcccagaagauccccggcaacgacaacagcaccgccacccugugccugggccaccacgccgugcccaacggcaccguggugaagaccaucaccaacgacagaaucgaggugaccaacgccaccgagcuggugcagaacagcagcaucggcgagaucugcgacagcccccacaagauccuggacggcgagaacugcacccugaucgacgcccugcugggcgacccccagugcgacggcuuccagaacaagaagugggaccuguucguggagagaagcaaggccuacagcaacugcuaccccuacgacgugcccgacuacgccagccugagaagccugguggccagcagcggcacccuggaguucaacaacgagagcuucaacuggaccggcgugacccagaacggcaccagcagcgccugcaucagaagaagcagcagcagcuucuucagcagacugaacuggcugacccaccugaacuacaccuaccccgcccugaacgugaccaugcccaacaacgagcaguucgacaagcuguacaucuggggcgugcaccaccccggcaccgacaaggaccagaucuuccuguacgcccagagcagcggcagaaucaccgugagcaccaagagaagccagcaggccgugauccccaacaucggcagcagacccagaaucagagacauccccagcagaaucagcaucuacuggaccaucgugaagcccggcgacauccugcugaucaacagcaccggcaaccugaucgcccccagaggcuacuucaagaucagaagcggcaagagcagcaucaugagaagcgacgcccccaucggcaagugcaagagcgagugcaucacccccaacggcagcauccccaacgacaagcccuuccagaacgugaacagaaucaccuacggcgccugccccagauacgugaagcacagcacccugaagcuggccaccggcaugagaaacgugcccgagaagcagaccagaggcaucuucggcgccaucgccggcuucaucgagaacggcugggagggcaugguggacggcugguacggcuucagacaccagaacagcgagggcagaggccaggccgccgaccugaagagcacccaggccgccaucgaccagaucaacggcaagcugaacagacugaucggcaagaccaacgagaaguuccaccagaucgagaaggaguucagcgagguggagggcagaauccaggaccuggagaaguacguggaggacaccaagaucgaccuguggagcuacaacgccgagcugcugguggcccuggagaaccagcacaccaucgaccugaccgacagcgagaugaacaagcuguucgagaagaccaagaagcagcugagagagaacgccgaggacaugggcaacggcugcuucaagaucuaccacaagugcgacaacgccugcaucggcagcaucagaaacggcaccuacgaccacaacguguacagagacgaggcccugaacaacagauuccagaucaagggcguggagcugaagagcggcuacaaggacuggauccuguggaucagcuucgccaucagcugcuuccugcugugcguggcccugcugggcuucaucaugugggccugccagaagggcaacaucagaugcaacaucugcaucuga

SEQ ID NO: 173686 - RNA, 1701 nt, Artificial Sequence; identical to SEQ ID NO: 173388
  derived and/or modified CDS sequence (opt4) from hemagglutinin__InfluenzaA__ALN39680

SEQ ID NO: 173687 - RNA, 1701 nt, Artificial Sequence; identical to SEQ ID NO: 173388
  derived and/or modified CDS sequence (opt4) from hemagglutinin__InfluenzaA__ALN39681

SEQ ID NO: 173688 - RNA, 1701 nt, Artificial Sequence; identical to SEQ ID NO: 173388
  derived and/or modified CDS sequence (opt4) from hemagglutinin__InfluenzaA__ALN39682

SEQ ID NO: 173689 - RNA, 1701 nt, Artificial Sequence; identical to SEQ ID NO: 173388
  derived and/or modified CDS sequence (opt4) from hemagglutinin__InfluenzaA__ALN39683

SEQ ID NO: 173690 - RNA, 1701 nt, Artificial Sequence; identical to SEQ ID NO: 173388
  derived and/or modified CDS sequence (opt4) from hemagglutinin__InfluenzaA__ALN39684

SEQ ID NO: 173691 - RNA, 1701 nt, Artificial Sequence; identical to SEQ ID NO: 173388
  derived and/or modified CDS sequence (opt4) from hemagglutinin__InfluenzaA__ALN39685

SEQ ID NO: 173692 - RNA, 1701 nt, Artificial Sequence
  derived and/or modified CDS sequence (opt4) from hemagglutinin__InfluenzaA__ALN39686
augaagaccaucaucgcccugggcuacauccugugccuggccuucgcccagaagauccccggcaacgacaacagcaccgccacccugugccugggccaccacgccgugcccaacggcaccaucgugaagaccaucaccaacgacagaaucgaggugaccaacgccaccgagcuggugcagaacagcagcaucggcgagaucugcgacagcccccacaagauccuggacggcgagaacugcacccugaucgacgcccugcugggcgacccccagugcgacggcuuccagaacaagaagugggaccuguucguggagagaagcaaggccuacagcaacugcuaccccuacgacgugcccgacuacaccagccugagaagccugguggccagcagcggcacccuggaguucaacaacgagagcuucaacuggaccggcgugacccagaacggcaccagcagcgccugcaucagaagaagcagcagcagcuucuucagcagacugaacuggcugacccaccugaacuacaccuaccccgcccugaacgugaccaugcccaacaacgagcaguucgacaagcuguacaucuggggcgugcaccaccccggcaccgacaaggaccagaucuuccuguacgcccagagcagcggcagaaucaccgugagcaccaagagaagccagcaggccgugauccccaacaucggcagcagacccagaaucagagacauccccagcagaaucagcaucuacuggaccaucgugaagcccggcgacauccugcugaucaacagcaccggcaaccugaucgcccccagaggcuacuucaagaucagaagcggcaagagcagcaucaugagaagcgacgcccccaucggcaagugcaagagcgagugcaucacccccaacggcagcauccccaacgacaagcccuuccagaacgugaacagaaucaccuacggcgccugccccagauacgugaagcacagcacccugaagcuggccaccggcaugagaaacgugcccgagaagcagaccagaggcaucuucggcgccaucgccggcuucaucgagaacggcugggagggcaugguggacggcugguacggcuucagacaccagaacagcgagggcagaggccaggccgccgaccugaagagcacccaggccgccaucgaccagaucaacggcaagcugaacagacugaucggcaagaccaacgagaaguuccaccagaucgagaaggaguucagcgagguggagggcagaauccaggaccuggagaaguacguggaggacaccaagaucgaccuguggagcuacaacgccgagcugcugguggcccuggagaaccagcacaccaucgaccugaccgacagcgagaugaacaagcuguucgagaagaccaagaagcagcugagagagaacgccgaggacaugggcaacggcugcuucaagaucuaccacaagugcgacaacgccugcaucggcagcaucagaaacggcaccuacgaccacaacguguacagagacgaggcccugaacaacagauuccagaucaagggcguggagcugaagagcggcuacaaggacuggauccuguggaucagcuucgccaucagcugcuuccugcugugcguggcccugcugggcuucaucaugugggccugccagaagggcaacaucagaugcaacaucugcaucuga

SEQ ID NO: 173693 - RNA, 1701 nt, Artificial Sequence; identical to SEQ ID NO: 173388
  derived and/or modified CDS sequence (opt4) from hemagglutinin__InfluenzaA__ALN39687

SEQ ID NO: 173694 - RNA, 1701 nt, Artificial Sequence
  derived and/or modified CDS sequence (opt4) from hemagglutinin__InfluenzaA__ALN39688
augaagaccaucaucgcccugggcuacauccugugccugguguucgcccagaagauccccggcaacgacaacagcaccgccacccugugccugggccaccacgccgugcccaacggcaccaucgugaagaccaucaccaacgacagaaucgaggugaccaacgccaccgagcuggugcagaacagcagcaucggcgagaucugcgacagcccccacaagauccuggacggcgagaacugcacccugaucgacgcccugcugggcgacccccagugcgacggcuuccagaacaagaagugggaccuguucguggagagaagcaaggccuacagcaacugcuaccccuacgacgugcccgacuacgccagccugagaagccugguggccagcagcggcacccuggaguucaacaacgagagcuucaacuggaccggcgugacccagaacggcaccagcagcgccugcaucagaagaagcagcagcagcuucuucagcagacugaacuggcugacccaccugaacuacaucuaccccgcccugaacgugaccaugcccaacaacgagcaguucgacaagcuguacaucuggggcgugcaccaccccggcaccgacaaggaccagaucuuccuguacgcccagagcagcggcagaaucaccgugagcaccaagagaagccagcaggccgugauccccaacaucggcagcagacccagaaucagagacauccccagcagaaucagcaucuacuggaccaucgugaagcccggcgacauccugcugaucaacagcaccggcaaccugaucgcccccagaggcuacuucaagaucagaagcggcaagagcagcaucaugagaagcgacgcccccaucggcaagugcaagagcgagugcaucacccccaacggcagcauccccaacgacaagcccuuccagaacgugaacagaaucaccuacggcgccugccccagauacgugaagcacagcacccugaagcuggccaccggcaugagaaacgugcccgagaagcagaccagaggcaucuucggcgccaucgccggcuucaucgagaacggcugggagggcaugguggacggcugguacggcuucagacaccagaacagcgagggcagaggccaggccgccgaccugaagagcacccaggccgccaucgaccagaucaacggcaagcugaacagacugaucggcaagaccaacgagaaguuccaccagaucgagaaggaguucagcgagguggagggcagaauccaggaccuggagaaguacguggaggacaccaagaucgaccuguggagcuacaacgccgagcugcugguggcccuggagaaccagcacaccaucgaccugaccgacagcgagaugaacaagcuguucgagaagaccaagaagcagcugagagagaacgccgaggacaugggcaacggcugcuucaagaucuaccacaagugcgacaacgccugcaucggcagcaucagaaacggcaccuacgaccacaacguguacagagacgaggcccugaacaacagauuccagaucaagggcguggagcugaagagcggcuacaaggacuggauccuguggaucagcuucgccaucagcugcuuccugcugugcguggcccugcugggcuucaucaugugggccugccagaagggcaacaucagaugcaacaucugcaucuga

SEQ ID NO: 173695 - RNA, 1701 nt, Artificial Sequence
  derived and/or modified CDS sequence (opt4) from hemagglutinin__InfluenzaA__ALN39689
augaagaccaucaucgcccugggcuacauccugugccugguguucgcccagaagauccccggcaacgacaacagcaccgccacccugugccugggccaccacgccgugcccaacggcaccaucgugaagaccaucaccaacgacagaaucgaggugaccaacgccaccgagcuggugcagaacagcagcaucggcgagaucugcgacagcccccacaagauccuggacggcgagaacugcacccugaucgacgcccugcugggcgacccccagugcgacggcuuccagaacaagaagugggaccuguucguggagagaagcaaggccuacagcaacugcuaccccuacgacgugcccgacuacgccagccugagaagccugguggccagcagcggcacccuggaguucaacaacgagagcuucaacuggaccggcgugacccagaacggcaccagcagcgccugcaucagaagaagcagcagcagcuucuucagcagacugaacuggcugacccaccugaacuacaccuaccccgcccugaacgugaccaugcccaacaacgagcaguucgacaagcuguacaucuggggcgugcaccaccccggcaccgacaaggaccagaucuuccuguacgcccagagcagcggcagaaucaccgugagcaccaagagaagccagcaggccgugauccccaacaucggcagcagacccagaaucagagacauccccagcagaaucagcaucuacuggaccaucgugaagcccggcgacauccugcugauccacagcaccggcaaccugaucgcccccagaggcuacuucaagaucagaagcggcaagagcagcaucaugagaagcgacgcccccaucggcaagugcaagagcgagugcaucacccccaacggcagcauccccaacgacaagcccuuccagaacgugaacagaaucaccuacggcgccugccccagauacgugaagcacagcacccugaagcuggccaccggcaugagaaacgugcccgagaagcagaccagaggcaucuucggcgccaucgccggcuucaucgagaacggcugggagggcaugguggacggcugguacggcuucagacaccagaacagcgagggcagaggccaggccgccgaccugaagagcacccaggccgccaucgaccagaucaacggcaagcugaacagacugaucggcaagaccaacgagaaguuccaccagaucgagaaggaguucagcgagguggagggcagaauccaggaccuggagaaguacguggaggacaccaagaucgaccuguggagcuacaacgccgagcugcugguggcccuggagaaccagcacaccaucgaccugaccgacagcgagaugaacaagcuguucgagaagaccaagaagcagcugagagagaacgccgaggacaugggcaacggcugcuucaagaucuaccacaagugcgacaacgccugcaucggcagcaucagaaacggcaccuacgaccacaacguguacagagacgaggcccugaacaacagauuccagaucaagggcguggagcugaagagcggcuacaaggacuggauccuguggaucagcuucgccaucagcugcuuccugcugugcguggcccugcugggcuucaucaugugggccugccagaagggcaacaucagaugcaacaucugcaucuga

SEQ ID NO: 173696 - RNA, 1701 nt, Artificial Sequence
  derived and/or modified CDS sequence (opt4) from hemagglutinin__InfluenzaA__ALN39690
augaagaccaucaucgcccugagcuacauccugugccugguguucgcccagaagcugcccggcaacgacaacagcaccgccacccugugccugggccaccacgccgugcccaacggcaccaucgugaagaccaucaccaacgacagaaucgaggugaccaacgccaccgagcuggugcagaacagcagcaucggcgagaucugcgacagcccccaccagauccuggacggcaagaacugcacccugaucgacgcccugcugggcgacccccagugcgacggcuuccagaacaagaagugggaccuguucguggagagaagcaaggcccacagcaacugcuaccccuacgacgugcccgacuacgccagccugagaagccugguggccagcagcggcacccuggaguucaacaacgagagcuucaacugggccggcgugacccagaacggcaccagcagcagcugcaucagaggcagcaacagcagcuucuucagcagacugaacuggcugacccaccugaacagcaucuaccccgcccugaacgugaccaugcccaacaacgagcaguucgacaagcuguacaucuggggcgugcaccaccccggcaccgacaaggaccagaucuuccuguacgcccagagcagcggcagaaucaccgugagcaccaagagaagccagcaggccgugauccccaacaucggcagcagacccagaaucagagacauccccagcagaaucagcaucuacuggaccaucgugaagcccggcgacauccugcugaucaacagcaccggcaaccugaucgcccccagaggcuacuucaagaucagaagcggcaagagcagcaucaugagaagcgacgcccccaucggcaagugcaagagcgagugcaucacccccaacggcagcauccccaacgacaagcccuuccagaacgugaacagaaucaccuacggcgccugccccagauacgugaagcagagcacccugaagcuggccaccggcaugagaaacgugcccgagagacagaccagaggcaucuucggcgccaucgccggcuucaucgagaacggcugggagggcaugguggacggcugguacggcuucagacaccagaacagcgagggcagaggccaggccgccgaccugaagagcacccaggccgccaucgaccagaucaacggcaagcugaacagacugaucggcaagaccaacgagaaguuccaccagaucgagaaggaguucagcgagguggagggcagaauccaggaccuggagaaguacguggaggacaccaagaucgaccuguggagcuacaacgccgagcugcugguggcccuggagaaccagcacaccaucgaccugaccgacagcgagaugaacaagcuguucgagaagaccaagaagcagcugagagagaacgccgaggacaugggcaacggcugcuucaagaucuaccacaagugcgacaacgccugcaucggcagcaucagaaacggcaccuacgaccacaacguguacagagacgaggcccugaacaacagauuccagaucaagggcguggagcugaagagcggcuacaaggacuggauccuguggaucagcuucgccaucagcugcuuccugcugugcguggcccugcugggcuucaucaugugggccugccagaagggcaacaucagaugcaacaucugcaucuga

SEQ ID NO: 173697 - RNA, 1701 nt, Artificial Sequence
  derived and/or modified CDS sequence (opt4) from hemagglutinin__InfluenzaA__ALN39691
augaagaccaucaucgcccugagcuacauccugugccugguguucgcccagaagcugcccggcaacgacaacagcaccgccacccugugccugggccaccacgccgugcccaacggcaccaucgugaagaccaucaccaacgacagaaucgaggugaccaacgccaccgagcuggugcagaacagcagcaucggcgagaucugcgacagcccccaccagauccuggacggcaagaacugcacccugaucgacgcccugcugggcgacccccagugcgacggcuuccagaacaagaagugggaccuguucguggagagaagcaaggcccacagcaacugcuaccccuacgacgugcccgacuacgccagccugagaagccugguggccagcagcggcacccuggaguucaacaacgagagcuucaacugggccggcgugacccagaacggcaccagcagcagcugcaucagaggcagcaacagcagcuucuucagcagacugaacuggcugacccaccugaacagcaaguaccccgcccugaacgugaccaugcccaacaacgagcaguucgacaagcuguacaucuggggcgugcaccaccccggcaccgacaaggaccagaucuuccuguacgcccagcccagcggcagaaucaccgugagcaccaagagaagccagcaggccgugauccccaacaucggcagcagacccagaaucagagacauccccagcagaaucagcaucuacuggaccaucgugaagcccggcgacauccugcugaucaacagcaccggcaaccugaucgcccccagaggcuacuucaagaucagaagcggcaagagcagcaucaugagaagcgacgcccccaucggcaagugcaagagcgagugcaucacccccaacggcagcauccccaacgacaagcccuuccagaacgugaacagaaucaccuacggcgccugccccagauacgugaagcagagcacccugaagcuggccaccggcaugagaaacgugcccgagaagcagaccagaggcaucuucggcgccaucgccggcuucaucgagaacggcugggagggcaugaaggacggcugguacggcuucagacaccagaacagcgagggcagaggccaggccgccgaccugaagagcacccaggccgccaucgaccagaucaacggcaagcugaacagacugaucggcaagaccaacgagaaguuccaccagaucgagaaggaguucagcgagguggagggcagaauccaggaccuggagaaguacguggaggacaccaagaucgaccuguggagcuacaacgccgagcugcugguggcccuggagaaccagcacaccaucgaccugaccgacagcgagaugaacaagcuguucgagaagaccaagaagcagcugagagagaacgccgaggacaugggcaacggcugcuucaagaucuaccacaagugcgacaacgccugcaucggcagcaucagaaacggcaccuacgaccacgacguguacagagacgaggcccugaacaacagauuccagaucaagggcguggagcugaagagcggcuacaaggacuggauccuguggaucagcuucgccaucagcugcuuccugcugugcguggcccugcugggcuucaucaugugggccugccagaagggcaacaucagaugcaacaucugcaucuga

SEQ ID NO: 173698 - RNA, 1701 nt, Artificial Sequence; identical to SEQ ID NO: 173388
  derived and/or modified CDS sequence (opt4) from hemagglutinin__InfluenzaA__ALN39692

SEQ ID NO: 173699 - RNA, 1701 nt, Artificial Sequence; identical to SEQ ID NO: 173388
  derived and/or modified CDS sequence (opt4) from hemagglutinin__InfluenzaA__ALN39693

SEQ ID NO: 173700 - RNA, 1701 nt, Artificial Sequence; identical to SEQ ID NO: 173388
  derived and/or modified CDS sequence (opt4) from hemagglutinin__InfluenzaA__ALN39694

SEQ ID NO: 173701 - RNA, 1701 nt, Artificial Sequence; identical to SEQ ID NO: 173388
  derived and/or modified CDS sequence (opt4) from hemagglutinin__InfluenzaA__ALN39695

SEQ ID NO: 173702 - RNA, 1701 nt, Artificial Sequence; identical to SEQ ID NO: 173388
  derived and/or modified CDS sequence (opt4) from hemagglutinin__InfluenzaA__ALN39696

SEQ ID NO: 173703 - RNA, 1701 nt, Artificial Sequence; identical to SEQ ID NO: 173058
  derived and/or modified CDS sequence (opt4) from hemagglutinin__InfluenzaA__ALN39697

SEQ ID NO: 173704 - RNA, 1701 nt, Artificial Sequence
  derived and/or modified CDS sequence (opt4) from hemagglutinin__InfluenzaA__ALN39698
augaagaccaucaucgcccugagccacauccugugccugguguucgcccagaagauccccggcaacgacaacagcaccgccacccugugccugggccaccacgccgugcccaacggcaccaucgugaagaccaucaccaacgacagaaucgaggugaccaacgccaccgagcuggugcagaacagcagcaucggcgagaucugcgacagcccccaccagauccuggacggcgagaacugcacccugaucgacgcccugcugggcgacccccagugcgacggcuuccagaacaagaagugggaccuguucguggagagaagcaaggccuacagcaacugcuaccccuacgacgugcccgacuacgccagccugagaagccugguggccagcagcggcacccuggaguucaacaacgagagcuucaacuggaccggcgugacccagaacggcaccagcagcgccugcaucagaagaagcagcagcagcuucuucagcagacugaacuggcugacccaccugaacuacaccuaccccgcccugaacgugaccaugcccaacaacgagcaguucgacaagcuguacaucuggggcgugcaccaccccggcaccgacaaggaccagaucuuccuguacgcccagagcagcggcagaaucaccgugagcaccaagagaagccagcaggccgugauccccaacaucggcagcagacccagaaucagagacauccccagcagaaucagcaucuacuggaccaucgugaagcccggcgacauccugcugaucaacagcaccggcaaccugaucgcccccagaggcuacuucaagaucagaagcggcaagagcagcaucaugagaagcgacgcccccaucggcaagugcaagagcgagugcaucacccccaacggcagcauccccaacgacaagcccuuccagaacgugaacagaaucaccuacggcgccugccccagauacgugaagcacagcacccugaagcuggccaccggcaugagaaacgugcccgagaagcagaccagaggcaucuucggcgccaucgccggcuucaucgagaacggcugggagggcaugauggacggcugguacggcuucagacaccagaacagcgagggcagaggccaggccgccgaccugaagagcacccaggccgccaucgaccagaucaacggcaagcugaacagacugaucggcaagaccaacgagaaguuccaccagaucgagaaggaguucagcgagguggagggcagaauccaggaccuggagaaguacguggaggacaccaagaucgaccuguggagcuacaacgccgagcugcugguggcccuggagaaccagcacaccaucgaccugaccgacagcgagaugaacaagcuguucgagaagaccaagaagcagcugagagagaacgccgaggacaugggcaacggcugcuucaagaucuaccacaagugcgacaacgccugcaugggcagcaucagaaacggcaccuacgaccacaacguguacagaaacgaggcccugaacaacagauuccagaucaagggcguggagcugaagagcggcuacaaggacuggauccuguggaucagcuucgccaucagcugcuuccugcugugcguggcccugcugggcuucaucaugugggccugccagaagggcaacaucagaugcaacaucugcaucuga

SEQ ID NO: 173705 - RNA, 1701 nt, Artificial Sequence
  derived and/or modified CDS sequence (opt4) from hemagglutinin__InfluenzaA__ALN39700
augaagaccaucaucgcccugagcuacauccugugccugguguucgcccagaagauccccggcaacgacaacagcaccgccacccugugccugggccaccacgccgugcccaacggcaccaucgugaagaccaucaccaacgacagaaucgaggugaccaacgccaccgagcuggugcagaacagcagcaucggcgagaucugcgacagcccccaccagauccuggacggcgagaacugcacccugaucgacgcccugcugggcgacccccagugcgacggcuuccagaacaagaagugggaccuguucguggagagaagcaaggccuacagcaacugcuaccccuacgacgugcccgacuacgccagccugagaagccugguggccagcagcggcacccuggaguucaacaacgagagcuucaacuggaccggcgugacccagaacggcaccagcagcgccugcaucagaagaagcagcagcagcuucuucagcagacugaacuggcugacccaccugaacuacaccuaccccgcccugaacgugaccaugcccaacaacgagcaguucgacaagcuguacaucuggggcgugcaccaccccggcaccgacaaggaccagaucuuccuguacgcccagagcagcggcagaaucaccgugagcaccaagagaagccagcaggccgugauccccaacaucggcagcagacccagaaucagagacauccccagcagaaucagcaucuacuggaccaucgugaagcccggcgacauccugcugaucaacagcaccggcaaccugaucgcccccagaggcuacuucaagaucagaagcggcaagagcagcaucaugagaagcgacgcccccaucggcaagugcaagagcgagugcaucacccccaacggcagcauccccaacgacaagcccuuccagaacgugaacagaaucaccuacggcgccugccccagauacgugaagcacagcacccugaagcuggccaccggcaugagaaacgugcccgagaagcagaccagaggcaucuucggcgccaucgccggcuucaucgagaacggcugggagggcaugguggacggcugguacggcuucagacaccagaacagcgagggcagaggccaggccgccgaccugaagagcacccaggccgccaucgaccagaucaacggcaagcugaacagacugaucggcaagaccaacgagaaguuccaccagaucgagaaggaguucagcgagguggagggcagaauccaggaccuggagaaguacguggaggacaccaagaucgaccuguggagcuacaacgccgagcugcugguggcccuggagaaccagcacaccaucgaccugaccgacagcgagaugaacaagcuguucgagaagaccaagaagcagcugagagagaacgccgaggacaugggcaacggcugcuucaagaucuaccacaagugcgacaacgccugcaucggcagcaucagaaacggcaccuacgaccacaacguguacagagacgaggcccugaacaacagauuccagaucaagggcguggagcugaagagcggcuacaaggacuggauccuguggaucagcuucgccaucagcugcuuccugcugugcguggcccugcugggcuucaucaugugggccugccagaagggcaacaucaagugcaacaucugcaucuga

SEQ ID NO: 173706 - RNA, 1701 nt, Artificial Sequence; identical to SEQ ID NO: 173107
  derived and/or modified CDS sequence (opt4) from hemagglutinin__InfluenzaA__ALN39701

SEQ ID NO: 173707 - RNA, 1701 nt, Artificial Sequence
  derived and/or modified CDS sequence (opt4) from hemagglutinin__InfluenzaA__ALN39702
augaagaccaucaucgcccugagcuacauccugugccugguguucgcccagaagauccccggcaacgacaacagcaccgccacccugugccugggccaccacgccgugcccaacggcaccaucgugaagaccaucaccaacgacagaaucgaggugaccaacgccaccgagcuggugcagaacagcagcaucggcgagaucugcgacagcccccaccagauccuggacggcgagaacugcacccugaucgacgcccugcugggcgacccccagugcgacggcuuccagaacaagaagugggaccuguucguggagagaagcaaggccuacagcaacugcuaccccuacgacgugcccgacuacgccagccugagaagccugguggccagcagcggcacccuggaguucaacaacgagagcuucaacuggaccggcgugacccagaacggcaccagcagcgccugcaucagaaagagcagcagcagcuucuucagcagacugaacuggcugacccaccugaacuacaccuaccccgcccugaacgugaccaugcccaacaacgagcaguucgacaagcuguacaucuggggcgugcaccaccccggcaccgacaaggaccagaucuuccuguacgccagaagcagcggcagaaucaccgugagcaccaagagaagccagcaggccgugauccccaacaucggcagcagacccagaaucagagacauccccagcagaaucagcaucuacuggaccaucgugaagcccggcgacauccugcugaucaacagcaccggcaaccugaucgcccccagaggcuacuucaagaucagaagcggcaagagcagcaucaugagaagcgacgcccccaucggcaagugcaagagcgagugcaucacccccaacggcagcauccccaacgacaagcccuuccagaacgugaacagaaucaccuacggcgccugccccagauacgugaagcacagcacccugaagcuggccaccggcaugagaaacgugcccgagaagcagaccagaggcaucuucggcgccaucgccggcuucaucgagaacggcugggagggcaugguggacggcugguacggcuucagacaccagaacagcgagggcagaggccaggccgccgaccugaagagcacccaggccgccaucgaccagaucaacggcaagcugaacagacugaucggcaagaccaacgagaaguuccaccagaucgagaaggaguucagcgagguggagggcagaauccaggaccuggagaaguacguggaggacaccaagaucgaccuguggagcuacaacgccgagcugcugguggcccuggagaaccagcacaccaucgaccugaccgacagcgagaugaacaagcuguucgagaagaccaagaagcagcugagagagaacgccgaggacaugggcaacggcugcuucaagaucuaccacaagugcgacaacgccugcaucggcagcaucagaaacggcaccuacgaccacaacguguacagagacgaggcccugaacaacagauuccagaucaagggcguggagcugaagagcggcuacaaggacuggauccuguggaucagcuucgccaucagcugcuuccugcugugcguggcccugcugggcuucaucaugugggccugccagaagggcaacaucagaugcagcaucugcaucuga

SEQ ID NO: 173708 - RNA, 1701 nt, Artificial Sequence
  derived and/or modified CDS sequence (opt4) from hemagglutinin__InfluenzaA__ALN39703
augaagaccaucaucgcccugagcuacauccugugccugguguucgcccagaagauccccggcaacgacgacagcaccgccacccugugccugggccaccacgccgugcccaacggcaccaucgugaagaccaucaccaacgacagaaucgaggugaccaacgccaccgagcuggugcagaacagcagcaucggcgagaucugcgacagcccccaccagauccuggacggcgagaacugcacccugaucgacgcccugcugggcgacccccagugcgacggcuuccagaacaagaagugggaccuguucguggagagaagcaaggccuacagcaacugcuaccccuacgacgugcccgacuacgccagccugagaagccugguggccagcagcggcacccuggaguucaacaacgagagcuucaacuggaccggcgugacccagaacggcaccagcagcgccugcaucagaagaagcagcagcagcuucuucagcagacugaacuggcugacccaccugaacuacaccuaccccgcccugaacgugaccaugcccaacaacgagcaguucgacaagcuguacaucuggggcgugcaccaccccggcaccgacaaggaccagaucuuccuguacgcccagagcagcggcagaaucaccgugagcaccaagagaagccagcaggccgugauccccaacaucggcagcagacccagaaucagagacauccccagcagaaucagcaucuacuggaccaucgugaagcccggcgacauccugcugaucaacagcaccggcaaccugaucgcccccagaggcuacuucaagaucagaagcggcaagagcagcaucaugagaagcgacgcccccaucggcaagugcaagagcgagugcaucacccccaacggcagcauccccaacgacaagcccuuccagaacgugaacagaaucaccuacggcgccugccccagauacgugaagcacagcacccugaagcuggccaccggcaugagaaacgugcccgagaagcagaccagaggcaucuucggcgccaucgccggcuucaucgagaacggcugggagggcaugguggacggcugguacggcuucagacaccagaacagcgagggcagaggccaggccgccgaccugaagagcacccaggccgccaucgaccagaucaacggcaagcugaacagacugaucggcaagaccaacgagaaguuccaccagaucgagaaggaguucagcgagguggagggcagaauccaggaccuggagaaguacguggaggacaccaagaucgaccuguggagcuacaacgccgagcugcugguggcccuggagaaccagcacaccaucgaccugaccgacagcgagaugaacaagcuguucgagaagaccaagaagcagcugagagagaacgccgaggacaugggcaacggcugcuucaagaucuaccacaagugcgacaacgccugcaucggcagcaucagaaacggcaccuacgaccacaacguguacagagacgaggcccugaacaacagauuccagaucaagggcguggagcugaagagcggcuacaaggacuggauccuguggaucagcuucgccaucagcugcuuccugcugugcguggcccugcugggcuucaucaugugggccugccagaagggcaacaucagaugcaacaucugcaucuga

SEQ ID NO: 173709 - RNA, 1701 nt, Artificial Sequence; identical to SEQ ID NO: 173107
  derived and/or modified CDS sequence (opt4) from hemagglutinin__InfluenzaA__ALN39704

SEQ ID NO: 173710 - RNA, 1701 nt, Artificial Sequence; identical to SEQ ID NO: 172501
  derived and/or modified CDS sequence (opt4) from hemagglutinin__InfluenzaA__ALN39705

SEQ ID NO: 173711 - RNA, 1701 nt, Artificial Sequence
  derived and/or modified CDS sequence (opt4) from hemagglutinin__InfluenzaA__ALN39706
augaagaccaucaucgcccugagcuacauccugugccugguguucgcccagaagcugcccggcaacgacaacagcaccgccacccugugccugggccaccacgccgugcccaacggcaugaucgugaagaccaucaccaacgacagaaucgaggugaccaacgccaccgagcuggugcagaacagcagcaucggcgagaucugcgacagcccccaccagauccuggacggcaagaacugcacccugaucgacgcccugcugggcgacccccagugcgacgacuuccagaacaagagaugggaccuguucguggagagaagcaaggccuacagcaacugcuaccccuacgacgugcccgacuacgccagccugagaagccugguggccagcagcggcacccuggaguucaacgacgagagcuucaacugggccggcgugacccagaacggcaccagcagcgccugcaucagaggcagcaacagcagcuucuucagcagacugaacuggcugacccacagcaacuucaaguaccccgcccugaacgugaccaugcccaacaacgagcaguucgacaagcuguacaucuggggcgugcaccaccccggcaccgacaaggaccagaucuuccuguacgcccagagcagcggcagaaucaccgugagcaccaagagaagccagcaggccgugauccccaacaucggcagcagacccagaaucagaaacauccccagcagaaucagcaucuacuggaccaucgugaagcccggcgacauccugcugaucaacagcaccggcaaccugaucgcccccagaggcuacuucaagauccagagcggcaagagcagcaucaugagaagcgacgcccccaucggcaagugcaagagcgagugcaucacccccaacggcagcauccccaacgacaagcccuuccagaacgugaacagaaucaccuacggcgccugccccagauacgugaagcagagcacccugaagcuggccaccggcaugagaaacgugcccgagaagcagaccagaggcaucuucggcgccaucgccggcuucaucgagaacggcugggagggcaugaaggacggcugguacggcuucagacaccagaacagcgagggcagaggccaggccgccgaccugaagagcacccaggccgccaucgaccagaucaacggcaagcugaacagacugaucggcaagaccaacgagaaguuccaccagaucgagaaggaguucagcgagguggagggcagaauccaggaccuggagaaguacguggaggacaccaagaucgaccuguggagcuacaacgccgagcugcugguggcccuggagaaccagcacaccaucgaccugaccgacagcgagaugaacaagcuguucgagaagaccaagaagcagcugagagagaacgccgaggacaugggcaacggcugcuucaagaucuaccacaagugcgacaacgccugcaucggcagcaucagaaacggcaccuacgaccacgacguguacagagacgaggcccugaacaacagauuccagaucaagggcguggagcugaagagcggcuacaaggacuggauccuguggaucagcuucgccaucagcugcuuccugcugugcguggcccugcugggcuucaucaugugggccugccagaagggcaacaucagaugcaacaucugcaucuga

SEQ ID NO: 173712 - RNA, 1701 nt, Artificial Sequence; identical to SEQ ID NO: 172501
  derived and/or modified CDS sequence (opt4) from hemagglutinin__InfluenzaA__ALN39707

SEQ ID NO: 173713 - RNA, 1701 nt, Artificial Sequence; identical to SEQ ID NO: 173107
  derived and/or modified CDS sequence (opt4) from hemagglutinin__InfluenzaA__ALN39708

SEQ ID NO: 173714 - RNA, 1701 nt, Artificial Sequence
  derived and/or modified CDS sequence (opt4) from hemagglutinin__InfluenzaA__ALN39709
augaagaccaucaucgcccugagcuacauccugugccugguguucgcccagaagcugcccggcaacgacaacagcaccgccacccugugccugggccaccacgccgugcccaacggcaccaucgugaagaccaucaccaacgacagaaucgaggugaccaacgccaccgagcuggugcagaacagcagcaucggcgagaucugcgacagcccccaccagauccuggacggcgagaacugcacccugaucgacgcccugcugggcgacccccagugcgacggcuuccagaacaagaagugggaccuguucguggagagaagcaaggccuacagcaacugcuaccccuacgacgugcccgacuacgccagccugagaagccugguggccagcagcggcacccuggaguucaacaacgagagcuucaacugggccggcgugacccagaacggcaccagcagcagcugcaugagaggcagcaacagcagcuucuucagcagacugaacuggcugacccaccugaacagcaaguaccccgcccugaacgugaccaugcccaacaacgagcaguucgacaagcuguacaucuggggcgugcaccaccccggcaccgacaaggaccagaucuuccuguacgcccagagcagcggcagaaucaccgugagcaccaagagaagccagcaggccgugacccccaacaucggcagcagacccagaaucagagacauccccagcagaaucagcaucuacuggaccaucgugaagcccggcgacauccugcugaucaacagcaccggcaaccugaucgcccccagaggcuacuucaagaucagaagcggcaagagcagcaucaugagaagcgacgcccccaucggcaagugcaagagcgagugcaucacccccaacggcagcauccccaacgacaagcccuuccagaacgugaacagaaucaccuacggcgccugccccagauacgugaagcagagcacccugaagcuggccaccggcaugagaaacgugcccgagagacagaccagaggcaucuucggcgccaucgccggcuucaucgagaacggcugggagggcaugguggacggcugguacggcuucagacaccagaacagcgagggcagaggccaggccgccgaccugaagagcacccaggccgccaucgaccagaucaacggcaagcugaacagacugaucggcaagaccaacgagaaguuccaccagaucgagaaggaguucagcgagguggagggcagaauccaggaccuggagaaguacguggaggacaccaagaucgaccuguggagcuacaacgccgagcugcugguggcccuggagaaccagcacaccaucgaccugaccgacagcgagaugaacaagcuguucgagaagaccaagaagcagcugagagagaacgccgaggacaugggcaacggcugcuucaagaucuaccacaagugcgacaacgccugcaucggcagcaucagaaacggcaccuacgaccacgacguguacagagacgaggcccugaacaacagauuccagaucaagggcguggagcugaagagcggcuacaaggacuggauccuguggaucagcuucgccaucagcugcuuccugcugugcguggcccugcugggcuucaucaugugggccugccagaagggcaacaucagaugcaacaucugcaucuga

SEQ ID NO: 173715 - RNA, 1701 nt, Artificial Sequence; identical to SEQ ID NO: 173431
  derived and/or modified CDS sequence (opt4) from hemagglutinin__InfluenzaA__ALN39710

SEQ ID NO: 173716 - RNA, 1701 nt, Artificial Sequence; identical to SEQ ID NO: 173107
  derived and/or modified CDS sequence (opt4) from hemagglutinin__InfluenzaA__ALN39711

SEQ ID NO: 173717 - RNA, 1701 nt, Artificial Sequence; identical to SEQ ID NO: 172501
  derived and/or modified CDS sequence (opt4) from hemagglutinin__InfluenzaA__ALN39712

SEQ ID NO: 173718 - RNA, 1701 nt, Artificial Sequence
  derived and/or modified CDS sequence (opt4) from hemagglutinin__InfluenzaA__ALN39713
augaagaccaucaucgcccugagcuacauccugugccugguguucgcccagaagauccccggcaacgacaacagcaccgccacccugugccugggccaccacgccgugcccaacggcaccaucgugaagaccaucaccaacgacagaaucgaggugaccaacgccaccgagcuggugcagaacagcagcaucggcgagaucugcgacagcccccaccagauccuggacggcgagaacugcacccugaucgacgcccugcugggcgacccccagugcgacggcuuccagaacaagaagugggaccuguucguggagagaagcaaggccuacagcaacugcuaccccuacgacgugcccgacuacgccagccugagaagccugguggccagcagcggcacccuggaguucaacaacgagagcuucaacuggaccggcgugacccagaacggcaccagcagcgccugcaucagaggcagcagcagcagcuucuucagcagacugaacuggcugacccaccugaacuacaccuaccccgcccugaacgugaccaugcccaacaacgagcaguucgacaagcuguacaucuggggcgugcaccaccccggcaccgacaaggaccagaucuuccuguacgcccagagcagcggcagaaucaccgugagcaccaagagaagccagcaggccgugauccccaacaucggcagcagacccagaaucagagacauccccagcagaaucagcaucuacuggaccaucgugaagcccggcgacauccugcugaucaacagcaccggcaaccugaucgcccccagaggcuacuucaagaucagaagcggcaagagcagcaucaugagaagcgacgcccccaucggcaagugcaagagcgagugcaucacccccaacggcagcauccccaacgacaagcccuuccagaacgugaacagaaucaccuacggcgccugccccagauacgugaagcacagcacccugaagcuggccaccggcaugagaaacgugcccgagaagcagaccagaggcaucuucggcgccaucgccggcuucaucgagaacggcugggagggcaugguggacggcugguacggcuucagacaccagaacagcgagggcagaggccaggccgccgaccugaagagcacccaggccgccaucgaccagaucaacggcaagcugaacagacugaucggcaagaccaacgagaaguuccaccagaucgagaaggaguucagcgagguggagggcagaauccaggaccuggagaaguacguggaggacaccaagaucgaccuguggagcuacaacgccgagcugcugguggcccuggagaaccagcacaccaucgaccugaccgacagcgagaugaacaagcuguucgagaagaccaagaagcagcugagagagaacgccgaggacaugggcaacggcugcuucaagaucuaccacaagugcgacaacgccugcaucggcagcaucagaaacggcaccuacgaccacaacguguacagagacgaggcccugaacaacagauuccagaucaagggcguggagcugaagagcggcuacaaggacuggauccuguggaucagcuucgccaucagcugcuuccugcugugcguggcccugcugggcuucaucaugugggccugccagaagggcaacaucagaugcaacaucugcaucuga

SEQ ID NO: 173719 - RNA, 1701 nt, Artificial Sequence
  derived and/or modified CDS sequence (opt4) from hemagglutinin__InfluenzaA__ALN39714
augaagaccaucaucgcccugagcuacauccugugccugguguucgcccagaagauccccggcaacgacaacagcaccgccacccugugccugggccaccacgccgugcccaacggcaccaucgugaagaccaucaccaacgacagaaucgaggugaccaacgccaccgagcuggugcagaacagcagcaucggcgagaucugcgacagcccccaccagauccuggacggcgagaacugcacccugaucgacgcccugcugggcgacccccagugcgacggcuuccagaacaagaagugggaccuguucguggagagaagcaaggccuacagcaacugcuaccccuacgacgugcccgacuacgccagccugagaagccugguggccagcagcggcacccuggaguucaacaacgagagcuucaacugggccggcgugacccagaacggcaccagcagcagcugcaucagaggcagcaacagcagcuucuucagcagacugaacuggcugacccaccugaacagcaaguaccccgcccugaacgugaccaugcccaacaacgagcaguucgacaagcuguacaucuggggcgugcaccaccccggcaccgacaaggaccagaccuuccuguacgcccagcccagcggcagaaucaccgugagcaccaagagaagccagcaggccgugauccccaacaucggcagcagacccagaaucagagacauccccagcagaaucagcaucuacuggaccaucgugaagcccggcgacauccugcugaucaacagcaccggcaaccugaucgcccccagaggcuacuucaagaucagaagcggcaagagcagcaucaugagaagcgacgcccccaucggcaagugcaagagcgagugcaucacccccaacggcagcauccccaacgacaagcccuuccagaacgugaacagaaucaccuacggcgccugccccagauacgugaagcagagcacccugaagcuggccaccggcaugagaaacgugcccgagagacagaccagaggcaucuucggcgccaucgccggcuucaucgagaacggcugggagggcaugguggacggcugguacggcuucagacaccagaacagcgagggcagaggccaggccgccgaccugaagagcacccaggccgccaucgaccagaucaacggcaagcugaacagacugaucggcaagaccaacgagaaguuccaccagaucgagaaggaguucagcgagguggagggcagaauccaggaccuggagaaguacguggaggacaccaagaucgaccuguggagcuacaacgccgagcugcugguggcccuggagaaccagcacaccaucgaccugaccgacagcgagaugaacaagcuguucgagaagaccaagaagcagcugagagagaacgccgaggacaugggcaacggcugcuucaagaucuaccacaagugcgacaacgccugcaucggcagcaucagaaacggcaccuacgaccacgacguguacagagacgaggcccugaacaacagauuccagaucaagggcguggagcugaagagcggcuacaaggacuggauccuguggaucagcuucgccaucagcugcuuccugcugugcguggcccugcugggcuucaucaugugggccugccagaagggcaacaucagaugcaacaucugcaucuga

SEQ ID NO: 173720 - RNA, 1701 nt, Artificial Sequence; identical to SEQ ID NO: 173159
  derived and/or modified CDS sequence (opt4) from hemagglutinin__InfluenzaA__ALN39715

SEQ ID NO: 173721 - RNA, 1701 nt, Artificial Sequence; identical to SEQ ID NO: 172501
  derived and/or modified CDS sequence (opt4) from hemagglutinin__InfluenzaA__ALN39716

SEQ ID NO: 173722 - RNA, 1701 nt, Artificial Sequence; identical to SEQ ID NO: 172501
  derived and/or modified CDS sequence (opt4) from hemagglutinin__InfluenzaA__ALN39717

SEQ ID NO: 173723 - RNA, 1701 nt, Artificial Sequence; identical to SEQ ID NO: 173539
  derived and/or modified CDS sequence (opt4) from hemagglutinin__InfluenzaA__ALN39718

SEQ ID NO: 173724 - RNA, 1701 nt, Artificial Sequence; identical to SEQ ID NO: 172501
  derived and/or modified CDS sequence (opt4) from hemagglutinin__InfluenzaA__ALN39734

SEQ ID NO: 173725 - RNA, 1701 nt, Artificial Sequence
  derived and/or modified CDS sequence (opt4) from hemagglutinin__InfluenzaA__ALN39735
augaagaccaucaucgcccugagcuacauccugugccugguguucgcccagaagauccccggcaacgacaacagcaccgccacccugugccugggccaccacgccgugcccaacggcaccaucgugaagaccaucaccgacgacagaaucgaggugaccaacgccaccgagcuggugcagaacagcagcaucggcgagaucugcgacagcccccaccagauccuggacggcgagaacugcacccugaucgacgcccugcugggcgacccccagugcgacggcuuccagaacaagaagugggaccuguucguggagagaagcaaggccuacagcaacugcuaccccuacgacgugcccgacuacgccagccugagaagccugguggccagcagcggcacccuggaguucaacaacgagagcuucaacuggaccggcgugacccagaacggcaccagcagcgccugcaucagaagaagcagcagcagcuucuucagcagacugaacuggcugacccaccugaacuacaccuaccccgcccugaacgugaccaugcccaacaacgagcaguucgacaagcuguacaucuggggcgugcaccaccccggcaccgacaaggaccagaucuuccuguacgcccagagcagcggcagaaucaccgugagcaccaagagaagccagcaggccgugauccccaacaucggcagcagacccagaaucagagacauccccagcagaaucagcaucuacuggaccaucgugaagcccggcgacauccugcugaucaacagcaccggcaaccugaucgcccccagaggcuacuucaagaucagaagcggcaagagcagcaucaugagaagcgacgcccccaucggcaagugcaagagcgagugcaucacccccaacggcagcauccccaacgacaagcccuuccagaacgugaacagaaucaccuacggcgccugccccagauacgugaagcacagcacccugaagcuggccaccggcaugagaaacgugcccgagaagcagaccagaggcaucuucggcgccaucgccggcuucaucgagaacggcugggagggcaugguggacggcugguacggcuucagacaccagaacagcgagggcagaggccaggccgccgaccugaagagcacccaggccgccaucgaccagaucaacggcaagcugaacagacugaucggcaagaccaacgagaaguuccaccagaucgagaaggaguucagcgagguggagggcagaauccaggaccuggagaaguacguggaggacaccaagaucgaccuguggagcuacaacgccgagcugcugguggcccuggagaaccagcacaccaucgaccugaccgacagcgagaugaacaagcuguucgagaagaccaagaagcagcugagagagaacgccgaggacaugggcaacggcugcuucaagaucuaccacaagugcgacaacgccugcaucggcagcaucagaaacggcaccuacgaccacaacguguacagagacgaggcccugaacaacagauuccagaucaagggcguggagcugaagagcggcuacaaggacuggauccuguggaucagcuucgccaucagcugcuuccugcugugcguggcccugcugggcuucaucaugugggccugccagaagggcaacaucagaugcaacaucugcaucuga

SEQ ID NO: 173726 - RNA, 1701 nt, Artificial Sequence
  derived and/or modified CDS sequence (opt4) from hemagglutinin__InfluenzaA__ALN39736
augaagaccaucaucgcccugagcuacauccugugccugguguucgcccagaagauccccggcaacgacaacagcaccgccacccugugccugggccaccacgccgugcccaacggcaccaucgugaagaccaucaccaacgacagaaucgaggugaccaacgccaccgagcuggugcagaacagcagcaucggcgagaucugcgacagcccccaccagauccuggacggcgagaacugcacccugaucgacgcccugcugggcgacccccagugcgacggcuuccagaacaagaagugggaccuguucguggagagaagcaaggccuacagcaacugcuaccccuacgacgugcccgacuacgccagccugagaagccugguggccagcagcggcacccuggaguucaacaacgagagcuucaacuggaccggcgugacccagaacggcaccagcagcgccugcaucagaagaagcagcagcagcuucuucagcagacugaacuggcugacccaccugaacuacaccuaccccgcccugaacgugaccaugcccaacaacgagcaguucgacaagcuguacaucuggggcgugcaccaccccggcaccgacaaggaccagaucuuccuguacgcccagcccagcggcagaaucaccgugagcaccaagagaagccagcaggccgugauccccaacaucggcagcagacccagaaucagagacauccccagcagaaucagcaucuacuggaccaucgugaagcccggcgacauccugcugaucaacagcaccggcaaccugaucgcccccagaggcuacuucaagaucagaggcggcaagagcagcaucaugagaagcgacgcccccaucggcaagugcaagagcgagugcaucacccccaacggcagcauccccaacgacaagcccuuccagaacgugaacagaaucaccuacggcgccugccccagauacgugaagcacagcacccugaagcuggccaccggcaugagaaacgugcccgagaagcagaccagaggcaucuucggcgccaucgccggcuucaucgagaacggcugggagggcaugguggacggcugguacggcuucagacaccagaacagcgagggcagaggccaggccgccgaccugaagagcacccaggccgccaucgaccagaucaacggcaagcugaacagacugaucggcaagaccaacgagaaguuccaccagaucgagaaggaguucagcgagguggagggcagaauccagaaccuggagaaguacguggaggacaccaagaucgaccuguggagcuacaacgccgagcugcugguggcccuggagaaccagcacaccaucgaccugaccgacagcgagaugaacaagcuguucgagaagaccaagaagcagcugagagagaacgccgaggacaugggcaacggcugcuucaagaucuaccacaagugcgacaacgccugcaucggcagcaucagaaacggcaccuacgaccacaacguguacagagacgaggcccugaacaacagauuccagaucaagggcguggagcugaagagcggcuacaaggacuggauccuguggaucagcuucgccaucagcugcuuccugcugugcguggcccugcugggcuucaucaugugggccugccagaagggcaacaucagaugcaacaucugcaucuga

SEQ ID NO: 173727 - RNA, 1701 nt, Artificial Sequence; identical to SEQ ID NO: 173107
  derived and/or modified CDS sequence (opt4) from hemagglutinin__InfluenzaA__ALN39737

SEQ ID NO: 173728 - RNA, 1701 nt, Artificial Sequence
  derived and/or modified CDS sequence (opt4) from hemagglutinin__InfluenzaA__ALN39738
augaagaccaucaucgcccugagcuacauccugugccugguguucgcccagaagauccccggcaacgacaacagcaccgccacccugugccugggccaccacgccgugcccaacggcaccaucgugaagaccaucaccaacgacagaaucgaggugaccaacgccaccgagcuggugcagaacagcagcaucggcgagaucugcgacagcccccaccagauccuggacggcgagaacugcacccugaucgacgcccugcugggcgacccccugugcgacggcuuccagaacaagaagugggaccuguucguggagagaagcaaggccuacagcaacugcuaccccuacgacgugcccgacuacgccagccugagaagccugguggccagcagcggcacccuggaguucaacaacgagagcuucaacuggaccggcgugacccagaacggcaccagcagcgccugcaucagaagaagcagcagcagcuucuucagcagacugaacuggcugacccaccugaacuacaccuaccccgcccugaacgugaccaugcccaacaacgagcaguucgacaagcuguacaucuggggcgugcaccaccccggcaccgacaaggaccagaucuuccuguacgcccagagcagcggcagaaucaccgugagcaccaagagaagccagcaggccgugauccccaacaucggcagcagacccagaaucagagacauccccagcagaaucagcaucuacuggaccaucgugaagcccggcgacauccugcugaucaacagcaccggcaaccugaucgcccccagaggcuacuucaagaucagaagcggcaagagcagcaucaugagaagcgacgcccccaucggcaagugcaagagcgagugcaucacccccaacggcagcauccccaacgacaagcccuuccagaacgugaacagaaucaccuacggcgccugccccagauacgugaagcacagcacccugaagcuggccaccggcaugagaaacgugcccgagaagcagaccagaggcaucuucggcgccaucgccggcuucaucgagaacggcugggagggcaugguggacggcugguacggcuucagacaccagaacagcgagggcagaggccaggccgccgaccugaagagcacccaggccgccaucgaccagaucaacggcaagcugaacagacugaucggcaagaccaacgagaaguuccaccagaucgagaaggaguucagcgagguggagggcagaauccaggaccuggagaaguacguggaggacaccaagaucgaccuguggagcuacaacgccgagcugcugguggcccuggagaaccagcacaccaucgaccugaccgacagcgagaugaacaagcuguucgagaagaccaagaagcagcugagagagaacgccgaggacaugggcaacggcugcuucaagaucuaccacaagugcgacaacgccugcaucggcagcaucagaaacggcaccuacgaccacaacguguacagagacgaggcccugaacaacagauuccagaucaagggcguggagcugaagagcggcuacaaggacuggauccuguggaucagcuucgccaucagcugcuuccugcugugcguggcccugcugggcuucaucaugugggccugccagaagggcaacaucagaugcaacaucugcaucuga

SEQ ID NO: 173729 - RNA, 1701 nt, Artificial Sequence
  derived and/or modified CDS sequence (opt4) from hemagglutinin__InfluenzaA__ALN39739
augaagaccaucaucgcccugggcuacauccugugccugguguucgcccagaagauccccggcaacgacaacagcaccgccacccugugccugggccaccacgccgugcccaacggcaccaucgugaagaccaucaccaacgacagaaucgaggugaccaacgccaccgagcuggugcagaacagcagcaucggcgagaucugcgacagcccccacaagauccuggacggcgagaacugcacccugaucgacgcccugcugggcgacccccagugcgacggcuuccagaacaagaagugggaccuguucguggagagaagcaaggccuacagcaacugcuaccccuacgacgugcccgacuacgccagccugagaagccugguggccagcagcggcacccuggaguucaacaacgagagcuucaacuggaccggcgugacccagaacggcaccagcagcgccugcaucagaagaagcagcagcagcuucuucagcagacugaacuggcugacccaccuggacuacaccuaccccgcccugaacgugaccaugcccaacaacgagcaguucgacaagcuguacaucuggggcgugcaccaccccggcaccgacaaggaccagaucuuccuguacgcccagagcagcggcagaaucaccgugagcaccaagagaagccagcaggccgugauccccaacaucggcagcagacccagaaucagagacauccccagcagaaucagcaucuacuggaccaucgugaagcccggcgacauccugcugaucaacagcaccggcaaccugaucgcccccagaggcuacuucaagaucagaagcggcaagagcagcaucaugagaagcgacgcccccaucggcaagugcaagagcgagugcaucacccccaacggcagcauccccaacgacaagcccuuccagaacgugaacagaaucaccuacggcgccugccccagauacgugaagcacagcacccugaagcuggccaccggcaugagaaacgugcccgagaagcagaccagaggcaucuucggcgccaucgccggcuucaucgagaacggcugggagggcaugguggacggcugguacggcuucagacaccagaacagcgagggcagaggccaggccgccgaccugaagagcacccaggccgccaucgaccagaucaacggcaagcugaacagacugaucggcaagaccaacgagaaguuccaccagaucgagaaggaguucagcgagguggagggcagaauccaggaccuggagaaguacguggaggacaccaagaucgaccuguggagcuacaacgccgagcugcugguggcccuggagaaccagcacaccaucgaccugaccgacagcgagaugaacaagcuguucgagaagaccaagaagcagcugagagagaacgccgaggacaugggcaacggcugcuucaagaucuaccacaagugcgacaacgccugcaucggcagcaucagaaacggcaccuacgaccacaacguguacagagacgaggcccugaacaacagauuccagaucaagggcguggagcugaagagcggcuacaaggacuggauccuguggaucagcuucgccaucagcugcuuccugcugugcguggcccugcugggcuucaucaugugggccugccagaagggcaacaucagaugcaacaucugcaucuga

SEQ ID NO: 173730 - RNA, 1701 nt, Artificial Sequence
  derived and/or modified CDS sequence (opt4) from hemagglutinin__InfluenzaA__ALN39740
augaagaccaucaucgcccugagcuacauccugugccugguguucgcccagaagauccccggcaacgacaacagcaccgccacccugugccugggccaccacgccgugcccaacggcaccaucgugaagaccaucaccaacgacagaaucgaggugaccaacgccaccgagcuggugcagaacagcagcaucggcgagaucugcgacagcccccaccagauccuggacggcgagaacugcacccugaucgacgcccugcugggcgacccccagugcgacggcuuccagaacaagaagugggaccuguucguggagagaagcaaggccuacagcaacugcuaccccuacgacgugcccgacuacgccagccugagaagccugguggccagcagcggcacccuggaguucaacaacgagagcuucaacuggaccggcgugacccagaacggcaccagcagcgccugcaucagaaagagcagcagcagcuucuucagcagacugaacuggcugacccaccugaacuacaccuaccccgcccugaacgugaccgugcccaacaacgagcaguucgacaagcuguacaucuggggcgugcaccaccccggcaccgacaaggaccagaucuuccuguacgccagaagcagcggcagaaucaccgugagcaccaagagaagccagcaggccgugauccccaacaucggcuacagacccagaaucagagacauccccagcagaaucagcaucuacuggaccaucgugaagcccggcgacauccugcugaucaacagcaccggcaaccugaucgcccccagaggcuacuucaagaucagaagcggcaagagcagcaucaugagaagcgacgcccccaucggcaagugcaagagcgagugcaucacccccaacggcagcauccccaacgacaagcccuuccagaacgugaacagaaucaccuacggcgccugccccagauacgugaagcacagcacccugaagcuggccaccggcaugagaaacgugcccgagaagcagaccagaggcaucuucggcgccaucgccggcuucaucgagaacggcugggagggcaugguggacggcugguacggcuucagacaccagaacagcgagggcagaggccaggccgccgaccugaagagcacccaggccgccaucgaccagaucaacggcaagcugaacagacugaucggcaagaccaacgagaaguuccaccagaucgagaaggaguucagcgagguggagggcagaauccaggaccuggagaaguacguggaggacaccaagaucgaccuguggagcuacaacgccgagcugcugguggcccuggagaaccagcacaccaucgaccugaccgacagcgagaugaacaagcuguucgagaagaccaagaagcagcugagagagaacgccgaggacaugggcaacggcugcuucaagaucuaccacaagugcgacaacgccugcaucggcagcaucagaaacggcaccuacgaccacaacguguacagagacgaggcccugaacaacagauuccagaucaagggcguggagcugaagagcggcuacaaggacuggauccuguggaucagcuucgccaucagcugcuuccugcugugcguggcccugcugggcuucaucaugugggccugccagaagggcaacaucagaugcaacaucugcaucuga

SEQ ID NO: 173731 - RNA, 1701 nt, Artificial Sequence; identical to SEQ ID NO: 172501
  derived and/or modified CDS sequence (opt4) from hemagglutinin__InfluenzaA__ALN39741

SEQ ID NO: 173732 - RNA, 1701 nt, Artificial Sequence
  derived and/or modified CDS sequence (opt4) from hemagglutinin__InfluenzaA__ALN39742
augaagaccaucaucgcccugagcuacauccugugccugguguucgcccagaagauccccggcaacgacaacagcaccgccacccugugccugggccaccacgccgugcccaacggcaccaucgugaagaccaucaccaacgacagaaucgaggugaccaacgccaccgagcuggugcagaacagcagcaucggcgagaucugcgacagcccccaccagauccuggacggcgagaacugcacccugaucgacgcccugcugggcgacccccagugcgacggcuuccagaacaagaagugggaccuguucguggagagaagcaaggccuacagcaacugcuaccccuacgacgugcccgacuacgccagccugagaagccugguggccagcagcggcacccuggaguucaacaacgagagcuucaacuggaccggcgugacccagaacggcaccagcagcgccugcaucagaagaagcagcagcagcuucuucagcagacugaacuggcugacccaccugaacuacaccuaccccgcccugaacgugaccaugcccaacaacgagcaguucgacaagcuguacaucuggggcgugcaccaccccggcaccgacaaggaccagaucuuccuguacgcccagagcagcggcagaaucaccgugagcaccaagagaagccagcaggccgugauccccaacaucggcagcagacccagaaucagagacauccccagcagaaucagcaucuacuggaccaucgugaagcccggcgacauccugcugaucaacagcaccggcaaccugaucgcccccagaggcuacuucaagaucagaagcggcaagagcagcaucaugagaagcgacgcccccaucggcaagugcaagagcgagugcaucacccccaacggcagcauccccaacgacaagcccuuccagaacgugaacagaaucaccuacggcgacugccccagauacgugaagcacagcacccugaagcuggccaccggcaugagaaacgugcccgagaagcagaccagaggcaucuucggcgccaucgccggcuucaucgagaacggcugggagggcaugguggacggcugguacggcuucagacaccagaacagcgagggcagaggccaggccgccgaccugaagagcacccaggccgccaucgaccagaucaacggcaagcugaacagacugaucggcaagaccaacgagaaguuccaccagaucgagaaggaguucagcgagguggagggcagaauccaggaccuggagaaguacguggaggacaccaagaucgaccuguggagcuacaacgccgagcugcugguggcccuggagaaccagcacaccaucgaccugaccgacagcgagaugaacaagcuguucgagaagaccaagaagcagcugagagagaacgccgaggacaugggcaacggcugcuucaagaucuaccacaagugcgacaacgccugcaucggcagcaucagaaacggcaccuacgaccacaacguguacagagacgaggcccugaacaacagauuccagaucaagggcguggagcugaagagcggcuacaaggacuggauccuguggaucagcuucgccaucagcugcuuccugcugugcguggcccugcugggcuucaucaugugggccugccagaagggcaacaucagaugcaacaucugcaucuga

SEQ ID NO: 173733 - RNA, 1701 nt, Artificial Sequence
  derived and/or modified CDS sequence (opt4) from hemagglutinin__InfluenzaA__ALN39743
augaagaccaucaucgcccugagcuacauccugugccugguguucgcccagaagauccccggcaacgacaacagcaccgccacccugugccugggccaccacgccgugcccaacggcaccaucgugaagaccaucaccaacgacagaaucgaggugaccaacgccaccgagcuggugcagaacagcagcaucggcgagaucugcgacagcccccaccagauccuggacggcgagaacugcacccugaucgacgcccugcugggcgacccccagugcgacggcuuccagaacaagaagugggaccuguucguggagagaagcaaggccuacagcaacugcuaccccuacgacgugcccgacuacgccagccugagaagccugguggccagcagcggcacccuggaguucaacaacgagagcuucaacuggaccggcgugacccagaacggcaccagcagcgccugcaucagaaagagcagcagcagcuucuucagcagacugaacuggcugacccaccugaacuacaucuaccccgcccugaacgugaccaugcccaacaacgagcaguucgacaagcuguacaucuggggcgugcaccaccccggcaccgacaaggaccagaucuuccuguacgcccagagcagcggcagaaucaccgugagcaccaagagaagccagcaggccgugauccccaacaucggcagcagacccagaaucagagacauccccagcagaaucagcaucuacuggaccaucgugaagcccggcgacauccugcugaucaacagcaccggcaaccugaucgcccccagaggcuacuucaagaucagaagcggcaagagcagcaucaugagaagcgacgcccccaucggcaagugcaagagcgagugcaucacccccaacggcagcauccccaacgacaagcccuuccagaacgugaacagaaucaccuacggcgccugccccagauacgugaagcacagcacccugaagcuggccaccggcaugagaaacgugcccgagaagcagaccagaggcaucuucggcgccaucgccggcuucaucgagaacggcugggagggcaugguggacggcugguacggcuucagacaccagaacagcgagggcagaggccaggccgccgaccugaagagcacccaggccgccaucgaccagaucaacggcaagcugaacagacugaucggcaagaccaacgagaaguuccaccagaucgagaaggaguucagcgagguggagggcagaauccaggaccuggagaaguacguggaggacaccaagaucgaccuguggagcuacaacgccgagcugcugguggcccuggagaaccagcacaccaucgaccugaccgacagcgagaugaacaagcuguucgagaagaccaagaagcagcugagagagaacgccgaggacaugggcaacggcugcuucaagaucuaccacaagugcgacaacgccugcaucggcagcaucagaaacggcaccuacgaccacaacguguacagagacgaggcccugaacaacagauuccagaucaagggcguggagcugaagagcggcuacaaggacuggauccuguggaucagcuucgccaucagcugcuuccugcugugcguggcccugcugggcuucaucaugugggccugccagaagggcaacaucagaugcaacaucugcaucuga

SEQ ID NO: 173734 - RNA, 1701 nt, Artificial Sequence
  derived and/or modified CDS sequence (opt4) from hemagglutinin__InfluenzaA__ALN39744
augaagaccaucaucgcccugagcuacauccugugccugguguucgcccagaagauccccggcaacgacaacagcaccgccacccugugccugggccaccacgccgugcccaacggcaccaucgugaagaccaucaccaacgacagaaucgaggugaccaacgccaccgagcuggugcagaacagcagcaucggcgagaucugcgacagcccccaccagauccuggacggcgagaacugcacccugaucgacgcccugcugggcgacccccagugcgacggcuuccagaacaagaagugggaccuguucguggagagaagcaaggccuacagcaacugcuaccccuacgacgugcccgacuacgccagccugagaagccugguggccagcagcggcacccuggaguucaacaacgagagcuucaacuggaccggcgugacccagaacggcaccagcagcgccugcaucagaaagagcagcagcagcuucuucagcagacugaacuggcugacccaccugaacuacaccuaccccgcccugaacgugaccaugcccaacaacgagcaguucgacaagcuguacaucuggggcgugcaccaccccggcaccgacaaggaccagaucuuccuguacgcccagagcagcggcagaaucaccgugagcaccaagagaagccagcaggccgugauccccaacaucggcagcagacccagaaucagagacauccccagcagaaucagcaucuacuggaccaucgugaagcccggcgacauccugcugaucaacagcaccggcaaccugaucgcccccagaggcuacuucaagaucagaagcggcaagagcagcaucaugagaagcgacgcccccaucggcaagugcaagagcgagugcaucacccccaacggcagcauccccaacgacaagcccuuccagaacgugaacagaaucaccuacggcgccugccccagauacgugaagcacagcacccugaagcuggccaccggcaugagaaacgugcccgagaagcagaccagaggcaucuucggcgccaucgccggcuucaucgagaacggcugggagggcaugguggacggcugguacggcuucagacaccagaacagcgagggcagaggccaggccgccgaccugaagagcacccaggccgccaucgaccagaucaacggcaagcugaacagacugaucggcaagaccaacgagaaguuccaccagaucgagaaggaguucagcgagguggagggcagaauccaggaccuggagaaguacguggaggacaccaagaucgaccuguggagcuacaacgccgagcugcugguggcccuggagaaccagcacaccaucgaccugaccgacagcgagaugaacaagcuguucgagaagaccaagaagcagcugagagagaacgccgaggacaugggcaacggcugcuucaagaucuaccacaagugcgacaacgccugcaucggcagcaucagaaacggcaccuacgaccacaacguguacagagacgaggcccugaacaacagauuccagaucaagggcguggagcugaagagcggcuacaaggacuggauccuguggaucagcuucgccaucagcugcuuccugcugugcguggcccugcugggcuucaucaugugggccugccagaagggcaacaucagaugcaacaucugcaucuga

SEQ ID NO: 173735 - RNA, 1701 nt, Artificial Sequence
  derived and/or modified CDS sequence (opt4) from hemagglutinin__InfluenzaA__ALN39745
augaagaccaucaucgcccugagcuacauccugugccugguguucgcccagaagauccccggcaacgacaacagcaccgccacccugugccugggccaccacgccgugcccaacggcaccaucgugaagaccaucaccaacgacagaaucgaggugaccaacgccaccgagcuggugcagaacagcagcaucggcgagaucugcgacagcccccaccagauccuggacggcgagaacugcacccugaucgacgcccugcugggcgacccccagugcgacggcuuccagaacaagaagugggaccuguucguggagagaagcaaggccuacagcaacugcuaccccuacgacgugcccgacuacgccagccugagaagccugguggccagcagcggcacccuggaguucaacaacgagagcuucaacuggaccggcgugacccagaacggcaccagcagcgccugcaucagaaagagcagcagcagcuucuucagcagacugaacuggcugacccaccugaacuacaaguaccccgcccugaacgugaccaugcccaacaacgagcaguucgacaagcuguacaucuggggcgugcaccaccccggcaccgacaaggaccagaucuuccuguacgcccagagcagcggcagaaucaccgugagcaccaagagaagccagcaggccgugauccccaacaucggcagcagacccagaaucagagacauccccagcagaaucagcaucuacuggaccaucgugaagcccggcgacauccugcugaucaacagcaccggcaaccugaucgcccccagaggcuacuucaagaucagaagcggcaagagcagcaucaugagaagcgacgcccccaucggcaagugcaagagcgagugcaucacccccaacggcagcauccccaacgacaagcccuuccagaacgugaacagaaucaccuacggcgccugccccagauacgugaagcacagcacccugaagcuggccaccggcaugagaaacgugcccgagaagcagaccagaggcaucuucggcgccaucgccggcuucaucgagaacggcugggagggcaugguggacggcugguacggcuucagacaccagaacagcgagggcagaggccaggccgccgaccugaagagcacccaggccgccaucgaccagaucaacggcaagcugaacagacugaucggcaagaccaacgagaaguuccaccagaucgagaaggaguucagcgagguggagggcagaauccaggaccuggagaaguacguggaggacaccaagaucgaccuguggagcuacaacgccgagcugcugguggcccuggagaaccagcacaccaucgaccugaccgacagcgagaugaacaagcuguucgagaagaccaagaagcagcugagagagaacgccgaggacaugggcaacggcugcuucaagaucuaccacaagugcgacaacgccugcaucggcagcaucagaaacggcaccuacgaccacaacguguacagagacgaggcccugaacaacagauuccagaucaagggcguggagcugaagagcggcuacaaggacuggauccuguggaucagcuucgccaucagcugcuuccugcugugcguggcccugcugggcuucaucaugugggccugccagaagggcaacaucagaugcaacaucugcaucuga

SEQ ID NO: 173736 - RNA, 1701 nt, Artificial Sequence; identical to SEQ ID NO: 173734
  derived and/or modified CDS sequence (opt4) from hemagglutinin__InfluenzaA__ALN39746

SEQ ID NO: 173737 - RNA, 1701 nt, Artificial Sequence; identical to SEQ ID NO: 173429
  derived and/or modified CDS sequence (opt4) from hemagglutinin__InfluenzaA__ALN39747

SEQ ID NO: 173738 - RNA, 1701 nt, Artificial Sequence
  derived and/or modified CDS sequence (opt4) from hemagglutinin__InfluenzaA__ALN39748
augaagaccaucaucgcccugagcuacauccugugccugguguucgcccagaagauccccggcaacgacaacagcaccgccacccugugccugggccaccacgccgugcccaacggcaccaucgugaagaccaucaccaacgacagaaucgaggugaccaacgccaccgagcuggugcagaacagcagcaucggcgagaucugcgacagcccccaccagauccuggacggcgagaacugcacccugaucgacgcccugcugggcgacccccagugcgacggcuuccagaacaagaagugggaccuguucguggagagaagcaaggccuacagcaacugcuaccccuacgacgugcccgacuacgccagccugagaagccugguggccagcagcggcacccuggaguucaacaacgagagcuucaacuggaccggcgugacccagaacggcaccagcagcgccugcaucagaagaagcagcagcagcuucuucagcagacugaacuggcugacccaccugaacuacgccuaccccgcccugaacgugaccaugcccaacaacgagcaguucgacaagcuguacaucuggggcgugcaccaccccggcaccgacaaggaccagaucuuccuguacgcccagagcagcggcagaaucaccgugagcaccaagagaagccagcaggccgugauccccaacaucggcagcagacccagaaucagagacauccccagcagaaucagcaucuacuggaccaucgugaagcccggcgacauccugcugaucaacagcaccggcaaccugaucgcccccagaggcuacuucaagauccugagcggcaagagcagcaucaugagaagcgacgcccccaucggcaagugcaagagcgagugcaucacccccaacggcagcauccccaacgacaagcccuuccagaacgugaacagaaucaccuacggcgccugccccagauacgugaagcacagcacccugaagcuggccaccggcaugagaaacgugcccgagaagcagaccagaggcaucuucggcgccaucgccggcuucaucgagaacggcugggagggcaugguggacggcugguacggcuucagacaccagaacagcgagggcagaggccaggccgccgaccugaagagcacccaggccgccaucgaccagaucaacggcaagcugaacagacugaucggcaagaccaacgagaaguuccaccagaucgagaaggaguucagcgagguggagggcagaauccaggaccuggagaaguacguggaggacaccaagaucgaccuguggagcuacaacgccgagcugcugguggcccuggagaaccagcacaccaucgaccugaccgacagcgagaugaacaagcuguucgagaagaccaagaagcagcugagagagaacgccgaggacaugggcaacggcugcuucaagaucuaccacaagugcgacaacgccugcaucggcagcaucagaaacggcaccuacgaccacaacguguacagagacgaggcccugaacaacagauuccagaucaagggcguggagcugaagagcggcuacaaggacuggauccuguggaucagcuucgccaucagcugcuuccugcugugcguggcccugcugggcuucaucaugugggccugccagaagggcaacaucagaugcaacaucugcaucuga

SEQ ID NO: 173739 - RNA, 1701 nt, Artificial Sequence
  derived and/or modified CDS sequence (opt4) from hemagglutinin__InfluenzaA__ALN39749
augaagaccaucaucgcccugagcuacauccugugccugguguucgcccagaagcugcccggcaacgacaacagcaccgccacccugugccugggccaccacgccgugcccaacggcaccaucgugaagaccaucaccaacgacagaaucgaggugaccaacgccaccgagcuggugcagaacagcagcaucggcgagaucugcaacagcccccaccagauccuggacggcgagaacugcacccugaucgacgcccugcugggcgacccccagugcgacggcuuccagaacaagaagugggaccuguucguggagagaagcaaggccuacagcaacugcuaccccuacgacgugcccgacuacgccagccugagaagccugguggccagcagcggcacccuggaguucaacaacgagagcuucaacugggccggcgugacccagaacggcaccagcagcagcugcaucagaggcagcaacagcagcuucuucagcagacugaacuggcugacccaccugaacagcaaguaccccgcccugaacgugaccaugcccaacaacgagcaguucgacaagcuguacaucuggggcgugcaccaccccggcaccgacaaggaccagaucuuccuguacgcccagcccagcggcagaaucaccgugagcaccaagagaagccagcaggccgugauccccaacaucggcagcagacccagaaucagagacauccccagcagaaucagcaucuacuggaccaucgugaagcccggcgacauccugcugaucaacagcaccggcaaccugaucgcccccagaggcuacuucaagaucagaagcggcaagagcagcaucaugagaagcgacgcccccaucggcaagugcaagagcgagugcaucacccccaacggcagcauccccaacgacaagcccuuccagaacgugaacagaaucaccuacggcgccugccccagauacgugaagcagagcacccugaagcuggccaccggcaugagaaacgugcccgagagacagaccagaggcaucuucggcgccaucgccggcuucaucgagaacggcugggagggcaugguggacggcugguacggcuucagacaccagaacagcgagggcagaggccaggccgccgaccugaagagcacccaggccgccaucgaccagaucaacggcaagcugaacagacugaucggcaagaccaacgagaaguuccaccagaucgagaaggaguucagcgagguggagggcagaauccaggaccuggagaaguacguggaggacaccaagaucgaccuguggagcuacaacgccgagcugcugguggcccuggagaaccagcacaccaucgaccugaccgacagcgagaugaacaagcuguucgagaagaccaagaagcagcugagagagaacgccgaggacaugggcaacggcugcuucaagaucuaccacaagugcgacaacgccugcaucggcagcaucagaaacggcaccuacgaccacgacguguacagagacgaggcccugaacaacagauuccagaucaagggcguggagcugaagagcggcuacaaggacuggauccuguggaucagcuucgccaucagcugcuuccugcugugcguggcccugcugggcuucaucaugugggccugccagaagggcaacaucagaugcaacaucugcaucuga

SEQ ID NO: 173740 - RNA, 1701 nt, Artificial Sequence; identical to SEQ ID NO: 172501
  derived and/or modified CDS sequence (opt4) from hemagglutinin__InfluenzaA__ALN39750

SEQ ID NO: 173741 - RNA, 1701 nt, Artificial Sequence; identical to SEQ ID NO: 172501
  derived and/or modified CDS sequence (opt4) from hemagglutinin__InfluenzaA__ALN39789

SEQ ID NO: 173742 - RNA, 1701 nt, Artificial Sequence; identical to SEQ ID NO: 173031
  derived and/or modified CDS sequence (opt4) from hemagglutinin__InfluenzaA__ALO75895

SEQ ID NO: 173743 - RNA, 1701 nt, Artificial Sequence
  derived and/or modified CDS sequence (opt4) from hemagglutinin__InfluenzaA__ALO75907
auggagaagaucgugcugcugcuggccaucgugagccuggugaagggcgaccagaucugcaucggcuaccacgccaacaacagcaccgagcagguggacaccaucauggagaagaacgugaccgugacccacgcccaggacauccuggagaagacccacaacggcaagcugugcgaccugaacggcgugaagccccugauccugaaggacugcagcguggccggcugguuccugggcaacagaaugugcgacgaguucaucagagugcccgaguggagcuacaucguggagagagccaaccccgccaacgaccugugcuaccccggcaaccugaacgacuacgaggagcugaagcaccugcugagcagaaucaaccacuucgagaagacccugaucauccccaagagcagcuggcccaaccacaccagcagcggcgugagcgccgccugccccuaccagggcaugcccagcuucuucagaaacgugguguggcugaccaagaagaacgacgccuaccccaccaucaagaugagcuacaacaacaccuacagagaggaccugcugauccuguggggcauccaccacagcaacaacgccgccgagcagaccaaccuguacaagaaccccaccaccuacgugagcgugggcaccagcacccugaaccagagacuggagcccaagaucgccaccagaagccaggugaacggccagagaggcagaauggacuucuucuggaccauccugaagcccaacgacgccauccacuucgagagcaacggcaacuucaucgcccccgaguacgccuacaagaucgugaagaagggcgacagcaccaucaugaagagcgagauggaguacggccacugcaacaccaagugccagacccccaucggcgccaucaacagcagcaugcccuuccacaacauccacccccugaccaucggcgagugccccaaguacgugaagagcaacaagcuggugcuggccaccggccugagaaacagcccccugagagagagaagaagaaagagaggccuguucggcgccaucgccggcuucaucgagggcggcuggcagggcaugguggacggcugguacggcuaccaccacagcaacgagcagggcagcggcuacgccgccgacagagagagcacccagaaggccaucgacggcgugaccaacaaggugaacagcaucaucgacaagaugaacacccaguucgaggccgugggcagagaguucaacaaccuggagagaagaaucgagaaccugaacaagaagauggaggacggcuuccuggacguguggaccuacaacgccgagcugcuggugcugauggagaacgagagaacccuggacuuccacgacagcaacgugaagaaccuguacgacaaggugagacugcagcugagagacaacgccaaggagcugggcaacggcugcuucgaguucuaccacaagugcgacaacgagugcauggagagcgugagaaacggcaccuacgacuacccccuguacagcgaggaggccagacugaagagagaggagaucagcggcgugaagcuggagagcaucggcaccuaccagauccugagcaacuacagcaccguggccagcagccuggcccuggccaucaucguggccggccugagccuguggaugugcagcaacggcagccugcagugcagaaucugcaucuga

SEQ ID NO: 173744 - RNA, 1701 nt, Artificial Sequence
  derived and/or modified CDS sequence (opt4) from hemagglutinin__InfluenzaA__ALO75919
auggagaagaucgugcugcugcuggccaucgugagccuggugaagggcgaccagaucugcaucggcuaccacgccaacaacagcaccgagcagguggacaccaucauggagaagaacgugaccgugacccacgcccaggacauccuggagaagacccacaacggcaagcugugcgaccugaacggcgugaagccccugauccugaaggacugcagcguggccggcuggcugcacggcaacagaaugugcgacgaguucaucagagugcccgaguggagcuacaucguggagagagccaaccccgccaacgaccugugcuaccccggcaaccugaacgacuacgaggagcugaagcaccugcugagcagaaucaaccacuucgagaagacccugaucauccccaagagcagcuggcccaaccacaccagcagcggcgugagcgccgccugccccuaccagggcaugcccagcuucuucagaaacgugguguggcugaccaagaagaacgacgccuaccccaccaucaagaugagcuacaacaacaccuacagagaggaccugcugauccuguggggcauccaccacagcaacaacgccgccgagcagaccaaccuguacaagaaccccaccaccuacgugagcgugggcaccagcacccugaaccagagacuggagcccaagaucgccaccagaagccaggugaacggccagagaggcagaauggacuucuucuggaccauccugaagcccaacgacgccauccacuucgagagcaacggcaacuucaucgcccccgaguacgccuacaagaucgugaagaagggcgacagcaccaucaugaagagcgagauggaguacggccacugcaacaccaagugccagacccccaucggcgccaucaacagcagcaugcccuuccacaacauccacccccugaccaucggcgagugccccaaguacgugaagagcaacaagcuggugcuggccaccggccugagaaacagcccccugagagagagaagaagaaagagaggccuguucggcgccaucgccggcuucaucgagggcggcuggcagggcaugguggacggcugguacggcuaccaccacagcaacgagcagggcagcggcuacgccgccgacagagagagcacccagaaggccaucgacggcgugaccaacaaggugaacagcaucaucgacaagaugaacacccaguucgaggccgugggcagagaguucaacaaccuggagagaagaaucgagaaccugaacaagaagauggaggacggcuuccuggacguguggaccuacaacgccgagcugcuggugcugauggagaacgagagaacccuggacuuccacgacagcaacgugaagaaccuguacgacaaggugagacugcagcugagagacaacgccaaggagcugggcaacggcugcuucgaguucuaccacaagugcgacaacgagugcauggagagcgugagaaacggcaccuacgacuacccccuguacagcgaggaggccagccugaagagagaggagaucagcggcgugaagcuggagagcaucggcaccuaccagauccugagcaucuacagcaccguggccagcagccuggcccuggccaucaucguggccggccugagccuguggaugugcagcaacggcagccugcagugcagaaucugcaucuga

SEQ ID NO: 173745 - RNA, 1683 nt, Artificial Sequence
  derived and/or modified CDS sequence (opt4) from hemagglutinin__InfluenzaA__ALT20080
auggagaccgugagccugaucaccauccugcugguggccaccgugagcaacgccgacaagaucugcaucggcuaccagagcaccaacagcaccgagaccguggacacccugaccgagaacaacgugcccgugacccacgccaaggagcugcugcacaccgagcacaacggcaugcugugcgccaccagccugggccagccccugauccuggacaccugcaccaucgagggccugaucuacggcaaccccagcugcgaccugagccuggagggcagagaguggagcuacaucguggagagacccagcgccgugaacggccugugcuaccccggcaacguggagaaccuggaggagcugagaagccuguucagcagcgccagaagcuaccagagaauccagaucuuccccgacaccaucuggaacgugagcuacgacggcaccagcaccgccugcagcggcagcuucuacagaagcaugagauggcugaccagaaagaacggcgacuaccccauccaggacgcccaguacaccaacaaccagggcaagaacauccuguucauguggggcaucaaccacccccccaccgacaccacccagagagaccuguacaccagaaccgacaccaccaccagcguggccaccgaggagaucaacagaaucuucaagccccugaucggccccagaccccuggugaacggccugaugggcagaaucgacuacuacuggagcgugcugaagcccggccagacccugagaaucaagagcgacggcaaccugaucgcccccugguucggccacauccugagcggcgagagccacggcagaauccugaagaccaaccugaagagaggcagcugcaccgugcagugccagaccgagaagggcggccugaacaccacccugcccuuccagaacgugagcaaguacgccuucggcaacugcagcaaguacaucggcaucaagagccugaagcuggccgugggccugagaaacgugcccagcagaagcagcagaggccuguucggcgccaucgccggcuucaucgagggcggcuggagcggccugguggccggcugguacggcuuccagcacagcaacgaccagggcgugggcauggccgccgacagagacagcacccagaaggccaucgacaagaucaccagcaaggugaacaacaucguggacaagaugaacaagcaguacgagaucaucgaccacgaguucagcgagguggagaccagacugaacaugaucaacaacaagaucgacgaccagauccaggacaucugggccuacaacgccgagcugcuggugcugcuggagaaccagaagacccuggacgagcacgacgccaacgugaacaaccuguacaacaaggugaagagagcccugggcagcaacgccguggaggacggcaagggcugcuucgagcuguaccacaagugcgacgaccagugcauggagaccaucagaaacggcaccuacaacagaagaaaguaccaggaggagagcaagcuggagagacagaagaucgagggcgugaagcuggagagcgagggcaccuacaagauccugaccaucuacagcaccguggccagcagccuggugaucgccaugggcuucgccgccuuccuguucugggccaugagcaacggcagcugcagaugcaacaucugcaucuga

SEQ ID NO: 173746 - RNA, 1701 nt, Artificial Sequence
  derived and/or modified CDS sequence (opt4) from hemagglutinin__InfluenzaA__ALT66860
augaaggccauccugguggugcugcuguacaccuucaccaccgccaacgccgacacccugugcaucggcuaccacgccaacaacagcaccgacaccguggacaccgugcuggagaagaacgugaccgugacccacagcgugaaccugcuggaggacaagcacaacggcaagcugugcaagcugagaggcguggccccccugcaccugggcaagugcaacaucgccggcuggauccugggcaaccccgagugcgagagccugagcaccgccagcagcuggagcuacaucguggagaccagcaacagcgacaacggcaccugcuaccccggcgacuucaucaacuacgaggagcugagagagcagcugagcagcgugagcagcuucgagagauucgagaucuuccccaagaccagcagcuggcccaaccacgacagcaacaagggcgugaccgccgccugcccccacgccggcgccaagagcuucuacaagaaccugaucuggcuggugaagaagggcaacagcuaccccaagcugaaccagagcuacaucaacgacaagggcaaggaggugcuggugcuguggggcauccaccaccccagcaccaccgccgaccagcagagccuguaccagaacgccgacgccuacguguucgugggcaccagcagauacagcaagaaguucaagcccgagaucgccaccagacccaaggugagagaccaggagggcagaaugaacuacuacuggacccugguggagcccggcgacaagaucaccuucgaggccaccggcaaccugguggugcccagauacgccuucaccauggagagaaacgccggcagcggcaucaucaucagcgacacccccgugcacgacugcaacaccaccugccagacccccgagggcgccaucaacaccagccugcccuuccagaacauccaccccaucaccaucggcaagugccccaaguacgugaagagcaccaagcugagacuggccaccggccugagaaacgugcccagcauccagagcagaggccuguucggcgccaucgccggcuucaucgagggcggcuggaccggcaugguggacggcugguacggcuaccaccaccagaacgagcagggcagcggcuacgccgccgaccugaagagcacccagaacgccaucgacaagaucaccaacaaggugaacagcgugaucgagaagaugaacacccaguucaccgccgugggcaaggaguucaaccaccuggagaagagaaucgagaaccugaacaagaagguggacgacggcuuccuggacaucuggaccuacaacgccgagcugcuggugcugcuggagaacgagagaacccuggacuaccacgacagcaacgugaagaaccuguacgagaaggugagaaaccagcugaagaacaacgccaaggagaucggcaacggcugcuucgaguucuaccacaagugcgacaacaccugcauggagagcgugaagaacggcaccuacgacuaccccaaguacagcgaggaggccaagcugaacagagagaagaucgacggcgugaagcuggagagcaccagaaucuaccagauccuggccaucuacagcaccguggccagcagccuggugcugguggugagccugggcgccaucagcuucuggaugugcagcaacggcagccugcagugcagaaucugcaucuga

SEQ ID NO: 173747 - RNA, 1701 nt, Artificial Sequence
  derived and/or modified CDS sequence (opt4) from hemagglutinin__InfluenzaA__AMA65391
augaaggccauccugguggugcugcuguacaccuucaccaccgccaacgccgacacccugugcaucggcuaccacgccaacaacagcaccgacaccguggacaccgugcuggagaagaacgugaccgugacccacagcgugaaccugcuggaggacaagcacaacggcaagcugugcaagcugagaggcguggccccccugcaccugggcaagugcaacaucgccggcuggauccugggcaaccccgagugcgagagccugagcaccgccagcagcuggagcuacaucguggagaccagcaacagcgacaacggcaccugcuaccccggcgacuucaucaacuacgaggagcugagagagcagcugagcagcgugagcagcuucgagagauucgagaucuuccccaagaccagcagcuggcccaaccacgacagcaacaagggcgugaccgccgccugcccccacgccggcgccaagagcuucuacaagaaccugaucuggcuggugaagaagggcaacagcuaccccaagcugaaccagagcuacaucaacgacaagggcaaggaggugcuggugcuguggggcauccaccaccccagcaccaccgccgaccagcagagccuguaccagaacgccgacgccuacguguucgugggcaccagcagauacagcaagaaguucaagcccgagaucgccaccagacccaaggugagaggccaggagggcagaaugaacuacuacuggacccugguggagcccggcgacaagaucaccuucgaggccaccggcaaccugguggugcccagauacgccuucaccauggagagaaacgccggcagcggcaucaucaucagcgacacccccgugcacgacugcaacaccaccugccagacccccgagggcgccaucaacaccagccugcccuuccagaacauccaccccaucaccaucggcaagugccccaaguacgugaagagcaccaagcugagacuggccaccggccugagaaacgugcccagcauccagagcagaggccuguucggcgccaucgccggcuucaucgagggcggcuggaccggcaugguggacggcugguacggcuaccaccaccagaacgagcagggcagcggcuacgccgccgaccugaagagcacccagaacgccaucgacaagaucaccaacaaggugaacagcgugaucgagaagaugaacacccaguucaccgccgugggcaaggaguucaaccaccuggagaagagaaucgagaaccugaacaagaagguggacgacggcuuccuggacaucuggaccuacaacgccgagcugcuggugcugcuggagaacgagagaacccuggacuaccacgacagcaacgugaagaaccuguacgagaaggugagaaaccagcugaagaacaacgccaaggagaucggcaacggcugcuucgaguucuaccacaagugcgacaacaccugcauggagagcgugaagaacggcaccuacgacuaccccaaguacagcgaggaggccaagcugaacagagagaagaucgacggcgugaagcuggagagcaccagaaucuaccagauccuggccaucuacagcaccguggccagcagccuggugcuggugguguuccugggcgccaucagcuucuggaugugcagcaacggcagccugcagugcagaaucugcaucuga

SEQ ID NO: 173748 - RNA, 1701 nt, Artificial Sequence
  derived and/or modified CDS sequence (opt4) from hemagglutinin__InfluenzaA__AMA65393
augaaggccauccugguggugcugcuguacaccuucaccaccgccaacgccgacacccugugcaucggcuaccacgccaacaacagcaccgacaccguggacaccgugcuggagaagaacgugaccgugacccacagcgugaaccugcuggaggacaagcacaacggcaagcugugcaagcugagaggcguggccccccugcaccugggcaagugcaacaucgccggcuggauccugggcaaccccgagugcgagagccugagcaccgccagcagcuggagcuacaucguggagaccagcaacagcgacaacggcaccugcuaccccggcgacuucaucaacuacgaggagcugagagagcagcugagcagcgugagcagcuucgagagauucgagaucuuccccaagaccagcagcuggcccaaccacgacagcaacaagggcgugaccgccgccugcccccacgccggcgccaagagcuucuacaagaaccugaucuggcuggugaagaagggcaacagcuaccccaagcugaaccagagcuacaucaacgacaagggcaaggaggugcuggugcuguggggcauccaccaccccagcaccaccgccgaccagcagagccuguaccagaacgccgacgccuacguguucgugggcaccagcagauacagcaagaaguucaagcccgagaucgccaccagacccaaggugagagaccaggagggcagaaugaacuacuacuggacccugguggagcccggcgacaagaucaccuucgaggccaccggcaaccugguggugcccagauacgccuucaccauggagagaaacgccggcagcggcaucaucaucagcgacacccccgugcacgacugcaacaccaccugccagacccccgagggcgccaucaacaccagccugcccuuccagaacauccaccccaucaccaucggcaagugccccaaguacgugaagagcaccaagcugagacuggccaccggccugagaaacgugcccagcauccagagcagaggccuguucggcgccaucgccggcuucaucgagggcggcuggaccggcaugguggacggcugguacggcuaccaccaccagaacgagcagggcagcggcuacgccgccgaccugaagagcacccagaacgccaucgacaagaucaccaacaaggugaacagcgugaucgagaagaugaacacccaguucaccgccgugggcaaggaguucaaccaccuggagaagagaaucgagaaccugaacaagaagguggacgacggcuuccuggacaucuggaccuacaacgccgagcugcuggugcugcuggagaacgagagaacccuggacuaccacgacagcaacgugaagaaccuguacgagaaggugagaaaccagcugaagaacaacgccaaggagaucggcaacggcugcuucgaguucuaccacaagugcgacaacaccugcauggagagcgugaagaacggcaccuacgacuaccccaaguacagcgaggaggccaagcugaacagagagaagaucgacggcgugaagcuggagagcaccagaaucuaccagauccuggccaucuacagccccguggccagcagccuggugcuggugguguuccugggcgccaucagcuucuggaugugcagcaacggcagccugcagugcagaaucugcaucuga

SEQ ID NO: 173749 - RNA, 1701 nt, Artificial Sequence
  derived and/or modified CDS sequence (opt4) from hemagglutinin__InfluenzaA__BAA02768
augaaggccaagcugcuggugcugcugugcgccuucaccgccaccgacgccgacaccaucugcaucggcuaccacgccaacaacagcaccgacaccguggacaccgugcuggagaagaacgugaccgugacccacagcgugaaccugcuggaggacagccacaacggcaagcugugcagacugaagggcaucgccccccugcagcugggcaacugcagcaucgccggcuggauccugggcaaccccgagugcgagagccuguucagcaaggagagcuggagcuacaucgccgagacccccaacagcgagaacggcaccugcuaccccggcuacuucgccgacuacgaggagcugagagagcagcugagcagcgugagcagcuucgagagauucgagaucuuccccaaggagagcagcuggcccaaccacaccgugaccaagggcgugaccgccagcugcagccacaacggcaagagcagcuucuacagaaaccugcuguggcugaccggcaagaacggccuguaccccaaccugagcaagagcuacgugaacaacaaggagaaggaggugcuggugcuguggggcgugcaccaccccagcaacaucggcgaccagagagccaucuaccacaccgagaacgccuacgugagcguggugagcagccacuacagcagaagauucacccccgagaucgccaagagacccaaggugagaggccaggagggcagaaucaacuacuacuggacccugcuggagcccggcgacaccaucaucuucgaggccaacggcaaccugaucgcccccugguacgccuucgcccugagcagaggcuucggcagcggcaucaucaccagcaacgccagcauggacgagugcgacgccaagugccagaccccccagggcgccaucaacagcagccugcccuuccagaacgugcaccccgugaccaucggcgagugccccaaguacgugagaagcaccaagcugagaauggugaccggccugagaaacauccccagcauccagagcagaggccuguucggcgccaucgccggcuucaucgagggcggcuggaccggcaugaucgacggcugguacggcuaccaccaccagaacgagcagggcagcggcuacgccgccgaccagaagagcacccagaacgccaucaacggcaucaccaacaaggugaacagcgugaucgagaagaugaacacccaguucaccgccgugggcaaggaguucaacaagcuggagagaagaauggaguaccugaacaagaagguggacgacggcuuccuggacaucuggaccuacaacgccgagcugcuggugcugcuggagaacgagagaacccuggacuuccacgacagcaacgugaagaaccuguacgagaaggugaagagccagcugaagaacaacgccaaggagaucggcuacggcugcuucgaguucuaccacaagugcaacaacgagugcauggagagcgugaagaacggcaccuacgacuaccccaaguacagcgaggagagcaagcugaacagagagaagaucgacggcgugaagcuggagagcaugggcguguaccagauccuggccaucuacagcaccguggccagcagccuggugcugcuggugagccugggcgccaucagcuucuggaugugcagcaacggcagccugcagugcagaaucugcaucuga

SEQ ID NO: 173750 - RNA, 1701 nt, Artificial Sequence
  derived and/or modified CDS sequence (opt4) from hemagglutinin__InfluenzaA__BAA02769
augaaggccaagcugcuggugcugcugugcgccuucaccgccaccgacgccgacaccaucugcaucggcuaccacgccaacaacagcaccgacaccguggacaccgugcuggagaagaacgugaccgugacccacagcgugaaccugcuggaggacagccacaacggcaagcugugcagacugaagggcaucgccccccugcagcugggcaacugcagcaucgccggcuggauccugggcaaccccgagugcgagagccuguucagcaaggagagcuggagcuacaucgccgagacccccaacagcgagaacggcaccugcuaccccggcuacuucgccgacuacgaggagcugagagagcagcugagcagcgugagcagcuucgagagauucgagaucuuccccaaggagagcagcuggcccaaccacaccgugaccaagggcgugaccgccagcugcagccacaacggcaagagcagcuucuacagaaaccugcuguggcugaccggcaagaacggccuguaccccaaccugagcaagagcuacgugaacaacaaggagaaggaggugcuggugcuguggggcgugcaccaccccagcaacaucagagaccagagagccaucuaccacaccgagaacgccuacgugagcguggugagcagccacuacagcagaagauucacccccgagaucgccaagagacccaaggugagagaccaggagggcagaaucaacuacuacuggacccugcuggagcccggcgacaccaucaucuucgaggccaacggcaaccugaucgcccccugguacgccuucgcccugagcagaggcuucggcagcggcaucaucaccagcaacgccagcauggacgagugcgacgccaagugccagaccccccagggcgccaucaacagcagccugcccuuccagaacgugcaccccgugaccaucggcgagugccccaaguacgugagaagcaccaagcugagaauggugaagggccugagaaacauccccagcauccagagcagaggccuguucggcgccaucgccggcuucaucgagggcggcuggaccggcaugaucgacggcugguacggcuaccaccaccagaacgagcagggcagcggcuacgccgccgaccagaagagcacccagaacgccaucaacggcaucaccaacaaggugaacagcgugaucgagaagaugaacacccaguucaccgccgugggcaaggaguucaacaagcuggagagaagaauggaguaccugaacaagaagguggacgacggcuuccuggacaucuggaccuacaacgccgagcugcuggugcugcuggagaacgagagaacccuggacuuccacgacagcaacgugaagaaccuguacgagaaggugaagagccagcugaagaacaacgccaaggagaucggcuacggcugcuucgaguucuaccacaagugcaacaacgagugcauggagagcgugaagaacggcaccuacgacuaccccaaguacagcgaggagagcaagcugaacagagagaagaucgacggcgugaagcuggagagcaugggcguguaccagauccuggccaucuacagcaccguggccagcagccuggugcugcuggugagccugggcgccaucagcuucuggaugugcagcaacggcagccugcagugcagaaucugcaucuga

SEQ ID NO: 173751 - RNA, 1689 nt, Artificial Sequence
  derived and/or modified CDS sequence (opt4) from hemagglutinin__InfluenzaA__BAC43764
auggccaucaucuaccugauccugcuguucaccgccgugagaggcgaccagaucugcaucggcuaccacgccaacaacagcaccgagaagguggacaccauccuggagagaaacgugaccgugacccacgccaagaacauccuggagaagacccacaacggcaagcugugcaagcugaacggcauccccccccuggagcugggcgacugcagcaucgccggcuggcugcugggcaaccccgagugcgacagacugcugaucgugcccgaguggagcuacaucauggagaaggagaaccccagagacggccugugcuaccccggcagcuucaacgacuacgaggagcugaagcaccugcugagcagcgugaagcacuucgagaaggugaagauccugcccaaggacagauggacccagcacaccaccaccggcggcagcagagccugcgccgugagcggcaaccccagcuucuucagaaacaugguguggcugaccaagaagggcagcaacuaccccguggccaagggcagcuacaacaacaccagcggcgagcagaugcugaucaucuggggcgugcaccaccccaucgacgagaccgagcagaucacccuguaccagaacgugggcaccuacgugagcgugggcaccagcacccugaacaagagaagcacccccgagaucgccaccagacccaaggugaacggccugggcagcagaauggaguucagcuggacccugcuggacaugugggacaccaucaacuucgagagcaccggcaaccugaucgcccccgaguacggcuucaagaucagcaagagaggcagcagcggcaucaugaagaccgagggcacccuggagaacugcgagaccaagugccagaccccccugggcgccaucaacaccacccugcccuuccacaacgugcacccccugaccaucggcgagugccccaaguacgugaagagcgagaagcuggugcuggccaccggccugagaaacgugccccagaucgagagcagaggccuguucggcgccaucgccggcuucaucgagggcggcuggcagggcaugguggacggcugguacggcuaccaccacagcaacgaccagggcagcggcuacgccgccgacaaggagagcacccagaaggccuucgacggcaucaccaacaaggugaacagcgugaucgagaagaugaacacccaguucgaggccgugggcaaggaguucagcaaccuggagagaagacuggagaaccugaacaagaagauggaggacggcuuccuggacguguggaccuacaacgccgagcugcuggugcugauggagaacgagagaacccuggacuuccacgacagcaacgugaagaaccuguacgacaaggugagaaugcagcugagagacaacgugaaggagcugggcaacggcugcuucgaguucuaccacaagugcgacgacgagugcaugaacagcgugaagaacggcaccuacgacuaccccaaguacgaggaggagagcaagcugaacagaaacgagaucaagggcgugaagcugagcagcaugggcguguaccagauccuggccaucuacgccaccguggccggcagccugagccuggccaucaugauggccggcaucagcuucuggaugugcagcaacggcagccugcaguucagaaucugcaucuga

SEQ ID NO: 173752 - RNA, 1707 nt, Artificial Sequence
  derived and/or modified CDS sequence (opt4) from hemagglutinin__InfluenzaA__BAE07201
auggagaagaucgugcugcuguucgccaucgugagccuggugaagagcgaccagaucugcaucggcuaccacgccaacaacagcaccgagcagguggacaccaucauggagaagaacgugaccgugacccacgcccaggacauccuggagaagacccacaacggcaagcugugcgaccuggacggcgugaagccccugauccugagagacugcagcguggccggcuggcugcugggcaaccccaugugcgacgaguucaucaacgugcccgaguggagcuacaucguggagaaggccaaccccgccaacgaccugugcuaccccggcgacuucaacgacuacgaggagcugaagcaccugcugagcagaaucaaccacuucgagaagauccagaucauccccaagaacagcuggagcagccacgaggccagccugggcgugagcagcgccugccccuaccagggcaagagcagcuucuucagaaacgugguguggcugaucaagaagaacaacgccuaccccaccaucaagagaagcuacaacaacaccaaccaggaggaccugcuggugcuguggggcauccaccaccccaacgacgccgccgagcagaccagacuguaccagaaccccaccaccuacaucagcgugggcaccagcacccugaaccagagacuggugcccaagaucgccaccagaagcaaggugaacggccagaacggcagaauggaguucuucuggaccauccugaagcccaacgacgccaucaacuucgagagcaacggcaacuucaucgcccccgaguacgccuacaagaucgugaagaagggcgacagcgccaucaugaagagcgagcuggaguacggcaacugcaacaccaagugccagacccccaugggcgccaucaacagcagcaugcccuuccacaacauccacccccugaccaucggcgagugccccaaguacgugaagagcaacagacuggugcuggccaccggccugagaaacagcccccagagagagagaagaagaaagaagagaggccuguucggcgccaucgccggcuucaucgagggcggcuggcagggcaugguggacggcugguacggcuaccaccacagcaacgagcagggcagcggcuacgccgccgacaaggagagcacccagaaggccaucgacggcgugaccaacaaggugaacagcaucaucgacaagaugaacacccaguucgaggccgugggcagagaguucaacaaccuggagagaagaaucgagaaccugaacaagaagauggaggacggcuuccuggacguguggaccuacaacgccgagcugcuggugcugauggagaacgagagaacccuggacuuccacgacagcaacgugaagaaccuguacgacaaggugagacugcagcugagagacaacgccaaggagcugggcaacggcugcuucgaguucuaccacaagugcgacaacgagugcauggagagcgugagaaacggcaccuacgacuacccccaguacagcgaggaggccagacugaagagagaggagaucagcggcgugaagcuggagagcaucggcaccuaccagauccugagcaucuacagcaccguggccagcagccuggcccuggccaucaugguggccggccugagccuguggaugugcagcaacggcagccugcagugcagaaucugcaucuga

SEQ ID NO: 173753 - RNA, 1701 nt, Artificial Sequence
  derived and/or modified CDS sequence (opt4) from hemagglutinin__InfluenzaA__BAH95823
augaaggccauccugguggugcugcuguacaccuucgccaccgccaacgccgacacccugugcaucggcuaccacgccaacaacagcaccgacaccguggacaccgugcuggagaagaacgugaccgugacccacagcgugaaccugcuggaggacaagcacaacggcaagcugugcaagcugagaggcguggccccccugcaccugggcaagugcaacaucgccggcuggauccugggcaaccccgagugcgagagccugagcaccgccagcagcuggagcuacaucguggagaccagcagcagcgacaacggcaccugcuaccccggcgacuucaucgacuacgaggagcugagagagcagcugagcagcgugagcagcuucgagagauucgagaucuuccccaagaccagcagcuggcccaaccacgacagcaacaagggcgugaccgccgccugcccccacgccggcgccaagagcuucuacaagaaccugaucuggcuggugaagaagggcaacagcuaccccaagcugagcaagagcuacaucaacgacaagggcaaggaggugcuggugcuguggggcauccaccaccccagcaccagcgccgaccagcagagccuguaccagaacgccgacgccuacguguucgugggcagcagcagauacagcaagaaguucaagcccgagaucgccaucagacccaaggugagagaccaggagggcagaaugaacuacuacuggacccugguggagcccggcgacaagaucaccuucgaggccaccggcaaccugguggugcccagauacgccuucgccauggagagaaacgccggcagcggcaucaucaucagcgacacccccgugcacgacugcaacaccaccugccagacccccaagggcgccaucaacaccagccugcccuuccagaacauccaccccaucaccaucggcaagugccccaagcacgugaagagcaccaagcugagacuggccaccggccugagaaacgugcccagcauccagagcagaggccuguucggcgccaucgccggcuucaucgagggcggcuggaccggcaugguggacggcugguacggcuaccaccaccagaacgagcagggcagcggcuacgccgccgaccugaagagcacccagaacgccaucgacgagaucaccaacaaggugaacagcgugaucgagaagaugaacacccaguucaccgccgugggcaaggaguucaaccaccuggagaagagaaucgagaaccugaacaagaagguggacgacggcuuccuggacaucuggaccuacaacgccgagcugcuggugcugcuggagaacgagagaacccuggacuaccacgacagcaacgugaagaaccuguacgagaaggugagaagccagcugaagaacaacgccaaggagaucggcaacggcugcuucgaguucuaccacaagugcgacaacaccugcauggagagcgugaagaacggcaccuacgacuaccccaaguacagcgaggaggccaagcugaacagagaggagaucgacggcgugaagcuggagagcaccagaaucuaccagauccuggccaucuacagcaccguggccagcagccuggugcugguggugagccugggcgccaucagcuucuggaugugcagcaacggcagccugcagugcagaaucugcaucuga

SEQ ID NO: 173754 - RNA, 1701 nt, Artificial Sequence; identical to SEQ ID NO: 162716
  derived and/or modified CDS sequence (opt4) from hemagglutinin__InfluenzaA__BAH95824

SEQ ID NO: 173755 - RNA, 1707 nt, Artificial Sequence
  derived and/or modified CDS sequence (opt4) from hemagglutinin__InfluenzaA__BAJ07997
auggagaagaucgugcugcuguucgccaucgugagccuggugaagagcgaccagaucugcaucggcuaccacgccaacaacagcaccgagcagguggacaccaucauggagaagaacgugaccgugacccacgcccaggacauccuggagaagacccacaacggcaagcugugcgaccuggacggcgugaagccccugauccugagagacugcagcguggccggcuggcugcugggcaaccccaugugcgacgaguucaucaacgugcccgaguggagcuacaucguggagaaggccaaccccgccaacgaccugugcuaccccggcgacuucaacgacuacgaggagcugaagcaccugcugagcagaaucaaccacuucgagaagauccagaucauccccaagaacagcuggagcagccacgaggccagccugggcgugagcagcgccugccccuaccagggcaagagcagcuucuucagaaacgugguguggcugaucaagaagaacaacgccuaccccaccaucaagagaagcuacaacaacaccaaccaggaggaccugcuggugcuguggggcauccaccaccccaacgacgccgccgagcagaccagacuguaccagaaccccaccaccuacaucagcgugggcaccagcacccugaaccagagacuggugcccaagaucgccaccagaagcaaggugaacggccagagcggcagaauggaguucuucuggaccauccugaagcccaacgacgccaucaacuucgagagcaacggcaacuucaucgcccccgaguacgccuacaagaucgugaagaagggcgacagcgccaucaugaagagcgagcuggaguacggcaacugcaacaccaagugccagacccccaugggcgccaucaacagcagcaugcccuuccacaacauccacccccugaccaucggcgagugccccaaguacgugaagagcaacagacuggugcuggccaccggccugagaaacagcccccagagagagagaagaagaaagaagagaggccuguucggcgccaucgccggcuucaucgagggcggcuggcagggcaugguggacggcugguacggcuaccaccacagcaacgagcagggcagcggcuacgccgccgacaaggagagcacccagaaggccaucgacggcgugaccaacaaggugaacagcaucaucgacaagaugaacacccaguucgaggccgugggcagagaguucaacaaccuggagagaagaaucgagaaccugaacaagaagauggaggacggcuuccuggacguguggaccuacaacgccgagcugcuggugcugauggagaacgagagaacccuggacuuccacgacagcaacgugaagaaccuguacgacaaggugagacugcagcugagagacaacgccaaggagcugggcaacggcugcuucgaguucuaccacaagugcgacaacgagugcauggagagcgugagaaacggcaccuacgacuacccccaguacagcgaggaggccagacugaagagagaggagaucagcggcgugaagcuggagagcaucggcaccuaccagauccugagcaucuacagcaccguggccagcagccuggcccuggccaucaugguggccggccugagccuguggaugugcagcaacggcagccugcagugcagaaucugcaucuga

SEQ ID NO: 173756 - RNA, 1701 nt, Artificial Sequence
  derived and/or modified CDS sequence (opt4) from hemagglutinin__InfluenzaA__BAJ39949
augaaggccauccugguggugcugcuguacaccuucgccaccgccaacgccgacacccugugcaucggcuaccacgccaacaacagcaccgacaccguggacaccgugcuggagaagaacgugaccgugacccacagcgugaaccugcuggaggacaagcacaacggcaagcugugcaagcugagaggcguggccccccugcaccugggcaagugcaacaucgccggcuggauccugggcaaccccgagugcgagagccugagcaccgccagcagcuggagcuacaucguggagaccagcagcagcgacaacggcaccugcuaccccggcgacuucaucgacuacgaggagcugagagagcagcugagcagcgugagcagcuucgagagauucgagaucuuccccaagaccagcagcuggcccaaccacgacagcaacaagggcgugaccgccgccugcccccacgccggcgccaagagcuucuacaagaaccugaucuggcuggugaagaagggcaacagcuaccccaagcugagcaagagcuacaucaacgacaagggcaaggaggugcuggugcuguggggcauccaccaccccagcaccagcgccgaccagcagagccuguaccagaacgccgacaccuacguguucgugggcaccagcagauacagcaagaaguucaagcccgagaucgccaucagacccaaggugagagaccaggagggcagaaugaacuacuacuggacccugguggagcccggcgacaagaucaccuucgaggccaccggcaaccugguggugcccagauacgccuucgccauggagagaaacgccggcagcggcaucaucaucagcgacacccccgugcacgacugcaacaccaccugccagacccccaagggcgccaucaacaccagccugcccuuccagaacauccaccccaucaccaucggcaagugccccaaguacgugaagagcaccaagcugagacuggccaccggccugagaaacgugcccagcauccagagcagaggccuguucggcgccaucgccggcuucaucgagggcggcuggaccggcaugguggacggcugguacggcuaccaccaccagaacgagcagggcagcggcuacgccgccgaccugaagagcacccagaacgccaucgacgagaucaccaacaaggugaacagcgugaucgagaagaugaacacccaguucaccgccgugggcaaggaguucaaccaccuggagaagagaaucgagaaccugaacaagaagguggacgacggcuuccuggacaucuggaccuacaacgccaagcugcuggugcugcugaagaacgagagaacccuggacuaccacgacagcaacgugaagaaccuguacgagaaggugagaagccagcugaagaacaacgccaaggagaucggcaacggcugcuucgaguucuaccacaagugcgacaacaccugcauggagagcgugaagaacggcaccuacgacuaccccaaguacagcgaggaggccaagcugaacagagaggagaucgacggcgugaagcuggagagcaccagaaucuaccagauccuggccaucuacagcaccguggccagcagccuggugcugguggugagccugggcgccaucagcuucuggaugugcagcaacggcagccugcagugcagaaucugcaucuga

SEQ ID NO: 173757 - RNA, 1701 nt, Artificial Sequence
  derived and/or modified CDS sequence (opt4) from hemagglutinin__InfluenzaA__BAJ39950
augaaggccauccugguggugcugcuguacaccuucgccaccgccaacgccgacacccugugcaucggcuaccacgccaacaacagcaccgacaccguggacaccgugcuggagaagaacgugaccgugacccacagcgugaaccugcuggaggacaagcacaacggcaagcugugcaagcugagaggcguggccccccugcaccugggcaagugcaacaucgccggcuggauccugggcaaccccgagugcgagagccugagcaccgccagcagcuggagcuacaucgccgagaccagcagcagcgacaacggcaccugcuaccccggcgacuucaucgacuacgaggagcugagagagcagcugagcagcgugagcagcuucgagagauucgagaucuuccccaagaccagcagcuggcccaaccacgacagcaacaagggcgugaccgccgccugcccccacgccggcgccaagagcuucuacaagaaccugaucuggcuggugaagaagggcaacagcuaccccaagcugagcaagagcuacaucaacgacaagggcaaggaggugcuggugcuguggggcauccaccaccccagcaccagcgccgaccagcagagccuguaccagaacgccgacgccuacguguucgugggcaccagcagauacagcaagaaguucaagcccgagaucgccaucagacccaaggugagagaccaggagggcagaaugaacuacuacuggacccugguggagcccggcgacaagaucaccuucgaggccaccggcaaccugguggugcccagauacgccuucgccauggagagaaacgccggcagcggcaucaucaucagcgacacccccgugcacgacugcaacaccaccugccagacccccaagggcgccaucaacaccagccugcccuuccagaacauccaccccaucaccaucggcaagugccccaaguacgugaagagcaccaagcugagacuggccaccggccugagaaacgugcccagcauccagagcagaggccuguucggcgccaucgccggcuucaucgagggcggcuggaccggcaugguggacggcugguacggcuaccaccaccagaacgagcagggcagcggcuacgccgccgaccugaagagcacccagaacgccaucgacgagaucaccaacaaggugaacagcgugaucgagaagaugaacacccaguucaccgccgugggcaaggaguucaaccaccuggagaagagaaucgagaaccugaacaagaagguggacgacggcuuccuggacaucuggaccuacaacgccgagcugcuggugcugcuggagaacgagagaacccuggacuaccacgacagcaacgugaagaaccuguacgagaaggugagaagccagcugaagaacaacgccaaggagaucggcaacggcugcuucgaguucuaccacaagugcgacaacaccugcauggagagcgugaagaacggcaccuacgacuaccccaaguacagcgaggaggccaagcugaacagagaggagaucgacggcgugaagcuggagagcaccagaaucuaccagauccuggccaucuacagcaccguggccagcagccuggugcugguggugagccugggcgccaucagcuucuggaugugcagcaacggcagccugcagugcagaaucugcaucuga

SEQ ID NO: 173758 - RNA, 1701 nt, Artificial Sequence
  derived and/or modified CDS sequence (opt4) from hemagglutinin__InfluenzaA__BAJ39951
augaaggccauccugguggugcugcuguacaccuucgccaccgccaacgccgacacccugugcaucggcuaccacgccaacaacagcaccgacaccguggacaccgugcuggagaagaacgugaccgugacccacagcgugaaccugcuggaggacaagcacaacggcaagcugugcaagcugagaggcguggccccccugcaccugggcaagugcaacaucgccggcuggauccugggcaaccccgagugcgagagccugagcaccgccagcagcuggagcuacaucguggagaccagcagcagcgacaacggcaccugcuaccccggcgacuucaucgacuacgaggagcugagagagcagcugagcagcgugagcagcuucgagagauucgagaucuuccccaagaccagcagcuggcccaaccacgacagcaacaagggcgugaccgccgccugcccccacgccggcgccaagagcuucuacaagaaccugaucuggcuggugaagaagggcaacagcuaccccaagcugagcaagagcuacaucaacgacaagggcaaggaggugcuggugcuguggggcauccaccaccccagcaccagcgccgaccagcagagccuguaccagaacgccgacaccuacguguucgugggcaccagcagauacagcaagaaguucaagcccgagaucgccaucagacccaaggugagagaccaggagggcagaaugaacuacuacuggacccugguggagcccggcgacaagaucaccuucgaggccaccggcaaccugguggugcccagauacgccuucgccauggagagaaacgccggcagcggcaucaucaucagcgacacccccgugcacgacugcaacaccaccugccagacccccaagggcgccaucaacaccagccugcccuuccagaacauccaccccaucaccaucggcaagugccccaaguacgugaagagcaccaagcugagacuggccaccggccugagaaacgugcccagcuuccagagcagaggccuguucggcgccaucgccggcuucaucgagggcggcuggaccggcaugguggacggcugguacggcuaccaccaccagaacgagcagggcagcggcuacgccgccgaccugaagagcacccagaacgccaucgacgagaucaccaacaaggugaacagcgugaucgagaagaugaacacccaguucaccgccgugggcaaggaguucaaccaccuggagaagagaaucgagaaccugaacaagaagguggacgacggcuuccuggacaucuggaccuacaacgccgagcugcuggugcugcuggagaacgagagaacccuggacuaccacgacagcaacgugaagaaccuguacgagaaggugagaagccagcugaagaacaacgccaaggagaucggcaacggcugcuucgaguucuaccacaagugcgacaacaccugcauggagagcgugaagaacggcaccuacgacuaccccaaguacagcgaggaggccaagcugaacagagaggagaucgacggcgugaagcuggagagcaccagaaucuaccagauccuggccaucuacagcaccguggccagcagccuggugcugguggugagccugggcgccaucagcuucuggaugugcagcaacggcagccugcagugcagaaucugcaucuga

SEQ ID NO: 173759 - RNA, 1701 nt, Artificial Sequence; identical to SEQ ID NO: 169332
  derived and/or modified CDS sequence (opt4) from hemagglutinin__InfluenzaA__BAJ39952

SEQ ID NO: 173760 - RNA, 1701 nt, Artificial Sequence
  derived and/or modified CDS sequence (opt4) from hemagglutinin__InfluenzaA__BAJ39953
augaaggccauccugguggugcugcuguacaccuucgccaccgccaacgccgacacccugugcaucggcuaccacgccaacaacagcaccgacaccguggacaccgugcuggagaagaacgugaccgugacccacagcgugaaccugcuggaggacaagcacaacggcaagcugugcaagcugagaggcguggccccccugcaccugggcaagugcaacaucgccggcuggauccugggcaaccccgagugcgagagccugagcaccgccagcagcuggagcuacaucguggagaccagcagcagcgacaacggcaccugcuaccccggcgacuucaucgacuacgaggagcugagagagcagcugagcagcgugagcagcuucgagagauucgagaucuuccccaagaccagcagcuggcccaaccacgacagcaacaagggcgugaccgccgccugcccccacgccggcgccaagagcuucuacaagaaccugaucuggcuggugaagaagggcaacagcuaccccaagcugagcaagagcuacaucaacgacaagggcaaggaggugcuggugcuguggggcauccaccaccccagcaccagcgccgaccagcagagccuguaccagaacgccgacaccuacguguucgugggcaccagcagauacagcaagaaguucaagcccgagaucgccaucagacccaaggugagagaccaggagggcagaaugaacuacuacuggacccugguggagcccggcgacaagaucaccuucgaggccaccggcaaccugguggugcccagauacgccuucgccauggagagaaacgccggcagcggcaucaucaucagcgacacccccgugcacgacugcaacaccaccugccagacccccaagggcgccaucaacaccagccugcccuuccagaacauccaccccaucaccaucggcaagugccccaaguacgugaagagcaccaagcugagacuggccaccggccugagaaacgugcccagcauccagagcagaggccuguucggcgccaucgccggcuucaucgagggcggcuggaccggcaugguggacggcugguacggcuaccaccaccagaacgagcagggcagcggcuacgccgccgaccugaagagcacccagaacgccaucgacgagaucaccaacaaggugaacagcgugaucgagaagaugaacacccaguucaccgccgugggcaaggaguucaaccaccuggagaagagaaucgagaaccugaacaagaagguggacgacggcuuccuggacaucuggaccuacaacgccaagcugcuggugcugcuggagaacgagagaacccuggacuaccacgacagcaacgugaagaaccuguacgagaaggugagaagccagcugaagaacaacgccaaggagaucggcaacggcugcuucgaguucuaccacaagugcgacaacaccugcauggagagcgugaagaacggcaccuacgacuaccccaaguacagcgaggaggccaagcugaacagagaggagaucgacggcgugaagcuggagagcaccagaaucuaccagauccuggccaucuacagcaccguggccagcagccuggugcugguggugagccugggcgccaucagcuucuggaugugcagcaacggcagccugcagugcagaaucugcaucuga

SEQ ID NO: 173761 - RNA, 1701 nt, Artificial Sequence; identical to SEQ ID NO: 169332
  derived and/or modified CDS sequence (opt4) from hemagglutinin__InfluenzaA__BAJ39954

SEQ ID NO: 173762 - RNA, 1701 nt, Artificial Sequence
  derived and/or modified CDS sequence (opt4) from hemagglutinin__InfluenzaA__BAJ39955
augaaggccauccugguggugcugcuguacaccuucgccaccgccaacgccgacacccugagcaucggcuaccacgccaacaacagcaccgacaccguggacaccgugcuggagaagaacgugaccgugacccacagcgugaaccugcuggaggacaagcacaacggcaagcugugcaagcugagaggcguggccccccugcaccugggcaagugcaacaucgccggcuggauccugggcaaccccgagugcgagagccugagcaccgccagcagcuggagcuacaucguggagaccagcagcagcgacaacggcaccugcuaccccggcgacuucaucgacuacgaggagcugagagagcagcugagcagcgugagcagcuucgagagauucgagaucuuccccaagaccagcagcuggcccaaccacgacagcaacaagggcgugaccgccgccugcccccacgccggcgccaagagcuucuacaagaaccugaucuggcuggugaagaagggcaacagcuaccccaagcugagcaagagcuacaucaacgacaagggcaaggaggugcuggugcuguggggcauccaccaccccagcaucagcgccgaccagcagagccuguaccagaacgccgacaccuacguguucgugggcaccagcagauacagcaagaaguucaagcccgagaucgccaucagacccaaggugagagaccaggagggcagaaugaacuacuacuggacccugguggagcccggcgacaagaucaccuucgaggccaccggcaaccugguggugcccagauacgccuucgccauggagagaaacgccggcagcggcaucaucaucagcgacacccccgugcacgacugcaacaccaccugccagacccccaagggcgccaucaacaccagccugcccuuccagaacauccaccccaucaccaucggcaagugccccaaguacgugaagagcaccaagcugagacuggccaccggccugagaaacgugcccagcauccagagcagaggccuguucggcgccaucgccggcuucaucgagggcggcuggaccggcaugguggacggcugguacggcuaccaccaccagaacgagcagggcagcggcuacgccgccgaccugaagagcacccagaacgccaucgacgagaucaccaacaaggugaacagcgugaucgagaagaugaacacccaguucaccgccgugggcaaggaguucaaccaccuggagaagagaaucgagaaccugaacaagaagguggacgacggcuuccuggacaucuggaccuacaacgccgagcugcuggugcugcuggagaacgagagaacccuggacuaccacgacagcaacgugaagaaccuguacgagaaggugagaagccagcugaagaacaacgccaaggagaucggcaacggcugcuucgaguucuaccacaagugcgacaacaccugcauggagagcgugaagaacggcaccuacgacuaccccaaguacagcgaggaggccaagcugaacagagaggagaucgacggcgugaagcuggagagcaccagaaucuaccagauccuggccaucuacagcaccguggccagcagccuggugcugguggugagccugggcgccaucagcuucuggaugugcagcaacggcagccugcagugcaagaucugcaucuga

SEQ ID NO: 173763 - RNA, 1701 nt, Artificial Sequence; identical to SEQ ID NO: 173757
  derived and/or modified CDS sequence (opt4) from hemagglutinin__InfluenzaA__BAJ39956

SEQ ID NO: 173764 - RNA, 1701 nt, Artificial Sequence; identical to SEQ ID NO: 169332
  derived and/or modified CDS sequence (opt4) from hemagglutinin__InfluenzaA__BAJ39957

SEQ ID NO: 173765 - RNA, 1701 nt, Artificial Sequence
  derived and/or modified CDS sequence (opt4) from hemagglutinin__InfluenzaA__BAJ39958
augaaggccauccugguggugcugcuguacaccuucgccaccgccaacgccgacacccugugcaucggcuaccacgccaacaacagcaccgacaccguggacaccgugcuggagaagaacgugaccgugacccacagcgugaaccugcuggaggacaagcacaacggcaagcugugcaagcugagaggcguggccccccugcaccugggcaagugcaacaucgccggcuggauccugggcaaccccgagugcgagagccugagcaccgccagcagcuggagcuacaucguggagaccagcagcagcgacaacggcaccugcuaccccggcgacuucaucgacuacgaggagcugagagagcagcugagcagcgugagcagcuucgagagauucgagaucuuccccaagaccagcagcuggcccaaccacgacagcaacaagggcgugaccgccgccugcccccacgccggcgccaagagcuucuacaagaaccugaucuggcuggugaagaagggcaacagcuaccccaagcugagcaagagcuacaucaacgacaagggcaaggaggugcuggugcuguggggcauccaccaccccagcaccagcgccgaccagcagagccuguaccagaacgccgacgccuacguguucgugggcaccagcagauacagcaagaaguucaagcccgagaucgccaucagacccaaggugagagaccaggagggcagaaugaacuacuacuggacccugguggagcccggcgacaagaucaccuucgaggccaccggcaaccugguggugcccagauacgccuucgccauggagagaaacgccggcagcggcaucaucaucagcgacacccccgugcacgacugcaacaccaccugccagacccccaagggcgccaucaacaccagccugcccuuccagaacauccaccccaucaccaucggcaagugccccaaguacgugaagagcaccaagcugagacuggccaccggccugagaaacgugcccagcauccagagcagaggccuguucggcgccaucgccggcuucaucgagggcggcuggaccggcaugguggacggcugguacggcuaccaccaccagaacgagcagggcagcggcuacgccgccgaccugaagagcacccagaacgccaucgacgagaucaccaacaaggugaacagcgugaucgagaagaugaacacccaguucaccgccgugggcaaggaguucaaccaccuggagaagagaaucgagaaccugaacaagaagguggacgacggcuuccuggacaucuggaccuacaacgccgagcugcuggugcugcuggagaacgagagaacccuggacuaccacgacagcaacgugaagaaccuguacgagaaggugaagagccagcugaagaacaacgccaaggagaucggcaacggcugcuucgaguucuaccacaagugcgacaacaccugcauggagagcgugaagaacggcaccuacgacuaccccaaguacagcaaggaggccaagcugaacagagagaagaucgacggcgugaagcuggagagcaccagaaucuaccagauccuggccaucuacagcaccguggccagcagccuggugcugguggugagccugggcgccaucagcuucuggaugugcagcaacggcagccugcagugcagaaucugcaucuga

SEQ ID NO: 173766 - RNA, 1701 nt, Artificial Sequence
  derived and/or modified CDS sequence (opt4) from hemagglutinin__InfluenzaA__BAJ39959
augaaggccauccugguggugcugcuguacaccuucgccaccgccaacgccgacacccugugcaucggcuaccacgccaacaacagcaccgacaccguggacaccgugcuggagaagaacgugaccgugacccacagcgugaaccugcuggaggacaagcacaacggcaagcugugcaagcugagaggcguggccccccugcaccugggcaagugcaacaucgccggcuggauccugggcaaccccgagugcgagagccugagcaccgccagcagcuggagcuacaucguggagaccagcagcagcgacaacggcaccugcuaccccggcgacuucaucgacuacgaggagcugagagagcagcugagcagcgugagcagcuucgagagauucgagaucuuccccaagaccagcagcuggcccaaccacgacagcaacaagggcgugaccgccgccugcccccacgccggcgccaagagcuucuacaagaaccugaucuggcuggugaagaagggcaacagcuaccccaagcugagcaagagcuacaucaacgacaagggcaaggaggugcuggugcuguggggcauccaccaccccagcaccagcgccgaccagcagagccuguaccagaacgccgacgccuacguguucgugggcaccagcagauacagcaagaaguucaagcccgagaucgccaucagacccaaggugagagaccaggagggcagaaugaacuacuacuggacccugguggagcccggcgacaagaucaccuucgaggccaccggcaaccugguggugcccagauacgccuucgccauggagagaaacgccggcagcggcaucaucaucagcgacacccccgugcacgacugcaacaccaccugccagacccccaagggcgccaucaacaccagccugcccuuccagaacauccaccccaucaccaucggcaagugccccaaguacgugaagagcaccaagcugagacuggccaccggccugagaaacgugcccuucauccagagcagaggccuguucggcgccaucgccggcuucaucgagggcggcuggaccggcaugguggacggcugguacggcuaccaccaccagaacgagcagggcagcggcuacgccgccgaccugaagagcacccagaacgccaucgacgagaucaccaacaaggugaacagcgugaucgagaagaugaacacccaguucaccgccgugggcaaggaguucaaccaccuggagaagagaaucgagaaccugaacaagaagguggacgacggcuuccuggacaucuggaccuacaacgccgagcugcuggugcugcuggagaacgagagaacccuggacuaccacgacagcaacgugaagaaccuguacgagaaggugaagagccagcugaagaacaacgccaaggagaucggcaacggcugcuucgaguucuaccacaagugcgacaacaccugcauggagagcgugaagaacggcaccuacgacuaccccaaguacagcaaggaggccaagcugaacagagaggagaucgacggcgugaagcuggagagcaccagaaucuaccagauccuggccaucuacagcaccguggccagcagccuggugcugguggugagccugggcgccaucagcuucuggaugugcagcaacggcagccugcagugcagaaucugcaucuga

SEQ ID NO: 173767 - RNA, 1701 nt, Artificial Sequence; identical to SEQ ID NO: 162729
  derived and/or modified CDS sequence (opt4) from hemagglutinin__InfluenzaA__BAJ39960

SEQ ID NO: 173768 - RNA, 1701 nt, Artificial Sequence; identical to SEQ ID NO: 163358
  derived and/or modified CDS sequence (opt4) from hemagglutinin__InfluenzaA__BAJ39961

SEQ ID NO: 173769 - RNA, 1701 nt, Artificial Sequence
  derived and/or modified CDS sequence (opt4) from hemagglutinin__InfluenzaA__BAJ39962
augaaggccauccugguggugcugcuguacaccuucgccaccgccaacgccgacacccugugcaucggcuaccacgccaacaacagcaccgacaccguggacaccgugcuggagaagaacgugaccgugacccacagcgugaaccugcuggaggacaagcacaacggcaagcugugcaagcugagaggcguggccccccugcaccugggcaagugcaacaucgccggcuggauccugggcaaccccgagugcgagagccugagcaccgccagcagcuggagcuacaucgccgagaccagcagcagcgacaacggcaccugcuaccccggcgacuucaucgacuacgaggagcugagagagcagcugagcagcgugagcagcuucgagagauucgagaucuuccccaagaccagcagcuggcccaaccacgacagcaacaagggcgugaccgccgccugcccccacgccggcgccaagagcuucuacaagaaccugaccuggcuggugaagaagggcaacagcuaccccaagcugagcaagagcuacaucaacgacaagggcaaggaggugcuggugcuguggggcauccaccaccccagcaccagcgccgaccagcagagccuguaccagaacgccgacgccuacguguucgugggcaccagcagauacagcaagaaguucaagcccgagaucgccaucagacccaaggugagagaccaggagggcagaaugaacuacuacuggacccugguggagcccggcgacaagaucaccuucgaggccaccggcaaccugguggugcccagauacgccuucgccauggagagaaacgccggcagcggcaucaucaucagcgacacccccgugcacgacugcaacaccaccugccagacccccaagggcgccaucaacaccagccugcccuuccagaacauccaccccaucaccaucggcaagugccccaaguacgugaagagcaccaagcugagacuggccaccggccugagaaacgugcccuucauccagagcagaggccuguucggcgccaucgccggcuucaucgagggcggcuggaccggcaugguggacggcugguacggcuaccaccaccagaacgagcagggcagcggcuacgccgccgaccugaagagcacccagaacgccaucgacgagaucaccaacaaggugaacagcgugaucgagaagaugaacacccaguucaccgccgugggcaaggaguucaaccaccuggagaagagaaucgagaaccugaacaagaagguggacgacggcuuccuggacaucuggaccuacaacgccgagcugcuggugcugcuggagaacgagagaacccuggacuaccacgacagcaacgugaagaaccuguacgagaaggugaagagccagcugaagaacaacgccaaggagaucggcaacggcugcuucgaguucuaccacaagugcgacaacaccugcauggagagcgugaagaacggcaccuacgacuaccccaaguacagcaaggaggccaagcugaacagagaggagaucgacggcgugaagcuggagagcaccagaaucuaccagauccuggccaucuacagcaccguggccagcagccuggugcugguggugagccugggcgccaucagcuucuggaugugcagcaacggcagccugcagugcagaaucugcaucuga

SEQ ID NO: 173770 - RNA, 1701 nt, Artificial Sequence; identical to SEQ ID NO: 162729
  derived and/or modified CDS sequence (opt4) from hemagglutinin__InfluenzaA__BAJ39963

SEQ ID NO: 173771 - RNA, 1701 nt, Artificial Sequence; identical to SEQ ID NO: 169332
  derived and/or modified CDS sequence (opt4) from hemagglutinin__InfluenzaA__BAJ39964

SEQ ID NO: 173772 - RNA, 1701 nt, Artificial Sequence; identical to SEQ ID NO: 162729
  derived and/or modified CDS sequence (opt4) from hemagglutinin__InfluenzaA__BAJ39965

SEQ ID NO: 173773 - RNA, 1701 nt, Artificial Sequence; identical to SEQ ID NO: 162729
  derived and/or modified CDS sequence (opt4) from hemagglutinin__InfluenzaA__BAJ39966

SEQ ID NO: 173774 - RNA, 1701 nt, Artificial Sequence
  derived and/or modified CDS sequence (opt4) from hemagglutinin__InfluenzaA__BAJ39967
augaaggccauccugguggugcugcuguacaccuucgccaccgccaacgccgacacccugugcaucggcuaccacgccaacaacagcaccgacaccguggacaccgugcuggagaagaacgugaccgugacccacagcgugaaccugcuggaggacaagcacaacggcaagcugugcaagcugagaggcguggccccccugcaccugggcaagugcaacaucgccggcuggauccugggcaaccccgagugcgagcugcugagcaccgccagcagcuggagcuacaucguggagaccagcagcagcgacaacggcaccugcuaccccggcgacuucaucgacuacgaggagcugagagagcagcugagcagcgugagcagcuucgagagauucgagaucuuccccaagaccagcagcuggcccaaccacgacagcgacaagggcgugaccgccgccugcccccacgccggcgccaagagcuucuacaagaaccugaucuggcuggugaagaagggcaacagcuaccccaagcugagcaagagcuacaucaacgacaagggcaaggaggugcuggugcuguggggcauccaccaccccagcaccagcgccgaccagcagagccuguaccagaacgccgacgccuacguguucgugggcaccagcagauacagcaagaaguucaagcccgagaucgccaucagacccaaggugagagaccaggagggcagaaugaacuacuacuggacccugguggagcccggcgacaagaucaccuucgaggccaccggcaaccugguggugcccagauacgccuucgccauggagagaaacgccggcagcggcaucaucaucagcgacacccccgugcacgacugcaacaccaccugccagacccccaagggcgccaucaacaccagccugcccuuccagaacauccaccccaucaccaucggcaagugccccaaguacgugaagagcaccaagcugagacuggccaccggccugagaaacgugcccagcauccagagcagaggccuguucggcgccaucgccggcuucaucgagggcggcuggaccggcaugguggacggcugguacggcuaccaccaccagaacgagcagggcagcggcuacgccgccgaccugaagagcacccagaacgccaucgacgagaucaccaacaaggugaacagcgugaucgagaagaugaacacccaguucaccgcccugggcaaggaguucaaccaccuggagaagaagaucgagaaccugaacaagaagguggacgacggcuuccuggacaucuggaccuacaacgccgagcugcuggugcugcuggagaacgagagaacccuggacuaccacgacagcaacgugaagaaccuguacgagaaggugagaagccagcugaagaacaacgccaaggagaucggcaacggcugcuucgaguucuaccacaagugcgacaacaccugcauggagagcgugaagaacggcaccuacgacuaccccaaguacagcgaggaggccaagcugaacagagaggagaucgacggcgugaagcuggagagcaccagaaucuaccagauccuggccaucuacagcaccguggccagcagccuggugcugguggugagccugggcgccaucagcuucuggaugugcagcaacggcagccugcagugcagaaucugcaucuga

SEQ ID NO: 173775 - RNA, 1701 nt, Artificial Sequence; identical to SEQ ID NO: 168257
  derived and/or modified CDS sequence (opt4) from hemagglutinin__InfluenzaA__BAJ39968

SEQ ID NO: 173776 - RNA, 1701 nt, Artificial Sequence; identical to SEQ ID NO: 169332
  derived and/or modified CDS sequence (opt4) from hemagglutinin__InfluenzaA__BAJ39969

SEQ ID NO: 173777 - RNA, 1701 nt, Artificial Sequence; identical to SEQ ID NO: 162729
  derived and/or modified CDS sequence (opt4) from hemagglutinin__InfluenzaA__BAJ39970

SEQ ID NO: 173778 - RNA, 1701 nt, Artificial Sequence; identical to SEQ ID NO: 162729
  derived and/or modified CDS sequence (opt4) from hemagglutinin__InfluenzaA__BAJ39971

SEQ ID NO: 173779 - RNA, 1701 nt, Artificial Sequence; identical to SEQ ID NO: 163358
  derived and/or modified CDS sequence (opt4) from hemagglutinin__InfluenzaA__BAJ39972

SEQ ID NO: 173780 - RNA, 1701 nt, Artificial Sequence
  derived and/or modified CDS sequence (opt4) from hemagglutinin__InfluenzaA__BAJ39973
augaaggccauccugguggugcugcuguacaccuucgccaccgccaacgccgacacccugugcaucggcuaccacgccaacaacagcaccgacaccguggacaccgugcuggagaagaacgugaccgugacccacagcgugaaccugcuggaggacaagcacaacggcaagcugugcaagcugagaggcguggccccccugcaccugggcaagugcaacaucgccggcuggauccugggcaaccccgagugcgagagccugagcaccgccagcagcuggagcuacaucguggagaccagcagcagcgacaacggcaccugcuaccccggcgacuucaucgacuacgaggagcugagagagcagcugagcagcgugagcagcuucgagagauucgagaucuuccccaagaccagcagcuggcccaaccacgacagcaacaagggcgugaccgccgccugcccccacgccggcgccaagagcuucuacaagaaccugaucuggcuggugaagaagggcaacagcuaccccaagcugagcaagagcuacaucaacgacaagggcaaggaggugcuggugcuguggggcauccaccaccccagcaccagcgccgaccagcagagccuguaccagaacgccgacaccuacguguucgugggcaccagcagauacagcaagaaguucaagcccgagaucgccaucagacccaaggugagagaccaggagggcagaaugaacuacuacuggacccugguggagcccggcgacaagaucaccuucgaggccaccggcaaccugguggugcccagauacgccuucgccauggagagaaacgccggcagcggcaucaucaucagcgacacccccgugcacgacugcaacaccaccugccagacccccaagggcgccaucaacaccagccugcccuuccagaacauccaccccaucaccaucggcaagugccccaaguacgugaagagcaccaagcugagacuggccaccggccugagaaacgugcccagcauccagagcagaggccuguucggcgccaucgccggcuucaucgagggcggcuggaccggcaugguggacggcugguacggcuaccaccaccagaacgagcagggcagcggcuacgccgccgaccugaagagcacccagaacgccaucgacgagaucaccaacaaggugaacagcgugaucgagaagaugaacacccaguucaccgccgugggcaaggaguucaaccaccuggagaagagaaucgagaaccugaacaagaagguggacgacggcuuccuggacaucuggaccuacaacgccgagcugcuggugcugcuggagaacgagagaacccuggacuaccacgacagcaacgugaagaaccuguacgagaaggugaagagccagcugaagaacaacgccaaggagaucggcaacggcugcuucgaguucuaccacaagugcgacaacaccugcauggagagcgugaagaacggcaccuacgacuaccccaaguacagcgaggaggccaagcugaacagagaggagaucgacggcgugaagcuggagagcaccagaaucuaccagauccuggccaucuacagcaccguggccagcagccuggugcugguggugagccugggcgccaucagcuucuggaugugcagcaacggcagccugcagugcagaaucugcaucuga

SEQ ID NO: 173781 - RNA, 1701 nt, Artificial Sequence; identical to SEQ ID NO: 162729
  derived and/or modified CDS sequence (opt4) from hemagglutinin__InfluenzaA__BAJ39974

SEQ ID NO: 173782 - RNA, 1701 nt, Artificial Sequence; identical to SEQ ID NO: 163298
  derived and/or modified CDS sequence (opt4) from hemagglutinin__InfluenzaA__BAJ39975

SEQ ID NO: 173783 - RNA, 1701 nt, Artificial Sequence
  derived and/or modified CDS sequence (opt4) from hemagglutinin__InfluenzaA__BAJ39976
augaaggccauccugguggugcugcuguacaccuucgccaccgccaacgccgacacccugugcaucggcuaccacgccaacaacagcaccgacaccguggacaccgugcuggagaagaacgugaccgugacccacagcgugaaccugcuggaggacaagcacaacgagaagcugugcaagcugagaggcguggccccccugcaccugggcaagugcaacaucgccggcuggauccugggcaaccccgagugcgagagccugagcaccgccagcagcuggagcuacaucguggagaccagcagcagcgacaacggcaccugcuaccccggcgacuucaucgacuacgaggagcugagagagcagcugagcagcgugagcagcuucgagagauucgagaucuuccccaagaccagcagcuggcccaaccacgacagcaacaagggcgugaccgccgccugcccccacgccggcgccaagagcuucuacaagaaccugaucuggcuggugaagaagggcaacagcuaccccaagcugagcaagagcuacaucaacgacaagggcaaggaggugcuggugcuguggggcauccaccaccccagcaccagcgccgaccagcagagccuguaccagaacgccgacgccuacguguucgugggcaccagcagauacagcaagaaguucaagcccgagaucgccaucagacccaaggugagagaccaggagggcagaaugaacuacuacuggacccugguggagcccggcgacaagaucaccuucgaggccaccggcaaccugguggugcccagauacgccuucgccauggagagaaacgccggcagcggcaucaucaucagcgacacccccgugcacgacugcaacaccaccugccagacccccaagggcgccaucaacaccagccugcccuuccagaacauccaccccaucaccaucggcaagugccccaaguacgugaagagcaccaagcugagacuggccaccggccugagaaacgugcccagcauccagagcagaggccuguucggcgccaucgccggcuucaucgagggcggcuggaccggcaugguggacggcugguacggcuaccaccaccagaacgagcagggcagcggcuacgccgccgaccugaagagcacccagaacgccaucgacaagaucaccaacaaggugaacagcgugaucgagaagaugaacacccaguucaccgccgugggcaaggaguucaaccaccuggagaagagaaucgagaaccugaacaagaagguggacgacggcuuccuggacaucuggaccuacaacgccgagcugcuggugcugcuggagaacgagagaacccuggacuaccacgacagcaacgugaagaaccuguacgagaaggugagaagccagcugaagaacaacgccaaggagaucggcaacggcugcuucgaguucuaccacaagugcgacaacaccugcauggagagcgugaagaacggcaccuacgacuaccccaaguacagcgaggaggccaagcugaacagagaggagaucgacggcgugaagcuggagagcaccagaaucuaccagauccuggccaucuacagcaccguggccagcagccuggugcugguggugagccugggcgccaucaacuucuggaugugcagcaacggcagccugcagugcagaaucugcaucuga

SEQ ID NO: 173784 - RNA, 1701 nt, Artificial Sequence; identical to SEQ ID NO: 162729
  derived and/or modified CDS sequence (opt4) from hemagglutinin__InfluenzaA__BAJ39977

SEQ ID NO: 173785 - RNA, 1701 nt, Artificial Sequence
  derived and/or modified CDS sequence (opt4) from hemagglutinin__InfluenzaA__BAJ39978
augaaggccauccugguggugcugcuguacaccuucgccaccgccaacgccgacacccugugcaucggcuaccacgccaacaacagcaccgacaccguggacaccgugcuggagaagaacgugaccgugacccacagcgugaaccugcuggaggacaagcacaacggcaagcugugcaagcugagaggcguggccccccugcaccugggcaagugcaacaucgccggcuggauccugggcaaccccgagugcgagagccugagcaccgccagcagcuggagcuacaucguggagaccagcagcagcgacaacggcaccugcuaccccggcgacuucaucgacuacgaggagcugagagagcagcugagcagcgugagcagcuucgagagauucgagaucuuccccaagaccagcagcuggcccaaccacgacagcaacaagggcgugaccgccgccugcccccacgccggcgccaagagcuucuacaagaaccugaucuggcuggugaagaagggcaacagcuaccccaagcugagcaagagcuacaucaacgacaagggcaaggaggugcuggugcuguggggcauccaccaccccagcaccagcgccgaccagcagagccuguaccagaacgccgacgccuacguguucgugggcaccagcagauacagcaagaaguucaagcccgagaucgccaucagacccaaggugagagagcaggagggcagaaugaacuacuacuggacccugguggagcccggcgacaagaucaccuucgaggccaccggcaaccugguggugcccagauacgccuucgccauggagagaaacgccggcagcggcaucaucaucagcgacacccccgugcacgacugcaacaccaccugccagacccccaagggcgccaucaacaccagccugcccuuccagaacauccacagcaucaccaucggcaagugccccaaguacgugaagagcaccaagcugagacuggccaccggccugagaaacgugcccagcauccagagcagaggccuguucggcgccaucgccggcuucaucgagggcggcuggaccggcaugguggacggcugguacggcuaccaccaccagaacgagcagggcagcggcuacgccgccgaccugaagagcacccagaacgccaucgacgagaucaccaacaaggugaacagcgugaucgagaagaugaacacccaguucaccgccgugggcaaggaguucaaccaccuggagaagagaaucgagaaccugaacaagaagguggacgacggcuuccuggacaucuggaccuacaacgccgagcugcuggugcugcuggagaacgagagaacccuggacuaccacgacagcaacgugaagaaccuguacgagaaggugaagagccagcugaagaacaacgccaaggagaucggcaacggcugcuucgaguucuaccacaagugcgacaacaccugcauggagagcgugaagaacggcaccuacgacuaccccaaguacagcgaggaggccaagcugaacagagagaagaucgacggcgugaagcuggagagcaccagaaucuaccagauccuggccaucuacagcaccguggccagcagccuggugcugguggugagccugggcgccaucagcuucuggaugugcagcaacggcagccugcagugcagaaucugcaucuga

SEQ ID NO: 173786 - RNA, 1701 nt, Artificial Sequence
  derived and/or modified CDS sequence (opt4) from hemagglutinin__InfluenzaA__BAJ39979
augaaggccauccugguggugcugcuguacaccuucgccaccgccaacgccgacacccugugcaucggcuaccacgccaacaacagcaccgacaccguggacaccgugcuggagaagaacgugaccgugacccacagcgugaaccugcuggaggacaagcacaacggcaagcugugcaagcugagaggcguggccccccugcaccugggcaagugcaacaucgccggcuggauccugggcaaccccgagugcgagcugcugagcaccgccagcagcuggagcuacaucguggagaccagcagcagcgacaacggcaccugcuaccccggcgacuucaucgacuacgaggagcugagagagcagcugagcagcgugagcagcuucgagagauucgagaucuuccccaagaccagcagcuggcccaaccacgacagcgacaagggcgugaccgccgccugcccccacgccggcgccaagagcuucuacaagaaccugaucuggcuggugaagaagggcaacagcuaccccaagcugagcaagagcuacaucaacgacaagggcaaggaggugcuggugcuguggggcauccaccaccccagcaccagcgccgaccagcagagccuguaccagaacgccgacgccuacguguucgugggcaccagcagauacagcaagaaguucaagcccgagaucgccaucagacccaaggugagagaccaggagggcagaauggacuacuacuggacccugguggagcccggcgacaagaucaccuucgaggccaccggcaaccugguggugcccagauacgccuucgccauggagagaaacgccggcagcggcaucaucaucagcgacacccccgugcacaacugcaacaccaccugccagacccccaagggcgccaucaacaccagccugcccuuccagaacauccaccccaucaccaucggcaagugccccaaguacgugaagagcaccaagcugagacuggccaccggccugagaaacgugcccagcauccagagcagaggccuguucggcgccaucgccggcuucaucgagggcggcuggaccggcaugguggacggcugguacggcuaccaccaccagaacgagcagggcagcggcuacgccgccgaccugaagagcacccagaacgccaucgacaagaucaccaacaaggugaacagcgugaucgagaagaugaacacccaguucaccgccgugggcaaggaguucaaccaccuggagaacagaaucgagaaccugaacaagaagguggacgacggcuuccuggacaucuggaccuacaacgccgagcugcuggugcugcuggagaacgagagaacccuggacuaccacgacagcaacgugaagaaccuguacgagaaggugagaagccagcugaagaacaacgccaaggagaucggcaacggcugcuucgaguucuaccacaagugcgacaacaccugcauggagagcgugaagaacggcaccuacgacuaccccaaguacagcgaggaggccaagcugaacagagaggagaucgacggcgugaagcuggagagcaccagaaucuaccagauccuggccaucuacagcaccguggccagcagccuggugcugguggugagccugggcgccaucagcuucuggaugugcagcaacggcagccugcagugcagaaucugcaucuga

SEQ ID NO: 173787 - RNA, 1701 nt, Artificial Sequence; identical to SEQ ID NO: 169332
  derived and/or modified CDS sequence (opt4) from hemagglutinin__InfluenzaA__BAJ39980

SEQ ID NO: 173788 - RNA, 1701 nt, Artificial Sequence
  derived and/or modified CDS sequence (opt4) from hemagglutinin__InfluenzaA__BAJ39981
augaaggccauccugguggugcugcuguacaccuucgccaccgccaacgccgacacccugugcaucggcuaccacgccaacaacagcaccgacaccguggacaccgugcuggagaagaacgugaccgugacccacagcgugaaccugcuggaggacaagcacaacggcaagcugugcaagcugagaggcguggccccccugcaccugggcaagugcaacaucgccggcuggauccugggcaaccccgagugcgagagccugagcaccgccagcagcuggagcuacaucguggagaccagcagcagcgacaacggcaccugcuaccccggcgacuucaucgacuacgaggagcugagagagcagcugagcagcgugagcagcuucgagagauucgagaucuuccccaagaccagcagcuggcccaaccacgacagcaacaagggcgugaccgccgccugcccccacgccggcgccaagagcuucuacaagaaccugaucuggcuggugaagaagggcaacagcuaccccaagcugagcaagagcuacaucaacgacaagggcaaggaggugcuggugcuguggggcauccaccaccccagcaccagcgccgaccagcagagccuguaccagaacgccgacgccuacguguucgugggcaccagcagauacagcaagaaguucaagcccgagaucgccaucagacccaaggugagagaccaggagggcagaaugaacuacuacuggacccugguggagcccggcgacaagaucaccuucgaggccaccggcaaccugguggugcccagauacgccuucgccauggagagaaacgccggcagcggcaucaucaucagcgacacccccgugcacgacugcaacaccaccugccagacccccaagggcgccaucaacaccagccugcccuuccagaacauccaccccaucaccaucggcaagugcagcaaguacgugaagagcaccaagcugagacuggccaccggccugagaaacgugcccagcauccagagcagaggccuguucggcgccaucgccggcuucaucgagggcggcuggaccggcaugguggacggcugguacggcuaccaccaccagaacgagcagggcagcggcuacgccgccgaccugaagagcacccagaacgccaucgacgagaucaccaacaaggugaacagcgugaucgagaagaugaacacccaguucaccgccgugggcaaggaguucaaccaccuggagaagagaaucgagaaccugaacaagaagguggacgacggcuuccuggacaucuggaccuacaacgccgagcugcuggugcugcuggagaacgagagaacccuggacuaccacgacagcaacgugaagaaccuguacgagaaggugaagagccagcugaagaacaacgccaaggagaucggcaacggcugcuucgaguucuaccacaagugcgacaacaccugcauggagagcgugaagaacggcaccuacgacuaccccaaguacagcaaggaggccaagcugaacagagagaagaucgacggcgugaagcuggagagcaccagaaucuaccagauccuggccaucuacagcaccguggccagcagccuggugcugguggugagccugggcgccaucagcuucuggaugugcagcaacggcagccugcagugcagaaucugcaucuga

SEQ ID NO: 173789 - RNA, 1701 nt, Artificial Sequence
  derived and/or modified CDS sequence (opt4) from hemagglutinin__InfluenzaA__BAJ39982
augaaggccauccugguggugcugcuguacaccuucgccaccgccaacgccgccacccugugcaucggcuaccacgccaacaacagcaccgacaccguggacacccugcuggagaagaacgugaccgugacccacagcgugaaccugcuggaggacaagcacaacggcaagcugugcaagcugagaggcguggccccccugcaccugggcaagugcaacaucgccggcuggauccugggcaaccccgagugcgagagccugagcaccgccagcagcuggagcuacaucguggagaccagcagcagcgacaacggcaccugcuaccccggcgacuucaucgacuacgaggagcugagagagcagcugagcagcgugagcagcuucgagagauucgagaucuuccccaagaccagcagcuggcccaaccacgacagcaacaagggcgugaccgccgccugcccccacgccggcgccaagagcuucuacaagaaccugaucuggcuggugaagaagggcaacagcuaccccaagcugagcaagagcuacaucaacgacaagggcaaggaggugcuggugcuguggggcauccaccaccccagcaccagcgccgaccagcagagccuguaccagaacgccgacgccuacguguucgugggcaccagcagauacagcaagaaguucaagcccgagaucgccaucagacccaaggugagagaccaggagggcagaaugaacuacuacuggacccugguggagcccggcgacaagaucaccuucgaggccaccggcaaccugguggugcccagauacgccuucgccauggagagaaacgccggcagcggcaucaucaucagcgacacccccgugcacgacugcaacaccaccugccagacccccaagggcgccaucaacaccagccugcccuuccagaacauccaccccaucaccaucggcaagugccccaaguacgugaagagcaccaagcugagacuggccaccggccugagaaacgugcccagcauccagagcagaggccuguucggcgccaucgccggcuucaucgagggcggcuggaccggcaugguggacggcugguacggcuaccaccaccagaacgagcagggcagcggcuacgccgccgaccugaagagcacccagaacgccaucgacgagaucaccaacaaggugaacagcgugaucgagaagaugaacacccaguucaccgccgugggcaaggaguucaaccaccuggagaagagaaucgagaaccugaacaagaagguggacgacggcuuccuggacaucuggaccuacaacgccgagcugcuggugcugcuggagaacgagagaacccuggacuaccacgacagcaacgugaagaaccuguacgagaaggugagaagccagcugaagaacaacgccaaggagaucggcaacggcugcuucgaguucuaccacaagugcgacaacaccugcauggagagcgugaagaacggcaccuacgacuaccccaaguacagcgaggaggccaagcugaacagagaggagaucgacggcgugaagcuggagagcaccagaaucuaccagauccuggccaucuacagcaccguggccagcagccuggugcugguggugagccugggcgccaucagcuucuggaugugcagcaacggcagccugcagugcagaaucugcaucuga

SEQ ID NO: 173790 - RNA, 1701 nt, Artificial Sequence; identical to SEQ ID NO: 173757
  derived and/or modified CDS sequence (opt4) from hemagglutinin__InfluenzaA__BAJ39983

SEQ ID NO: 173791 - RNA, 1701 nt, Artificial Sequence
  derived and/or modified CDS sequence (opt4) from hemagglutinin__InfluenzaA__BAJ39984
augaaggccauccugguggugcugcuguacaccuucgccaccgccaacgccgacacccugugcaucggcuaccacgccaacaacagcaccgacaccguggacaccgugcuggagaagaacgugaccgugacccacagcgugaaccugcuggaggacaagcacaacggcaagcugugcaagcugagaggcguggccccccugcaccugggcaagugcaacaucgccggcuggauccugggcaaccccgagugcgagcugcugagcaccgccagcagcuggagcuacaucguggagaccagcagcagcgacaacggcaccugcuaccccggcgacuucaucgacuacgaggagcugagagagcagcugagcagcgugagcagcuucgagagauucgagaucuuccccaagaccagcagcuggcccaaccacgacagcaacaagggcgugaccgccgccugcccccacgccggcgccaagagcuucuacaagaaccugaucuggcuggugaagaagggcaacagcuaccccaagcugagcaagagcuacaucaacgacaagggcaaggaggugcuggugcuguggggcauccaccaccccagcaccagcgccgaccagcagagccuguaccagaacgccgacgccuacguguucgugggcaccagcagauacagcaagaaguucaagcccgagaucgccaucagacccaaggugagagaccaggagggcagaaugaacuacuacuggacccugguggagcccggcgacaagaucaccuucgaggccaccggcaaccugguggugcccagauacgccuucgccauggagagaaacgccggcagcggcaucaucaucagcgacacccccgugcacaacugcaacaccaccugccagacccccaagggcgccaucaacaccagccugcccuuccagaacauccaccccaucaccaucggcaagugccccaaguacgugaagagcaccaagcugagacuggccaccggccugagaaacgugcccagcauccagagcagaggccuguucggcgccaucgccggcuucaucgagggcggcuggaccggcaugguggacggcugguacggcuaccaccaccagaacgagcagggcagcggcuacgccgccgaccugaagagcacccagaacgccaucgacaagaucaccaacaaggugaacagcgugaucgagaagaugaacacccaguucaccgccgugggcaaggaguucaaccaccuggagaagagaaucgagaaccugaacaagaagguggacgacggcuuccuggacaucuggaccuacaacgccgagcugcuggugcugcuggagaacgagagaacccuggacuaccacgacagcaacgugaagaaccuguacgagaaggugagaagccagcugaagaacaacgccaaggagaucggcaacggcugcuucgaguucuaccacaagugcgacaacaccugcauggagagcgugaagaacggcaccuacgacuaccccaaguacagcgaggaggccaagcugaacagagaggagaucgacggcgugaagcuggagagcaccagaaucuaccagauccuggccaucuacagcaccguggccagcagccuggugcugguggugagccugggcgccaucagcuucuggaugugcagcaacggcagccugcagugcagaaucugcaucuga

SEQ ID NO: 173792 - RNA, 1701 nt, Artificial Sequence; identical to SEQ ID NO: 162729
  derived and/or modified CDS sequence (opt4) from hemagglutinin__InfluenzaA__BAJ39985

SEQ ID NO: 173793 - RNA, 1701 nt, Artificial Sequence
  derived and/or modified CDS sequence (opt4) from hemagglutinin__InfluenzaA__BAJ39987
augaagaccauccugguggugcugcuguacaccuucgccaccgccaacgccgacacccugugcaucggcuaccacgccaacaacagcaccgacaccguggacaccgugcuggagaagaacgugaccgugacccacagcgugaaccugcuggaggacaagcacaacggcaagcugugcaagcugagaggcguggccccccugcaccugggcaagugcaacaucgccggcuggauccugggcaaccccgagugcgagagccugagcaccgccagcagcuggagcuacaucguggagaccagcagcagcgacaacggcaccugcuaccccggcgacuucaucgacuacgaggagcugagagagcagcugagcagcgugagcagcuucgagagauucgagaucuuccccaagaccagcagcuggcccaaccacgacagcaacaagggcgugaccgccgccugcccccacgccggcgccaagagcuucuacaagaaccugaucuggcuggugaagaagggcaacagcuaccccaagcugagcaagagcuacaucaacgacaagggcaaggaggugcuggugcuguggggcauccaccaccccagcaccagcgccgaccagcagagccuguaccagaacgccgacaccuacguguucgugggcaccagcagauacagcaagaaguucaagcccgagaucgccaucagacccaaggugagagaccaggagggcagaaugaacuacuacuggacccugguggagcccggcgacaagaucaccuucgaggccaccggcaaccugguggugcccagauacgccuucgccauggagagaaacgccggcagcggcaucaucaucagcgacacccccgugcacgacugcaacaccaccugccagacccccaagggcgccaucaacaccagccugcccuuccagaacauccaccccaucaccaucggcaagugccccaaguacgugaagagcaccaagcugagacuggccaccggccugagaaacgugcccagcauccagagcagaggccuguucggcgccaucgccggcuucaucgagggcggcuggaccggcaugguggacggcugguacggcuaccaccaccagaacgagcagggcagcggcuacgccgccgaccugaagagcacccagaacgccaucgacgagaucaccaacaaggugaacagcgugaucgagaagaugaacacccaguucaccgccgugggcaaggaguucaaccaccuggagaagagaaucgagaaccugaacaagaagguggacgacggcuuccuggacaucuggaccuacaacgccgagcugcuggugcugcuggagaacgagagaacccuggacuaccacgacagcaacgugaagaaccuguacgagaaggugagaagccagcugaagaacaacgccaaggagaucggcaacggcugcuucgaguucuaccacaagugcgacaacaccugcauggagagcgugaagaacggcaccuacgacuaccccaaguacagcaaggaggccaagcugaacagagaggagaucgacggcgugaagcuggagagcaccagaaucuaccagauccuggccaucuacagcaccguggccagcagccuggugcugguggugagccugggcgccaucagcuucuggaugugcagcaacggcagccugcagugcagaaucugcaucuga

SEQ ID NO: 173794 - RNA, 1701 nt, Artificial Sequence
  derived and/or modified CDS sequence (opt4) from hemagglutinin__InfluenzaA__BAJ39988
augaaggccauccugguggugcugcuguacaccuucgccaccgccaacgccgacacccugugcaucggcuaccacgccaacaacagcaccgacaccguggacaccgugcuggagaagaacgugaccgugacccacagcgugaaccugcuggaggacaagcacaacggcaagcugugcaagcugagaggcguggccccccugcaccugggcaagugcaacaucgccggcuggauccugggcaaccccgagugcgagagccugagcaccgccagcagcuggagcuacaucguggagaccagcagcagcgacaacggcaccugcuaccccggcgacuucaucgacuacgaggagcugagagagcagcugagcagcgugagcagcuucgagagauucgagaucuuccccaagaccagcagcuggcccaaccacgacagcaacaagggcgugaccgccgccugcccccacgccggcgccaagagcuucuacaagaaccugaucuggcuggugaagaagggcaacagcuaccccaagcugagcaagagcuacaucaacgacaagggcaaggaggugcuggugcuguggggcauccaccaccccagcaccagcgccgaccagcagagcaucuaccagaacgccgacgccuacguguucgugggcaccagcagauacagcaagaaguucaagcccgagaucgccaucagacccaaggugagagaccaggagggcagaaugaacuacuacuggacccugguggagcccggcgacaagaucaccuucgaggccaccggcaaccugguggugcccagauacgccuucgccauggagagaaacgccggcagcggcaucaucaucagcgacacccccgugcacgacugcaacaccaccugccagacccccaagggcgccaucaacaccagccugcccuuccagaacauccaccccaucaccaucggcaagugcagcaaguacgugaagagcaccaagcugagacuggccaccggccugagaaacgugcccagcauccagagcagaggccuguucggcgccaucgccggcuucaucgagggcggcuggaccggcaugguggacggcugguacggcuaccaccaccagaacgagcagggcagcggcuacgccgccgaccugaagagcacccagaacgccaucgacgagaucaccaacaaggugaacagcgugaucgagaagaugaacacccaguucaccgccgugggcaaggaguucaaccaccuggagaagagaaucgagaaccugaacaagaagguggacgacggcuuccuggacaucuggaccuacaacgccgagcugcuggugcugcuggagaacgagagaacccuggacuaccacgacagcaacgugaagaaccuguacgagaaggugagaagccagcugaagaacaacgccaaggagaucggcaacggcugcuucgaguucuaccacaagugcgacaacaccugcauggagagcgugaagaacggcaccuacgacuaccccaaguacagcgaggaggccaagcugaacagagaggagaucgacggcgugaagcuggagagcaccagaaucuaccagauccuggccaucuacagcaccguggccagcagccuggugcugguggugagccugggcgccaucagcuucuggaugugcagcaacggcagccugcagugcagaaucugcaucuga

SEQ ID NO: 173795 - RNA, 1701 nt, Artificial Sequence; identical to SEQ ID NO: 164043
  derived and/or modified CDS sequence (opt4) from hemagglutinin__InfluenzaA__BAJ39989

SEQ ID NO: 173796 - RNA, 1701 nt, Artificial Sequence; identical to SEQ ID NO: 162729
  derived and/or modified CDS sequence (opt4) from hemagglutinin__InfluenzaA__BAJ39990

SEQ ID NO: 173797 - RNA, 1701 nt, Artificial Sequence; identical to SEQ ID NO: 162729
  derived and/or modified CDS sequence (opt4) from hemagglutinin__InfluenzaA__BAJ39993

SEQ ID NO: 173798 - RNA, 1701 nt, Artificial Sequence
  derived and/or modified CDS sequence (opt4) from hemagglutinin__InfluenzaA__BAJ39994
augaaggccauccugguggugcugcuguacaccuucgccaccgccaacgccgacacccugugcaucggcuaccacgccaacaacagcaccgacaccguggacaccgugcuggagaagaacgugaccgugacccacagcgugaaccugcuggaggacaagcacaacggcaagcugugcaagcugagaggcguggccccccugcaccugggcaagugcaacaucgccggcuggauccugggcaaccccgagugcgagagccugagcaccgccagcagcuggagcuacaucguggagaccagcagcagcgacaacggcaccugcuaccccggcgacuucaucgacuacgaggagcugagagagcagcugagcagcgugagcagcuucgagagauucgagaucuuccccaagaccagcagcuggcccaaccacgacagcaacaagggcgugaccgccgccugcccccacgccggcgccaagagcuucuacaagaaccugaucuggcuggugaagaagggcaacagcuaccccaagcugagcaagagcuacaucaacgacaagggcaaggaggugcuggugcuguggggcauccaccaccccagcaccagcgccgaccagcagagccuguaccagaacgccgacaccuacguguucgugggcaccagcagauacagcaagaaguucaagcccgagaucgccaucagacccaaggugagagaccaggagggcagaaugaacuacuacuggacccugguggagcccggcgacaagaucaccuucgaggccaccggcaaccugguggugcccagauacgccuucgccauggagagaaacgccggcagcggcaucaucaucagcgacacccccgugcacgacugcaacaccaccugccagacccccaagggcgccaucaacaccagccugcccuuccagaacauccaccccaccaccaucggcaagugccccaaguacgugaagagcaccaagcugagacuggccaccggccugagaaacgugcccagcauccagagcagaggccuguucggcgccaucgccggcuucaucgagggcggcuggaccggcaugguggacggcugguacggcuaccaccaccagaacgagcagggcagcggcuacgccgccgaccugaagagcacccagaacgccaucgacgagaucaccaacaaggugaacagcgugaucgagaagaugaacacccaguucaccgccgugggcaaggaguucaaccaccuggagaagagaaucgagaaccugaacaagaagguggacgacggcuuccuggacaucuggaccuacaacgccgagcugcuggugcugcuggagaacgagagaacccuggacuaccacgacagcaacgugaagaaccuguacgagaaggugaagagccagcugaagaacaacgccaaggagaucggcaacggcugcuucgaguucuaccacaagugcgacaacaccugccuggagagcgugaagaacggcaccuacgacuaccccaaguacagcgaggaggccaagcugaacagagagaagaucgacggcgugaagcuggagagcaccagaaucuaccagauccuggccaucuacagcaccguggccagcagccuggugcugguggugagccugggcgccaucagcuucuggaugugcagcaacggcagccugcagugcagaaucugcaucuga

SEQ ID NO: 173799 - RNA, 1701 nt, Artificial Sequence; identical to SEQ ID NO: 162729
  derived and/or modified CDS sequence (opt4) from hemagglutinin__InfluenzaA__BAJ39996

SEQ ID NO: 173800 - RNA, 1701 nt, Artificial Sequence
  derived and/or modified CDS sequence (opt4) from hemagglutinin__InfluenzaA__BAJ39997
augaaggccauccugguggugcugcuguacaccuucgccaccgccaacgccgacacccugugcaucggcuaccacgccaacaacagcaccgacaccguggacaccgugcuggagaagaacgugaccgugacccacagcgugaaccugcuggaggacaagcacaacggcaagcugugcaagcugagaggcguggccccccugcaccugggcaagugcaacaucgccggcuggauccugggcaaccccgagugcgagagccugagcaccgccagcagcuggagcuacaucguggagaccagcagcagcgacaacggcaccugcuaccccggcgacuucaucgacuacgaggagcugagagagcagcugagcagcgugagcagcuucgagagauucgagaucuuccccaagaccagcagcuggcccaaccacgacagcaacaagggcgugaccgccgccugcccccacgccggcgccaagagcuucuacaagaaccugaucuggcuggugaagaagggcaacagcuaccccaagcugagcaagagcuacaucaacgacaagggcaaggaggugcuggugcuguggggcauccaccaccccagcaccagcgccgaccagcagagccuguaccagaacgccgacaccuacguguucgugggcaccagcagauacagcaagaaguucaagcccgagaucgccaucagacccaaggugagagaccaggagggcagaaugaacuacuacuggacccugguggagcccggcgacaagaucaccuucgaggccaccggcaaccugguggugcccagauacgccuucgccauggagagaaacgccggcagcggcaucaucaucagcgacacccccgugcacgacugcaacaccaccugccagacccccaagggcgccaucaacaccagccugcccuuccagaacauccaccccaccaccaucggcaagugccccaaguacgugaagagcaccaagcugagacuggccaccggccugagaaacgugcccagcauccagagcagaggccuguucggcgccaucgccggcuucaucgagggcggcuggaccggcaugguggacggcugguacggcuaccaccaccagaacgagcagggcagcggcuacgccgccgaccugaagagcacccagaacgccaucgacgagaucaccaacaaggugaacagcgugaucgagaagaugaacacccaguucaccgccgugggcaaggaguucaaccaccuggagaagagaaucgagaaccugaacaagaagguggacgacggcuuccuggacaucuggaccuacaacgccgagcugcuggugcugcuggagaacgagagaacccuggacuaccacgacagcaacgugaagaaccuguacgagaaggugagaagccagcugaagaacaacgccaaggagaucggcaacggcugcuucgaguucuaccacaagugcgacaacaccugcauggagagcgugaagaacggcaccuacgacuaccccaaguacagcgaggaggccaagcugaacagagaggagaucgacggcgugaagcuggagagcaccagaaucuaccagauccuggccaucuacagcaccguggccagcagccuggugcugguggugagccugggcgccaucagcuucuggaugugcagcaacggcagccugcagugcagaaucugcaucuga

SEQ ID NO: 173801 - RNA, 1701 nt, Artificial Sequence; identical to SEQ ID NO: 162729
  derived and/or modified CDS sequence (opt4) from hemagglutinin__InfluenzaA__BAJ39998

SEQ ID NO: 173802 - RNA, 1701 nt, Artificial Sequence
  derived and/or modified CDS sequence (opt4) from hemagglutinin__InfluenzaA__BAJ39999
augaaggccauccugguggugcugcuguacaccuucgccaccgccaacgccgacacccugugcaucggcuaccacgccaacaacagcaccgacaccguggacaccgugcuggagagaaacgugaccgugacccacagcgugaaccugcuggaggacaagcacaacggcaagcugugcaagcugagaggcguggccccccugcaccugggcaagugcaacaucgccggcuggauccugggcaaccccgagugcgagagccugagcaccgccagcagcuggagcuacaucguggagaccagcagcagcgacaacggcaccugcuaccccggcgacuucaucgacuacgaggagcugagagagcagcugagcagcgugagcagcuucgagagauucgagaucuuccccaagaccagcagcuggcccaaccacgacagcaacaagggcgugaccgccgccugcccccacgccggcgccaagagcuucuacaagaaccugaucuggcuggugaagaagggcaacagcuaccccaagcugagcaagagcuacaucaacgacaagggcaaggaggugcuggugcuguggggcauccaccaccccagcaccagcgccgaccagcagagccuguaccagaacgccgacaccuacguguucgugggcaccagcagauacagcaagaaguucaagcccgagaucgccaucagacccaaggugagagaccaggagggcagaaugaacuacuacuggacccugguggagcccggcgacaagaucaccuucgaggccaccggcaaccugguggugcccagauacgccuucgccauggagagaaacgccggcagcggcaucaucaucagcgacacccccgugcacgacugcaacaccaccugccagacccccaagggcgccaucaacaccagccugcccuuccagaacauccaccccaucaccaucggcaagugccccaaguacgugaagagcaccaagcugagacuggccaccggccugagaaacgugcccagcauccagagcagaggccuguucggcgccaucgccggcuucaucgagggcggcuggaccggcaugguggacggcugguacggcuaccaccaccagaacgagcagggcagcggcuacgccgccgaccugaagagcacccagaacgccaucgacgagaucaccaacaaggugaacagcgugaucgagaagaugaacacccaguucaccgccgugggcaaggaguucaaccaccuggagaagagaaucgagaaccugaacaagaagguggacgacggcuuccuggacaucuggaccuacaacgccgagcugcuggugcugcuggagaacgagagaacccuggacuaccacgacagcaacgugaagaaccuguacgagaaggugagaagccagcugaagaacaacgccaaggagaucggcaacggcugcuucgaguucuaccacaagugcgacaacaccugcauggagagcgugaagaacggcaccuacgacuaccccaaguacagcgaggaggccaagcugaacagagaggagaucgacggcgugaagcuggagagcaccagaaucuaccagauccuggccaucuacagcaccguggccagcagccuggugcugguggugagccugggcgccaucagcuucuggaugugcagcaacggcagccugcagugcagaaucugcaucuga

SEQ ID NO: 173803 - RNA, 1701 nt, Artificial Sequence
  derived and/or modified CDS sequence (opt4) from hemagglutinin__InfluenzaA__BAJ40000
augaagaccauccugguggugcugcuguacaccuucgccaccgccaacgccgacacccugugcaucggcuaccacgccaacaacagcaccgacaccguggacaccgugcuggagaagaacgugaccgugacccacagcgugaaccugcuggaggacaagcacaacggcaagcugugcaagcugagaggcguggccccccugcaccugggcaagugcaacaucgccggcuggauccugggcaaccccgagugcgagagccugagcaccgccagcagcuggagcuacaucguggagaccagcagcagcgacaacggcaccugcuaccccggcgacuucaucgacuacgaggagcugagagagcagcugagcagcgugagcagcuucgagagauucgagaucuuccccaagaccagcagcuggcccaaccacgacagcaacaagggcgugaccgccgccugcccccacgccggcgccaagagcuucuacaagaaccugaucuggcuggugaagaagggcaacagcuaccccaagcugagcaagagcuacaucaacgacaagggcaaggaggugcuggugcuguggggcauccaccaccccagcaccagcgccgaccagcagagccuguaccagaacgccgacaccuacguguucgugggcaccagcagauacagcaagaaguucaagcccgagaucgccaucagacccaaggugagagaccaggagggcagaaugaacuacuacuggacccugguggagcccggcgacaagaucaccuucgaggccaccggcaaccugguggugcccagauacgccuucgccauggagagaaacgccggcagcggcaucaucaucagcgacacccccgugcacgacugcaacaccaccugccagacccccaagggcgccaucaacaccagccugcccuuccagaacauccaccccaucaccaucggcaagugccccaaguacgugaagagcaccaagcugagacuggccaccggccugagaaacgugcccagcauccagagcagaggccuguucggcgccaucgccggcuucaucgagggcggcuggaccggcaugguggacggcugguacggcuaccaccaccagaacgagcagggcagcggcuacgccgccgaccugaagagcacccagaacgccaucgacgagaucaccaacaaggugaacagcgugaucgagaagaugaacacccaguucaccgccgugggcaaggaguucaaccaccuggagaagagaaucgagaaccugaacaagaagguggacgacggcuuccuggacaucuggaccuacaacgccgagcugcuggugcugcuggagaacgagagaacccuggacuaccacgacagcaacgugaagaaccuguacgagaaggugagaagccagcugaagaacaacgccaaggagaucggcaacggcugcuucgaguucuaccacaagugcgacaacaccugcauggagagcgugaagaacggcaccuacgacuaccccaaguacagcgaggaggccaagcugaacagagaggagaucgacggcgugaagcuggagagcaccagaaucuaccagauccuggccaucuacagcaccguggccagcagccuggugcugguggugagccugggcgccaucagcuucuggaugugcagcaacggcagccugcagugcagaaucugcaucuga

SEQ ID NO: 173804 - RNA, 1701 nt, Artificial Sequence; identical to SEQ ID NO: 167739
  derived and/or modified CDS sequence (opt4) from hemagglutinin__InfluenzaA__BAJ40001

SEQ ID NO: 173805 - RNA, 1701 nt, Artificial Sequence; identical to SEQ ID NO: 162729
  derived and/or modified CDS sequence (opt4) from hemagglutinin__InfluenzaA__BAJ40002

SEQ ID NO: 173806 - RNA, 1701 nt, Artificial Sequence; identical to SEQ ID NO: 167739
  derived and/or modified CDS sequence (opt4) from hemagglutinin__InfluenzaA__BAJ40003

SEQ ID NO: 173807 - RNA, 1701 nt, Artificial Sequence
  derived and/or modified CDS sequence (opt4) from hemagglutinin__InfluenzaA__BAJ40004
augaaggccauccugguggugcugcuguacaccuucgccaccgccaacgccgacacccugugcaucggcuaccacgccaacaacagcaccgacaccguggacaccgugcuggagaagaacgugaccgugacccacagcgugaaccugcuggaggacaagcacaacggcaagcugugcaagcugagaggcguggccccccugcaccugggcaagugcaacaucgccggcuggauccugggcaaccccgagugcgagagccugagcaccgccagcagcuggagcuacaucguggagaccagcagcagcgacaacggcaccugcuaccccggcgacuucaucgacuacgaggagcugagagagcagcugagcagcgugagcagcuucgagagauucgagaucuuccccaagaccagcagcuggcccaaccacgacagcaacaagggcgagaccgccgccugcccccacgccggcgccaagagcuucuacaagaaccugaucuggcuggugaagaagggcaacagcuaccccaagcugagcaagagcuacaucaacgacaagggcaaggaggugcuggugcuguggggcauccaccaccccagcaccagcgccgaccagcagagccuguaccagaacgccgacgccuacguguucgugggcaccagcagauacagcaagaaguucaagcccgagaucgccaucagacccaaggugagagaccaggagggcagaaugaacuacuacuggacccugguggagcccggcgacaagaucaccuucgaggccaccggcaaccugguggugcccagauacgccuucgccauggagagaaacgccggcagcggcaucaucaucagcgacacccccgugcacgacugcaacaccaccugccagacccccaagggcgccaucaacaccagccugcccuuccagaacauccaccccaucaccaucggcaagugccccaaguacgugaagagcaccaagcugagacuggccaccggccugagaaacgugcccagcauccagagcagaggccuguucggcgccaucgccggcuucaucgagggcggcuggaccggcaugguggacggcugguacggcuaccaccaccagaacgagcagggcagcggcuacgccgccgaccugaagagcacccagaacgccaucgacaagaucaccaacaaggugaacagcgugaucgagaagaugaacacccaguucaccgccgugggcaaggaguucaaccaccuggagaagagaaucgagaaccugaacaagaagguggacgacggcuuccuggacaucuggaccuacaacgccgagcugcuggugcugcuggagaacgagagaacccuggacuaccacgacagcaacgugaagaaccuguacgagaaggugaagagccagcugaagaacaacgccaaggagaucggcaacggcugcuucgaguucuaccacaagugcgacaacaccugcauggagagcgugaagaacggcaccuacgacuaccccaaguacagcgaggaggccaagcugaacagagagaagaucgacggcgugaagcuggagagcaccagaaucuaccagauccuggccaucuacagcaccguggccagcagccuggugcugguggugagccugggcgccaucagcuucuggaugugcagcaacggcagccugcagugcagaaucugcaucuga

SEQ ID NO: 173808 - RNA, 1701 nt, Artificial Sequence
  derived and/or modified CDS sequence (opt4) from hemagglutinin__InfluenzaA__BAJ40006
augaaggccauccugguggugcugcuguacaccuucgccaccgccaacgccgacacccugugcaucggcuaccacgccaacaacagcaccgacaccguggacaccgugcuggagaagaacgugaccgugacccacagcgugaaccugcuggaggacaagcacaacggcaagcugugcaagcugagaggcguggccccccugcaccugggcaagugcaacaucgccggcuggauccugggcaaccccgagugcgagagccugagcaccgccagcagcuggagcuacaucguggagaccagcagcagcgacaacggcaccugcuaccccggcgacuucaucgacuacgaggagcugagagagcagcugagcagcgugagcagcuucgagagauucgagaucuuccccaagaccagcagcuggcccaaccacgacagcaacaagggcgugaccgccgccugcccccacgccggcgccaagagcuucuacaagaaccugaucuggcuggugaagaagggcaacagcuaccccaagcugagcaagagcuacaucaacgacaagggcagagaggugcuggugcuguggggcauccaccaccccagcaccagcgccgaccagcagagccuguaccagaacgccgacaccuacguguucgugggcaccagcagauacagcaagaaguucaagcccgagaucgccaucagacccaaggugagagaccaggagggcagaaugaacuacuacuggacccugguggagcccggcgacaagaucaccuucgaggccaccggcaaccugguggugcccagauacgccuucgccauggagagaaacgccggcagcggcaucaucaucagcgacacccccgugcacgacugcaacaccaccugccagacccccaagggcgccaucaacaccagccugcccuuccagaacauccaccccaucaccaucggcaagugccccaaguacgugaagagcaccaagcugagacuggccaccggccugagaaacgugcccagcauccagagcagaggccuguucggcgccaucgccggcuucaucgagggcggcuggaccggcaugguggacggcugguacggcuaccaccaccagaacgagcagggcagcggcuacgccgccgaccugaagagcacccagaacgccaucgacgagaucaccaacaaggugaacagcgugaucgagaagaugaacacccaguucaccgccgugggcaaggaguucaaccaccuggagaagagaaucgagaaccugaacaagaagguggacgacggcuuccuggacaucuggaccuacaacgccgagcugcuggugcugcuggagaacgagagaacccuggacuaccacgacagcaacgugaagaaccuguacgagaaggugagaagccagcugaagaacaacgccaaggagaucggcaacggcugcuucgaguucuaccacaagugcgacaacaccugcauggagagcgugaagaacggcaccuacgacuaccccaaguacagcgaggaggccaagcugaacagagaggagaucgacggcgugaagcuggagagcaccagaaucuaccagauccuggccaucuacagcaccguggccagcagccuggugcugguggugagccugggcgccaucagcuucuggaugugcagcaacggcagccugcagugcagaaucugcaucuga

SEQ ID NO: 173809 - RNA, 1701 nt, Artificial Sequence; identical to SEQ ID NO: 162729
  derived and/or modified CDS sequence (opt4) from hemagglutinin__InfluenzaA__BAJ40007

SEQ ID NO: 173810 - RNA, 1701 nt, Artificial Sequence
  derived and/or modified CDS sequence (opt4) from hemagglutinin__InfluenzaA__BAJ40008
augaaggccauccugguggugcugcuguacaccuucgccaccgccaacgccgacacccugugcaucggcuaccacgccaacaacagcaccgacaccguggacaccgugcuggagaagaacgugaccgugacccacagcgugaaccugcuggaggacaagcacaacggcaagcugugcaagcugagaggcguggccccccugcaccugggcaagugcaacaucgccggcuggauccugggcaaccccgagugcgagagccugagcaccgccagcagcuggagcuacaucguggagaccagcagcagcgacaacggcaccugcuaccccggcgacuucaucgacuacgaggagcugagagagcagcugagcagcgugagcagcuucgagagauucgagaucuuccccaagaccagcagcuggcccaaccacgacagcaacaagggcgugaccgccgccugcccccacgccggcgccaagagcuucuacaagaaccugaucuggcuggugaagaagggcaacagcuaccccaagcugagcaagagcuacaucaacgacaagggcaaggaggugcuggugcuguggggcauccaccaccccagcaccagcgccgaccagcagagccuguaccagaacgccgacgccuacguguucgugggcaccagcagauacagcaagaaguucaagcccgagaucgccaucagacccaaggugagagaccaggagggcagaaugaacuacuacuggacccugguggagcccggcgacaagaucaccuucgaggccaccggcaaccugguggugcccagauacgccuucgccauggagagaaacgccggcagcggcaucaucaucagcgacacccccgugcacgacugcaacaccaccugccagacccccaagggcgccaucaacaccagccugcccuuccagaacauccaccccaucaccaucggcaagugccccaaguacgugaagagcaccaagcugagacuggccaccggccugagaaacgugcccagcauccagagcagaggccuguucggcgccaucgccggcuucaucgagggcggcuggaccggcaugguggacggcugguacggcuaccaccaccagaacgagcagggcagcggcuacgccgccgaccugaagagcacccagaacgccaucgacgagaucaccaacaaggugaacagcgugaucgagaagaugaacacccaguucaccgccgugggcaaggaguucaaccaccuggagaagagaaucgagaaccugaacaagaagguggacgacggcuuccuggacaucuggaccuacaucgccgagcugcuggugcugcuggagaacgagagaacccuggacuaccacgacagcaacgugaagaaccuguacgagaaggugagaagccagcugaagaacaacgccaaggagaucggcaacggcugcuucgaguucuaccacaagugcgacaacaccugcauggagagcgugaagaacggcaccuacgacuaccccaaguacagcgaggaggccaagcugaacagagaggagaucgacggcgugaagcuggagagcaccagaaucuaccagauccuggccaucuacagcaccguggccagcagccuggugcugguggugagccugggcgccaucagcuucuggaugugcagcaacggcagccugcagugcagaaucugcaucuga

SEQ ID NO: 173811 - RNA, 1701 nt, Artificial Sequence
  derived and/or modified CDS sequence (opt4) from hemagglutinin__InfluenzaA__BAJ40009
augaaggccauccugguggugcugcuguacaccuucgccaccgccaacgccgacacccugugcaucggcuaccacgccaacaacagcaccgacaccguggacaccgugcuggagaagaacgugaccgugacccacagcgugaaccugcuggaggacaagcacaacggcaagcugugcaagcugagaggcguggccccccugcaccugggcaagugcaacaucgccggcuggauccugggcaaccccgagugcgagagccugagcaccgccagcagcuggagcuacaucguggagaccagcagcagcgacaacggcaccugcuaccccggcgacuucaucgacuacgaggagcugagagagcagcugagcagcgugagcagcuucgagagauucgagaucuuccccaagaccagcagcuggcccaaccacgacagcgacaagggcgugaccgccgccugcccccacgccggcgccaagagcuucuacaagaaccugaucuggcuggugaagaagggcaacagcuaccccaagcugagcaagagcuacaucaacgacaagggcaaggaggugcuggugcuguggggcauccaccaccccagcaccagcgccgaccagcagagccuguaccagaacgccgacgccuacguguucgugggcaccagcagauacagcaagaaguucaagcccgagaucgccaucagacccaaggugagagaccaggagggcagaauggacuacuacuggacccugguggagcccggcgacaagaucaccuucgaggccaccggcaaccugguggugcccagauacgccuucgccauggagagaaacgccggcagcggcaucaucaucagcgacacccccgugcacaacugcaacaccaccugccagacccccaagggcgccaucaacaccagccugcccuuccagaacauccaccccaucaccaucggcaagugccccaaguacgugaagagcaccaagcugagacuggccaccggccugagaaacgugcccagcauccagagcagaggccuguucggcgccaucgccggcuucaucgagggcggcuggaccggcaugguggacggcugguacggcuaccaccaccagaacgagcagggcagcggcuacgccgccgaccugaagagcacccagaacgccaucgacaagaucaccaacaaggugaacagcgugaucgagaagaugaacacccaguucaccgccgugggcaaggaguucaaccaccuggagaacagaaucgagaaccugaacaagaagguggacgacggcuuccuggacaucuggaccuacaacgccgagcugcuggugcugcuggagaacgagagaacccuggacuaccacgacagcaacgugaagaaccuguacgagaaggugagaagccagcugaagaacaacgccaaggagaucggcaacggcugcuucgaguucuaccacaagugcgacaacaccugcauggagagcgugaagaacggcaccuacgacuaccccaaguacagcgaggaggccaagcugaacagagaggagaucgacggcgugaagcuggagagcaccagaaucuaccagauccuggccaucuacagcaccguggccagcagccuggugcugguggugagccugggcgccaucagcuucuggaugugcagcaacggcagccugcagugcagaaucugcaucuga

SEQ ID NO: 173812 - RNA, 1701 nt, Artificial Sequence
  derived and/or modified CDS sequence (opt4) from hemagglutinin__InfluenzaA__BAJ40010
augaaggccauccugguggugcugcuguacaccuucgccaccgccaacgccgacacccugugcaucggcuaccacgccaacaacagcaccgacaccguggacaccgugcuggagaagaacgugaccgugacccacagcgugaaccugcuggaggacaagcacaacggcaagcugugcaagcugagaggcguggccccccugcaccugggcaagugcaacaucgccggcuggauccugggcaaccccgagugcgagcugcugagcaccgccagcagcuggagcuacaucguggagaccagcagcagcgacaacggcaccugcuaccccggcgacuucaucgacuacgaggagcugagagagcagcugagcagcgugagcagcuucgagagauucgagaucuuccccaagaccagcagcuggcccaaccacgacagcgacaagggcgugaccgccgccugcccccacgccggcgccaagagcuucuacaagaaccugaucuggcuggugaagaagggcaacagcuaccccaagcugagcaagagcuacaucaacgacaagggcaaggaggugcuggugcuguggggcauccaccaccccagcaccagcgccgaccagcagagccuguaccagaacgccgacgccuacguguucgugggcaccagcagauacagcaagaaguucaagcccgagaucgccaucagacccaaggugagagaccaggagggcagaauggacuacuacuggacccugguggagcccggcgacaagaucaccuucgaggccaccggcaaccugguggugcccagauacgccuucgccauggagagaaacgccggcagcggcaucaucaucagcgacacccccgugcacaacugcaacaccaccugccagacccccaagggcgccaucaacaccagccugcccuuccagaacauccaccccaucaccaucggcaagugccccaaguacgugaagagcaccaagcugagacuggccaccggccugagaaacgugcccagcauccagagcagaggccuguucggcgccaucgccggcuucaucgagggcggcuggaccggcaugguggacggcugguacggcuaccaccaccagaacgagcagggcagcggcuacgccgccgaccugaagagcacccagaacgccaucgacaagaucaccaacaaggugaacagcgugaucgagaagaugaacacccaguucaccgccgugggcaaggaguucaaccaccuggagaagagaaucgagaaccugaacaagaagguggacgacggcuuccuggacaucuggaccuacaacgccgagcugcuggugcugcuggagaacgagagaacccuggacuaccacgacagcaacgugaagaaccuguacgagaaggugagaagccagcugaagaacaacgccaaggagaucggcaacggcugcuucgaguucuaccacaagugcgacaacaccugcauggagagcgugaagaacggcaccuacgacuaccccaaguacagcgaggaggccaagcugaacagagaggagaucgacggcgugaagcuggagagcaccagaaucuaccagauccuggccaucuacagcaccguggccagcagccuggugcugguggugagccugggcgccaucagcuucuggaugugcagcaacggcagccugcagugcagaaucugcaucuga

SEQ ID NO: 173813 - RNA, 1701 nt, Artificial Sequence; identical to SEQ ID NO: 173802
  derived and/or modified CDS sequence (opt4) from hemagglutinin__InfluenzaA__BAJ40011

SEQ ID NO: 173814 - RNA, 1701 nt, Artificial Sequence
  derived and/or modified CDS sequence (opt4) from hemagglutinin__InfluenzaA__BAJ40012
augaaggccauccugguggugcugcuguacaccuucgccaccgccaacgccgacacccugugcaucggcuaccacgccaacaacagcaccgacaccguggacaccgugcuggagaagaacgugaccgugacccacagcgugaaccugcuggaggacaagcacaacggcaagcugugcaagcugagaggcguggccccccugcaccugggcaagugcaacaucgccggcuggauccugggcaaccccgagugcgagagccugagcaccgccagcagcuggagcuacaucguggagaccagcagcagcgacaacggcaccugcuaccccggcgacuucaucgacuacgaggagcugagagagcagcugagcagcgugagcagcuucgagagauucgagaucuuccccaagaccagcagcuggcccaaccacgacagcaacaagggcgugaccgccgccugcccccacgccggcgccaagagcuucuacaagaaccugaucuggcuggugaagaagggcaacagcuaccccaagcugagcaagagcuacaucaacgacaagggcaaggaggugcuggugcuguggggcauccaccaccccagcaccagcgccgaccagcagagccuguaccagaacgccgacgccuacguguucgugggcaccagcagauacagcaagaaguucaagcccgagaucgccaucagacccaaggugagagaccaggagggcagaaugaacuacuacuggacccugguggagcccggcgacaagaucaccuucgaggccaccggcaaccugguggugcccagauacgccuucgccauggagagaaacgccggcagcggcaucaucaucagcgacacccccgugcacgacugcaacaccaccugccagacccccaagggcgccaucaacaccagccugcccuuccagaacauccaccccaucaccaucggcaagugccccaaguacgugaagagcaccaagcugagacuggccaccggccugagaaacgugcccagcauccagagcagaggccuguucggcgccaucgccggcuucaucgagggcggcuggaccggcaugguggacggcugguacggcuaccaccaccagaacgagcagggcagcggcuacgccgccgaccugaagagcacccagaacgccaucgacgagaucaccaacaaggugaacagcgugaucgagaagaugaacacccaguucaccgccgugggcaaggaguucaaccaccuggagaagagaaucgagaaccugaacaagaagguggacgacggcuuccuggacaucuggaccuacaacgccgagcugcuggugcugcuggagaacgagagaacccuggacuaccacgacagcaacgugaagaaccuguacgagaaggugagaagccagcugaagaacaacgccaaggagaucggcaacggcugcuucgaguucuaccacaagugcgacaacaccugcauggagagcgugaagaacggcaccuacgacuaccccaaguacagcgaggaggccaagcugaacagagaggagaucgacggcaucaagcuggagagcaccagaaucuaccagauccuggccaucuacagcaccguggccagcagccuggugcugguggugagccugggcgccaucagcuucuggaugugcagcaacggcagccugcagugcagaaucugcaucuga

SEQ ID NO: 173815 - RNA, 1701 nt, Artificial Sequence; identical to SEQ ID NO: 173802
  derived and/or modified CDS sequence (opt4) from hemagglutinin__InfluenzaA__BAJ40013

SEQ ID NO: 173816 - RNA, 1701 nt, Artificial Sequence; identical to SEQ ID NO: 173802
  derived and/or modified CDS sequence (opt4) from hemagglutinin__InfluenzaA__BAJ40014

SEQ ID NO: 173817 - RNA, 1701 nt, Artificial Sequence
  derived and/or modified CDS sequence (opt4) from hemagglutinin__InfluenzaA__BAJ40015
augaaggccauccugguggugcugcuguacaccuucgccaccgccaacgccgacacccugugcaucggcuaccacgccaacaacagcaccgacaccguggacaccgugcuggagaagaacgugaccgugacccacagcgugaaccugcuggaggacaagcacaacggcaagcugugcaagcugagaggcguggccccccugcaccugggcaagugcaacaucgccggcuggauccugggcaaccccgagugcgagagccugagcaccgccagcagcuggagcuacaucguggagaccagcagcagcgacaacggcaccugcuaccccggcgacuucaucgacuacgaggagcugagagagcagcugagcagcgugagcagcuucgagagauucgagaucuuccccaacaccagcagcuggcccaaccacgacagcaacaagggcgugaccgccgccugcccccacgccggcgccaagagcuucuacaagaaccugaucuggcuggugaagaagggcaacagcuaccccaagcugagcaagagcuacaucaacgacaagggcaaggaggugcuggugcuguggggcauccaccaccccagcaccagcgccgaccagcagagccuguaccagaacgccgacaccuacguguucgugggcaccagcagauacagcaagaaguucaagcccgagaucgccaucagacccaaggugagagaccaggagggcagaaugaacuacuacuggacccugguggagcccggcgacaagaucaccuucgaggccaccggcaaccugguggugcccagauacgccuucgccauggagagaaacgccggcagcggcaucaucaucagcgacacccccgugcacgacugcaacaccaccugccagacccccaagggcgccaucaacaccagccugcccuuccagaacauccaccccaucaccaucggcaagugccccaaguacgugaagagcaccaagcugagacuggccaccggccugagaaacgugcccagcauccagagcagaggccuguucggcgccaucgccggcuucaucgagggcggcuggaccggcaugguggacggcugguacggcuaccaccaccagaacgagcagggcagcggcuacgccgccgaccugaagagcacccagaacgccaucgacgagaucaccaacaaggugaacagcgugaucgagaagaugaacacccaguucaccgccgugggcaaggaguucaaccaccuggagaagagaaucgagaaccugaacaagaagguggacgacggcuuccuggacaucuggaccuacaacgccgagcugcuggugcugcuggagaacgagagaacccuggacuaccacgacagcaacgugaagaaccuguacgagaaggugagaagccagcugaagaacaacgccaaggagaucggcaacggcugcuucgaguucuaccacaagugcgacaacaccugcauggagagcgugaagaacggcaccuacgacuaccccaaguacagcgaggaggccaagcugaacagagaggagaucgacggcgugaagcuggagagcaccagaaucuaccagauccuggccaucuacagcaccguggccagcagccuggugcugguggugagccugggcgccaucagcuucuggaugugcagcaacggcagccugcagugcagaaucugcaucuga

SEQ ID NO: 173818 - RNA, 1701 nt, Artificial Sequence; identical to SEQ ID NO: 173802
  derived and/or modified CDS sequence (opt4) from hemagglutinin__InfluenzaA__BAJ40016

SEQ ID NO: 173819 - RNA, 1701 nt, Artificial Sequence
  derived and/or modified CDS sequence (opt4) from hemagglutinin__InfluenzaA__BAJ40017
augaaggccauccugguggugcugcuguacaccuucgccaccgccaacgccgacacccugugcaucggcuaccacgccaacaacagcaccgacaccguggacaccgugcuggagaagaacgugaccgugacccacagcgugaaccugcuggaggacaagcacaacggcaagcugugcaagcugagaggcguggccccccugcaccugggcaagugcaacaucgccggcuggauccugggcaaccccgagugcgagagccugagcaccgccagcagcuggagcuacaucguggagaccagcaacagcgacaacggcaccugcuaccccggcgacuucaucgacuacgaggagcugagagagcagcugagcagcgugagcagcuucgagagauucgagaucuuccccaagaccagcagcuggcccaaccacgacagcaacaagggcgugaccgccgccugcccccacgccggcgccaagagcuucuacaagaaccugaucuggcuggugaagaagggcaacagcuaccccaagcugagcaagagcuacaucaacgacaagggcaaggaggugcuggugcuguggggcauccaccaccccagcaccagcgccgaccagcagagccuguaccagaacgccgacgccuacguguucgugggcaccagcagauacagcaagaaguucaagcccgagaucgccaucagacccaaggugagagaccaggagggcagaaugaacuacuacuggacccugguggagcccggcgacaagaucaccuucgaggccaccggcaaccugguggugcccagauacgccuucgccauggagagaaacgccggcagcggcaucaucaucagcgacacccccgugcacgacugcaacaccaccugccagacccccaagggcgccaucaacaccagccugcccuuccagaacauccaccccaucaccaucggcaagugccccaaguacgugaagagcaccaagcugagacuggccaccggccugagaaacgugcccagcauccagagcagaggccuguucggcgccaucgccggcuucaucgagggcggcuggaccggcaugguggacggcugguacggcuaccaccaccagaacgagcagggcagcggcuacgccgccgaccugaagagcacccagaaggccaucgacgagaucaccaacaaggugaacagcgugaucgagaagaugaacacccaguucaccgccgugggcaaggaguucaaccaccuggagaagagaaucgagaaccugaacaagaagguggacgacggcuuccuggacaucuggaccuacaacgccgagcugcuggugcugcuggagaacgagagaacccuggacuaccacgacagcaacgugaagaaccuguacgagaaggugagaagccagcugaagaacaacgccaaggagaucggcaacggcugcuucgaguucuaccacaagugcgacaacaccugcauggagagcgugaagaacggcaccuacgacuaccccaaguacagcgaggaggccaagcugaacagagaggagaucgacggcgugaagcuggagagcaccagaaucuaccagauccuggccaucuacagcaccguggccagcagccuggugcugguggugagccugggcgccaucagcuucuggaugugcagcaacggcagccugcagugcagaaucugcaucuga

SEQ ID NO: 173820 - RNA, 1701 nt, Artificial Sequence; identical to SEQ ID NO: 163893
  derived and/or modified CDS sequence (opt4) from hemagglutinin__InfluenzaA__BAJ40018

SEQ ID NO: 173821 - RNA, 1701 nt, Artificial Sequence; identical to SEQ ID NO: 173808
  derived and/or modified CDS sequence (opt4) from hemagglutinin__InfluenzaA__BAJ40019

SEQ ID NO: 173822 - RNA, 1701 nt, Artificial Sequence; identical to SEQ ID NO: 173808
  derived and/or modified CDS sequence (opt4) from hemagglutinin__InfluenzaA__BAJ40020

SEQ ID NO: 173823 - RNA, 1701 nt, Artificial Sequence
  derived and/or modified CDS sequence (opt4) from hemagglutinin__InfluenzaA__BAJ40021
augaaggccauccugguggugcugcuguacaccuucgccaccgccaacgccgacacccugugcaucggcuaccacgccaacaacagcaccgacaccguggacaccgugcuggagaagaacgugaccgugacccacagcgugaaccugcuggaggacaagcacaacggcaagcugugcaagcugagaggcguggccccccugcaccugggcaagugcaacaucgccggcuggauccugggcaaccccgagugcgagagccugagcaccgccagcagcuggagcuacaucguggagaccagcagcagcgacaacggcaccugcuaccccggcgacuucaucgacuacgaggagcugagagagcagcugagcagcgugagcagcuucgagagauucgagaucuuccccaagaccagcagcuggcccaaccacgacagcaacaagggcgagaccgccgccugcccccacgccggcgccaagagcuucuacaagaaccugaucuggcuggugaagaagggcaacagcuaccccaagcugagcaagagcuacaucaacgacaagggcaaggaggugcuggugcuguggggcauccaccaccccagcaccagcgccgaccagcagagccuguaccagaacgccgacgccuacguguucgugggcaccagcagauacagcaagaaguucaagcccgagaucgccaucagacccaaggugagagaccaggagggcagaaugaacuacuacuggacccugguggagcccggcgacaagaucaccuucgaggccaccggcaaccugguggugcccagauacgccuucgccauggagagaaacgccggcagcggcaucaucaucagcgacacccccgugcacgacugcaacaccaccugccagacccccaagggcgccaucaacaccagccugcccuuccagaacauccaccccaucaccaucggcaagugccccaaguacgugaagagcaccaagcugagacuggccaccggccugagaaacgugcccagcauccagagcagaggccuguucggcgccaucgccggcuucaucgagggcggcuggaccggcaugguggacggcugguacggcuaccaccaccagaacgagcagggcagcggcuacgccgccgaccugaagagcacccagaacgccaucgacaagaucaccaacaaggugaacagcgugaucgagaagaugaacacccaguucaccgccgugggcaaggaguucaaccaccuggagaagagaaucgagaaccugaacaagaagguggacgacggcuuccuggacaucuggaccuacaacgccgagcugcuggugcugcuggagaacgagagaacccuggacuaccacgacagcaacgugaagaaccuguacgagaaggugagaagccagcugaagaacaacgccaaggagaucggcaacggcugcuucgaguucuaccacaagugcgacaacaccugcauggagagcgugaagaacggcaccuacgacuaccccaaguacagcgaggaggccaagcugaacagagaggagaucgacggcgugaagcuggagagcaccagaaucuaccagauccuggccaucuacagcaccguggccagcagccuggugcugguggugagccugggcgccaucagcuucuggaugugcagcaacggcagccugcagugcagaaucugcaucuga

SEQ ID NO: 173824 - RNA, 1701 nt, Artificial Sequence; identical to SEQ ID NO: 163893
  derived and/or modified CDS sequence (opt4) from hemagglutinin__InfluenzaA__BAJ40023

SEQ ID NO: 173825 - RNA, 1701 nt, Artificial Sequence
  derived and/or modified CDS sequence (opt4) from hemagglutinin__InfluenzaA__BAJ40024
augaaggccauccugguggugcugcuguacaccuucgccaccgccaacgccgacacccugugcaucggcuaccacgccaacaacagcaccgacaccguggacaccgugcuggagaagaacgugaccgugacccacagcgugaaccugcuggaggacaagcacaacggcaagcugugcaagcugagaggcguggccccccugcaccugggcaagugcaacaucgccggcuggauccugggcaaccccgagugcgagagccugagcaccgccagcagcuggagcuacaucguggagaccagcagcagcgacaacggcaccugcuaccccggcgacuucaucgacuacgaggagcugagagagcagcugagcagcgugagcagcuucgagagauucgagaucuuccccaagaccagcagcuggcccaaccacgacagcaacaagggcgugaccgccgccugcccccacgccggcgccaagagcuucuacaagaaccugaucuggcuggugaagaagggcaacagcuaccccaagcugagcaagagcuacaucaacgacaagggcaaggaggugcuggugcuguggggcauccaccaccccagcaccagcgccgaccagcagagccuguaccagaacgccgacaccuacguguucgugggcaccagcagauacagcaagaaguucaagcccgagaucgccaucagacccaaggugagagaccaggagggcagaaugaacuacuacuggacccugguggagcccggcgacaagaucaccuucgaggccaccggcaaccugguggugcccagauacgccuucgccauggagagaaacgccggcagcggcaucaucaucagcgacacccccgugcacgacugcaacaccaccugccagacccccaagggcgccaucaacaccagccugcccuuccagaacauccaccccaucaccaucggcaagugccccaaguacgugaagagcaccaagcugagacuggccaccggccugagaaacgugcccagcauccagagcagaggccuguucggcgccaucgccggcuucaucgagggcggcuggaccggcaugguggacggcugguacggcuaccaccaccagaacgagcagggcagcggcuacgccgccgaccugaagagcacccagaacgccaucgacgagaucaccaacaaggugaacagcgugaucgagaagaugaacacccaguucaccgccgugggcaaggaguucaaccaccuggagaagagaaucgagaaccugaacaagaagguggacgacggcuuccuggacaucuggaccuacaacgccgagcugcuggugcugcuggagaacgagagaacccuggacuaccacgacagcaacgugaagaaccuguacgagaaggugagaagccagcugaagaacaacgccaaggagaucggcaacggcugcuucgaguucuaccacaagugcgacaacaccugcauggagagcgugaagaacggcaccuacgacuaccccaaguacagcgaggaggccaagcugaacagagagaagaucgacggcgugaagcuggagagcaccagaaucuaccagauccuggccaucuacagcaccguggccagcagccuggugcugguggugagccugggcgccaucagcuucuggaugugcagcaacggcagccugcagugcagaaucugcaucuga

SEQ ID NO: 173826 - RNA, 1701 nt, Artificial Sequence; identical to SEQ ID NO: 173802
  derived and/or modified CDS sequence (opt4) from hemagglutinin__InfluenzaA__BAJ40025

SEQ ID NO: 173827 - RNA, 1701 nt, Artificial Sequence; identical to SEQ ID NO: 163893
  derived and/or modified CDS sequence (opt4) from hemagglutinin__InfluenzaA__BAJ40026

SEQ ID NO: 173828 - RNA, 1701 nt, Artificial Sequence
  derived and/or modified CDS sequence (opt4) from hemagglutinin__InfluenzaA__BAJ40027
augaaggccauccugguggugcugcuguacaccuucgccaccgccaacgccgacacccugugcaucggcuaccacgccaacaacagcaccgacaccguggacaccgugcuggagaagaacgugaccgugacccacagcgugaaccugcuggaggacaagcacaacggcaagcugugcaagcugagaggcguggccccccugcaccugggcaagugcaacaucgccggcuggauccugggcaaccccgagugcgagagccugagcaccgccagcagcuggagcuacaucguggagaccagcagcagcgacaacggcaccugcuaccccggcgacuucaucgacuacgaggagcugagagagcagcugagcagcgugagcagcuucgagagauucgagaucuuccccaagaccagcagcuggcccaaccacgacagcaacaagggcgagaccgccgccugcccccacgccggcgccaagagcuucuacaagaaccugaucuggcuggugaagaagggcaacagcuaccccaagcugagcaagagcuacaucaacgacaagggcaaggaggugcuggugcuguggggcauccaccaccccagcaccagcgccgaccagcagagccuguaccagaacgccgacgccuacguguucgugggcaccagcagauacagcaagaaguucaagcccgagaucgccaucagacccaaggugagagaccaggagggcagaaugaacuacuacuggacccugguggagcccggcgacaagaucaccuucgaggccaccggcaaccugguggugcccagauacgccuucgccauggagagaaacgccggcagcggcaucaucaucagcgacacccccgugcacgacugcaacaccaccugccagacccccaagggcgccaucaacaccagccugcccuuccagaacauccaccccaucaccaucggcaagugccccaaguacgugaagagcaccaagcugagacuggccaccggccugagaaacgugcccagcauccagagcagaggccuguucggcgccaucgccggcuucaucgagggcggcuggaccggcaugguggacggcugguacggcuaccaccaccagaacgagcagggcagcggcuacgccgccgaccugaagagcacccagaacgccaucgacaagaucaccaacaaggugaacagcgugaucgagaagaugaacacccaguucaccgccgugggcaaggaguucaaccaccuggagaagagaaucgagaaccugaacaagaagguggacgacggcuuccuggacaucuggaccuacaacgccgagcugcuggugcugcuggagaacgagagaacccuggacuaccacgacagcaacgugaagaaccuguacgagaaggugaagagccagcugaagaacaacgccaaggagaucggcaacggcugcuucgaguucuaccacaagugcgacaacaccugcauggagagcgugaagaacggcaccuacgacuaccccaaguacagcgaggaggccaagcugaacagagaggagaucgacggcgugaagcuggagagcaccagaaucuaccagauccuggccaucuacagcaccguggccagcagccuggugcugguggugagccugggcgccaucagcuucuggaugugcagcaacggcagccugcagugcagaaucugcaucuga

SEQ ID NO: 173829 - RNA, 1701 nt, Artificial Sequence
  derived and/or modified CDS sequence (opt4) from hemagglutinin__InfluenzaA__BAJ40028
augaaggccauccugguggugcugcuguacaccuucgccaccgccaacgccgacacccugugcaucggcuaccacgccaacaacagcaccgacaccguggacaccgugcuggagaagaacgugaccgugacccacagcgugaaccugcuggaggacaagcacaacggcaagcugugcaagcugagaggcguggccccccugcaccugggcaagugcaacaucgccggcuggauccugggcaaccccgagugcgagagccugagcaccgccagcagcuggagcuacaucguggagaccagcagcagcgacaacggcaccugcuaccccggcgacuucaucgacuacgaggagcugagagagcagcugagcagcgugagcagcuucgagagauucgagaucuuccccaagaccagcagcuggcccaaccacgacagcaacaagggcgugaccgccgccugcccccacgccggcgccaagagcuucuacaagaaccugaucuggcuggugaagaagggcaacagcuaccccaagcugagcaagagcuacaucaacgacaagggcaaggaggugcuggugcuguggggcauccaccaccccagcaccagcgccgaccagcagagccuguaccagaacgccgacgccuacguguucgugggcaccagcagauacagcaagaaguucaagcccgagaucgccaucagacccaaggugagagaccaggagggcagaaugaacuacuacuggacccugguggagcccggcgacaagaucaccuucgaggccaccggcaaccugguggugcccagauacgccuucgccauggagagaaacgccggcagcggcaucaucaucagcgacacccccgugcacgacugcaacaccaccugccagacccccaagggcgccaucaacaccagccugcccuuccagaacauccaccccaucaccaucggcaagugccccaaguacgugaagagcaccaagcugagacuggccaccggccugagaaacgugcccagcauccagagcagaggccuguucggcgccaucgccgccuucaucgagggcggcuggaccggcaugguggacggcugguacggcuaccaccaccagaacgagcagggcagcggcuacgccgccgaccugaagagcacccagaacgccaucgacaagaucaccaacaaggugaacagcgugaucgagaagaugaacacccaguucaccgccgugggcaaggaguucaaccaccuggagaagagaaucgagaaccugaacaagaagguggacgacggcuuccuggacaucuggaccuacaacgccgagcugcuggugcugcuggagaacgagagaacccuggacuaccacgacagcaacgugaagaaccuguacgagaaggugagaagccagcugaagaacaacgccaaggagaucggcaacggcugcuucgaguucuaccacaagugcgacaacaccugcauggagagcgugaagaacggcaccuacgacuaccccaaguacagcgaggaggccaagcugaacagagaggagaucgacggcgugaagcuggagagcaccagaaucuaccagauccuggccaucuacagcaccguggccagcagccuggugcugguggugagccugggcgccaucagcuucuggaugugcagcaacggcagccugcagugcagaaucugcaucuga

SEQ ID NO: 173830 - RNA, 1701 nt, Artificial Sequence; identical to SEQ ID NO: 173802
  derived and/or modified CDS sequence (opt4) from hemagglutinin__InfluenzaA__BAJ40029

SEQ ID NO: 173831 - RNA, 1701 nt, Artificial Sequence
  derived and/or modified CDS sequence (opt4) from hemagglutinin__InfluenzaA__BAJ40030
augaaggccauccugguggugcugcuguacaccuucgccaccgccaacgccgacacccugugcaucggcuaccacgccaacaacagcaccgacaccguggacaccgugcuggagaagaacgugaccgugacccacagcgugaaccugcuggaggacaagcacaacggcaagcugugcaagcugagaggcguggccccccugcaccugggcaagugcaacaucgccggcuggauccugggcaaccccgagugcgagagccugagcaccgccagcagcuggagcuacaucguggagaccagcagcagcgacaacggcaccugcuaccccggcgacuucaucgacuacgaggagcugaaggagcagcugagcagcgugagcagcuucgagagauucgagaucuuccccaagaccagcagcuggcccaaccacgacagcaacaagggcgugaccgccgccugcccccacgccggcgccaagagcuucuacaagaaccugaucuggcuggugaagaagggcaacagcuaccccaagcugagcaagagcuacaucaacgacaagggcagagaggugcuggugcuguggggcauccaccaccccagcaccagcgccgaccagcagagccuguaccagaacgccgacaccuacguguucgugggcaccagcagauacagcaagaaguucaagcccgagaucgccaucagacccaaggugagagaccaggagggcagaaugaacuacuacuggacccugguggagcccggcgacaagaucaccuucgaggccaccggcaaccugguggugcccagauacgccuucgccauggagagaaacgccggcagcggcaucaucaucagcgacacccccgugcacgacugcaacaccaccugccagacccccaagggcgccaucaacaccagccugcccuuccagaacauccaccccaucaccaucggcaagugccccaaguacgugaagagcaccaagcugagacuggccaccggccugagaaacgugcccagcauccagagcagaggccuguucggcgccaucgccggcuucaucgagggcggcuggaccggcaugguggacggcugguacggcuaccaccaccagaacgagcagggcagcggcuacgccgccgaccugaagagcacccagaacgccaucgacgagaucaccaacaaggugaacagcgugaucgagaagaugaacacccaguucaccgccgugggcaaggaguucaaccaccuggagaagagaaucgagaaccugaacaagaagguggacgacggcuuccuggacaucuggaccuacaacgccgagcugcuggugcugcuggagaacgagagaacccuggacuaccacgacagcaacgugaagaaccuguacgagaaggugagaagccagcugaagaacaacgccaaggagaucggcaacggcugcuucgaguucuaccacaagugcgacaacaccugcauggagagcgugaagaacggcaccuacgacuaccccaaguacagcgaggaggccaagcugaacagagaggagaucgacggcgugaagcuggagagcaccagaaucuaccagauccuggccaucuacagcaccguggccagcagccuggugcugguggugagccugggcgccaucagcuucuggaugugcagcaacggcagccugcagugcagaaucugcaucuga

SEQ ID NO: 173832 - RNA, 1701 nt, Artificial Sequence; identical to SEQ ID NO: 162729
  derived and/or modified CDS sequence (opt4) from hemagglutinin__InfluenzaA__BAJ40031

SEQ ID NO: 173833 - RNA, 1701 nt, Artificial Sequence; identical to SEQ ID NO: 173802
  derived and/or modified CDS sequence (opt4) from hemagglutinin__InfluenzaA__BAJ40032

SEQ ID NO: 173834 - RNA, 1701 nt, Artificial Sequence; identical to SEQ ID NO: 173831
  derived and/or modified CDS sequence (opt4) from hemagglutinin__InfluenzaA__BAJ40033

SEQ ID NO: 173835 - RNA, 1701 nt, Artificial Sequence
  derived and/or modified CDS sequence (opt4) from hemagglutinin__InfluenzaA__BAJ40034
augaaggccauccugguggugcugcuguacaccuucgccaccgccaacgccgacacccugugcaucggcuaccacgccaacaacagcaccgacaccguggacaccgugcuggagagaaacgugaccgugacccacagcgugaaccugcuggaggacaagcacaacggcaagcugugcaagcugagaggcguggccccccugcaccugggcaagugcaacaucgccggcuggauccugggcaaccccgagugcgagagccugagcaccgccagcagcuggagcuacaucguggagaccagcagcagcgacaacggcaccugcuaccccggcgacuucaucgacuacgaggagcugagagagcagcugagcagcgugagcagcuucgagagauucgagaucuuccccaagaccagcagcuggcccaaccacgacagcaacaagggcgugaccgccgccugcccccacgccggcgccaagagcuucuacaagaaccugaucuggcuggugaagaagggcaacagcuaccccaagcugagcaagagcuacaucaacgacaagggcaaggaggugcuggugcuguggggcauccaccaccccagcaccagcgccgaccagcagagccuguaccagaacgccgacaccuacguguucgugggcaccagcagauacagcaagaaguucaagcccgagaucgccaucagacccaaggugagagaccaggagggcagaaugaacuacuacuggacccugguggagcccggcgacaagaucaccuucgaggccaccggcaaccugguggugcccagauacgccuucgccauggagagaaacgccggcagcggcaucaucaucagcgacacccccgugcacgacugcaacaccaccugccagacccccaagggcgccaucaacaccagccugcccuuccagaacauccaccccaucaccaucggcaagugccccaaguacgugaagagcaccaagcugagacuggccaccggccugagaaacgugcccagcauccagagcagaggccuguucggcgccaucgccggcuucaucgagggcggcuggaccggcaugguggacggcugguacggcuaccaccaccagaacgagcagggcagcggcuacgccgccgaccugaagagcacccagaacgccaucgacgagaucaccaacaaggugaacagcgugaucgagaagaugaacacccaguucaccgccgugggcaaggaguucaaccaccuggagaagagaaucgagaaccugaacaagaagguggacgacggcuuccuggacaucuggaccuacaacgccgagcugcuggugcugcuggagaacgagagaacccuggacuaccacgacagcaacgugaagaaccuguacgagaaggugagaagccagcugaagaacaacgccaaggagaucggcaacggcugcuucgaguucuaccacaagugcgacaacaccugcauggagagcgugaagaacggcaccuacgacuaccccaaguacagcgaggaggccaagcugaacagagagaagaucgacggcgugaagcuggagagcaccagaaucuaccagauccuggccaucuacagcaccguggccagcagccuggugcugguggugagccugggcgccaucagcuucuggaugugcagcaacggcagccugcagugcagaaucugcaucuga

SEQ ID NO: 173836 - RNA, 1701 nt, Artificial Sequence
  derived and/or modified CDS sequence (opt4) from hemagglutinin__InfluenzaA__BAJ40035
augaaggccauccugguggugcugcuguacaccuucgccaccgccaacgccgacacccugugcaucggcuaccacgccaacaacagcaccgacaccguggacaccgugcuggagaagaacgugaccgugacccacagcgugaaccugcuggaggacaagcacaacggcaagcugugcaagcugagaggcguggccccccugcaccugggcaagugcaacaucgccggcuggauccugggcaaccccgagugcgagagccugagcaccgccagcagcuggagcuacaucguggagaccagcagcagcgacaacggcaccugcuaccccggcgacuucaucgacuacgaggagcugagagagcagcugagcagcgugagcagcuucgagagauucgagaucuuccccaagaccagcagcuggcccaaccacgacagcaacaagggcgugaccgccgccugcccccacgccggcgccaagagcuucuacaagaaccugaucuggcuggugaagaagggcaacagcuaccccaagcugagcaagagcuacaucaacgacaagggcaaggaggugcuggugcuguggggcauccaccaccccagcaccagcgccgaccagcagagccuguaccagaacgccgacaccuacguguucgugggcaccagcagauacagcaagaaguucaagcccgagaucgccaucagacccaaggugagagaccaggagggcagaaugaacuacuacuggacccugguggagcccggcgacaagaucaaguucgaggccaccggcaaccugguggugcccagauacgccuucgccauggagagaaacgccggcagcggcaucaucaucagcgacacccccgugcacgacugcaacaccaccugccagacccccaagggcgccaucaacaccagccugcccuuccagaacauccaccccaucaccaucggcaagugccccaaguacgugaagagcaccaagcugagacuggccaccggccugagaaacgugcccagcauccagagcagaggccuguucggcgccaucgccggcuucaucgagggcggcuggaccggcaugguggacggcugguacggcuaccaccaccagaacgagcagggcagcggcuacgccgccgaccugaagagcacccagaacgccaucgacgagaucaccaacaaggugaacagcgugaucgagaagaugaacacccaguucaccgccgugggcaaggaguucaaccaccuggagaagagaaucgagaaccugaacaagaagguggacgacggcuuccuggacaucuggaccuacaacgccgagcugcuggugcugcuggagaacgagagaacccuggacuaccacgacagcaacgugaagaaccuguacgagaaggugagaaaccagcugaagaacaacgccaaggagaucggcaacggcugcuucgaguucuaccacaagugcgacaacaccugcauggagagcgugaagaacggcaccuacgacuaccccaaguacagcgaggaggccaagcugaacagagaggagaucgacggcgugaagcuggagagcaccagaaucuaccagauccuggccaucuacagcaccguggccagcagccuggugcugguggugagccugggcgccaucagcuucuggaugugcagcaacggcagccugcagugcagaaucugcaucuga

SEQ ID NO: 173837 - RNA, 1701 nt, Artificial Sequence
  derived and/or modified CDS sequence (opt4) from hemagglutinin__InfluenzaA__BAJ40036
augaaggccauccugguggugcugaucuacaccuucgccaccgccaacgccgacacccugugcaucggcuaccacgccaacaacagcaccgacaccguggacaccgugcuggagaagaacgugaccgugacccacagcgugaaccugcuggaggacaagcacaacggcaagcugugcaagcugagaggcguggccccccugcaccugggcaagugcaacaucgccggcuggauccugggcaaccccgagugcgagagccugagcaccgccagcagcuggagcuacaucguggagaccagcagcagcgacaacggcaccugcuaccccggcgacuucaucgacuacgaggagcugagagagcagcugagcagcgugagcagcuucgagagauucgagaucuuccccaagaccagcagcuggcccaaccacgacagcaacaagggcgugaccgccgccugcccccacgccggcgccaagagcuucuacaagaaccugaucuggcuggugaagaagggcaacagcuaccccaagcugagcaagagcuacaucaacgacaagggcaaggaggugcuggugcuguggggcauccaccaccccagcaccagcgccgaccagcagagccuguaccagaacgccgacgccuacguguucgugggcaccagcagauacagcaagaaguucaagcccgagaucgccaucagacccaaggugagagaccaggagggcagaaugaacuacuacuggaccaucguggagcccggcgacaagaucaccuucgaggccaccggcaaccugguggugcccagauacgccuucgccauggagagaaacgccggcagcggcaucaucaucagcgacacccccgugcacgacugcaacaccaccugccagacccccaagggcgccaucaacaccagccugcccuuccagaacauccaccccaucaccaucggcaagugccccaaguacgugaagagcaccaagcugagacuggccaccggccugagaaacgugcccagcauccagagcagaggccuguucggcgccaucgccggcuucaucgagggcggcuggaccggcaugguggacggcugguacggcuaccaccaccagaacgagcagggcagcggcuacgccgccgaccugaagagcacccagaacgccaucgacgagaucaccaacaaggugaacagcgugaucgagaagaugaacacccaguucaccgccgugggcaaggaguucaaccaccuggagaagagaaucgagaaccugaacaagaagguggacgacggcuuccuggacaucuggaccuacaacgccgagcugcuggugcugcuggagaacgagagaacccuggacuaccacgacagcaacgugaagaaccuguacgagaaggugaagagccagcugaagaacaacgccaaggagaucggcaacggcugcuucgaguucuaccacaagugcgacaacaccugcauggagagcgugaagaacggcaccuacgacuaccccaaguacagcgaggaggccaagcugaacagagaggagaucgacggcgugaagcuggagagcaccagaaucuaccagauccuggccaucuacagcaccguggccagcagccuggugcugguggugagccugggcgccaucagcuucuggaugugcagcaacggcagccugcagugcagaaucugcaucuga

SEQ ID NO: 173838 - RNA, 1701 nt, Artificial Sequence; identical to SEQ ID NO: 169332
  derived and/or modified CDS sequence (opt4) from hemagglutinin__InfluenzaA__BAJ40037

SEQ ID NO: 173839 - RNA, 1701 nt, Artificial Sequence
  derived and/or modified CDS sequence (opt4) from hemagglutinin__InfluenzaA__BAJ40038
augaaggccauccugcuggugcugcuguacaccuucgccaccgccaacgccgacacccugugcaucggcuaccacgccaacaacagcaccgacaccguggacaccgugcuggagaagaacgugaccgugacccacagcgugaaccugcuggaggacaagcacaacggcaagcugugcaagcugagaggcguggccccccugcaccugggcaagugcaacaucgccggcuggauccugggcaaccccgagugcgagagccugagcaccgccagcagcuggagcuacaucguggagaccagcagcagcgacaacggcaccugcuaccccggcgacuucaucgacuacgaggagcugagagagcagcugagcagcgugagcagcuucgagagauucgagaucuuccccaagaccagcagcuggcccaaccacgacagcaacaagggcgugaccgccgccugcccccacgccggcgccaagagcuucuacaagaaccugaucuggcuggugaagaagggcaacagcuaccccaagcugagcaagagcuacaucaacgacaagggcaaggaggugcuggugcuguggggcauccaccaccccagcaccagcgccgaccagcagagccuguaccagaacgccgacaccuacguguucgugggcaccagcagauacagcaagaaguucaagcccgagaucgccaucagacccaaggugagagaccaggagggcagaaugaacuacuacuggaccaucguggagcccggcgacaagaucaccuucgaggccaccggcaaccugguggugcccagauacgccuucgccauggagagaaacgccggcagcggcaucaucaucagcgacacccccgugcacgacugcaacaccaccugccagacccccaagggcgccaucaacaccagccugcccuuccagaacauccaccccaucaccaucggcaagugccccaaguacgugaagagcaccaagcugagacuggccaccggccugagaaacgugcccagcauccagagcagaggccuguucggcgccaucgccggcuucaucgagggcggcuggaccggcaugguggacggcugguacggcuaccaccaccagaacgagcagggcagcggcuacgccgccgaccugaagagcacccagaacgccaucgacgagaucaccaacaaggugaacagcgugaucgagaagaugaacacccaguucaccgccgugggcaaggaguucaaccaccuggagaagagaaucgagaaccugaacaagaagguggacgacggcuuccuggacaucuggaccuacaacgccgagcugcuggugcugcuggagaacgagagaacccuggacuaccacgacagcaacgugaagaaccuguacgagaaggugagaagccagcugaagaacaacgccaaggagaucggcaacggcugcuucgaguucuaccacaagugcgacaacaccugcauggagagcgugaagaacggcaccuacgacuaccccaaguacagcgaggaggccaagcugaacagagaggagaucgacggcgugaagcuggagagcaccagaaucuaccagauccuggccaucuacagcaccguggccagcagccuggugcugguggugagccugggcgccaucagcuucuggaugugcagcaacggcagccugcagugcagaaucugcaucuga

SEQ ID NO: 173840 - RNA, 1701 nt, Artificial Sequence; identical to SEQ ID NO: 162729
  derived and/or modified CDS sequence (opt4) from hemagglutinin__InfluenzaA__BAJ40039

SEQ ID NO: 173841 - RNA, 1701 nt, Artificial Sequence
  derived and/or modified CDS sequence (opt4) from hemagglutinin__InfluenzaA__BAJ40040
augaaggccauccugguggugcugcuguacaccuucgccaccgccaacgccgacacccugugcaucggcuaccacgccaacaacagcaccgacaccguggacaccgugcuggagaagaacgugaccgugacccacagcgugaaccugcuggaggacaagcacaacggcaagcugugcaagcugagaggcguggccccccugcaccugggcaagugcaacaucgccggcuggauccugggcaaccccgagugcgagagccugagcaccgccagcagcuggagcuacaucguggagaccagcagcagcgacaacggcaccugcuaccccggcgacuucaucgacuacgaggagcugagagagcagcugagcagcgugagcagcuucgagagauucgagaucuuccccaagaccagcagcuggcccaaccacgacagcaacaagggcgugaccgccgccugcccccacgccggcgccaagagcuucuacaagaaccugaucuggcuggugaagaagggcaacagcuaccccaagcugagcaagagcuacaucaacgacaagggcagagaggugcuggugcuguggggcauccaccaccccagcaccagcgccgaccagcagagccuguaccagaacgccgacaccuacguguucgugggcaccagcagauacagcaagaaguucaagcccgagaucgccaucagacccaaggugagagaccaggagggcagaaugaacuacuacuggacccugguggagcccggcgacaagaucaccuucgaggccaccggcaaccugguggugcccagauacgccuucgccauggagagaaacgccggcuacggcaucaucaucagcgacacccccgugcacgacugcaacaccaccugccagacccccaagggcgccaucaacaccagccugcccuuccagaacauccaccccaucaccaucggcaagugccccaaguacgugaagagcaccaagcugagacuggccaccggccugagaaacgugcccagcauccagagcagaggccuguucggcgccaucgccggcuucaucgagggcggcuggaccggcaugguggacggcugguacggcuaccaccaccagaacgagcagggcagcggcuacgccgccgaccugaagagcacccagaacgccaucgacgagaucaccaacaaggugaacagcgugaucgagaagaugaacacccaguucaccgccgugggcaaggaguucaaccaccuggagaagagaaucgagaaccugaacaagaagguggacgacggcuuccuggacaucuggaccuacaacgccgagcugcuggugcugcuggagaacgagagaacccuggacuaccacgacagcaacgugaagaaccuguacgagaaggugagaagccagcugaagaacaacgccaaggagaucggcaacggcugcuucgaguucuaccacaagugcgacaacaccugcauggagagcgugaagaacggcaccuacgacuaccccaaguacagcgaggaggccaagcugaacagagaggagaucgacggcgugaagcuggagagcaccagaaucuaccagauccuggccaucuacagcaccguggccagcagccuggugcugguggugagccugggcgccaucagcuucuggaugugcagcaacggcagccugcagugcagaaucugcaucuga

SEQ ID NO: 173842 - RNA, 1701 nt, Artificial Sequence; identical to SEQ ID NO: 169332
  derived and/or modified CDS sequence (opt4) from hemagglutinin__InfluenzaA__BAJ40041

SEQ ID NO: 173843 - RNA, 1701 nt, Artificial Sequence
  derived and/or modified CDS sequence (opt4) from hemagglutinin__InfluenzaA__BAJ40042
augaaggccauccugguggugcugcuguacaccuucgccaccgccaacgccgacacccugugcaucggcuaccacgccaacaacagcaccgacaccguggacaccgugcuggagaagaacgugaccgugacccacagcgugaaccugcuggaggacaagcacaacggcaagcugugcaagcugagaggcguggccccccugcaccugggcaagugcaacaucgccggcuggauccugggcaaccccgagugcgagagccugagcaccgccagcagcuggagcuacaucguggagaccagcagcagcgacaacggcaccugcuaccccggcgacuucaucgacuacgaggagcugaaggagccccugagcagcgugagcagcuucgagagauucgagaucuuccccaagaccagcagcuggcccaaccacgacagcaacaagggcgugaccgccgccugcccccacgccggcgccaagagcuucuacaagaaccugaucuggcuggugaagaagggcaacagcuaccccaagcugagcaagagcuacaucaacgacaagggcagagaggugcuggugcuguggggcauccaccaccccagcaccagcgccgacagacagagccuguaccagaacgccgacaccuacguguucgugggcaccagcagauacagcaagaaguucaagcccgagaucgccaucagacccaaggugagagaccaggagggcagaaugaacuacuacuggacccugguggagcccggcgacaagaucaccuucgaggccaccggcaaccugguggugcccagauacgccuucgccauggagagaaacgccggcagcggcaucaucaucagcgacacccccgugcacgacugcaacaccaccugccagacccccaagggcgccaucaacaccagccugcccuuccagaacauccaccccaucaccaucggcaagugccccaaguacgugaagagcaccaagcugagacuggccaccggccugagaaacgugcccagcauccagagcagaggccuguucggcgccaucgccggcuucaucgagggcggcuggaccggcaugguggacggcugguacggcuaccaccaccagaacgagcagggcagcggcuacgccgccgaccugaagagcacccagaacgccaucgacgagaucaccaacaaggugaacagcgugaucgagaagaugaacacccaguucaccgccgugggcaaggaguucaaccaccuggagaagagaaucgagaaccugaacaagaagguggacgacggcuuccuggacaucuggaccuacaacgccgagcugcuggugcugcuggagaacgagagaacccuggacuaccacgacagcaacgugaagaaccuguacgagaaggugagaagccagcugaagaacaacgccaaggagaucggcaacggcugcuucgaguucuaccacaagugcgacaacaccugcauggagagcgugaagaacggcaccuacgacuaccccaaguacagcgaggaggccaagcugaacagagaggagaucgacggcgugaagcuggagagcaccagaaucuaccagauccuggccaucuacagcaccguggccagcagccuggugcugguggugagccugggcgccaucagcuucuggaugugcagcaacggcagccugcagugcagaaucugcaucuga

SEQ ID NO: 173844 - RNA, 1701 nt, Artificial Sequence; identical to SEQ ID NO: 169332
  derived and/or modified CDS sequence (opt4) from hemagglutinin__InfluenzaA__BAJ40043

SEQ ID NO: 173845 - RNA, 1701 nt, Artificial Sequence
  derived and/or modified CDS sequence (opt4) from hemagglutinin__InfluenzaA__BAJ40044
augaaggccauccugguggugcugcuguacaccuucgccaccgccaacgccgacacccugugcaucggcuaccacgccaacaacagcaccgacaccguggacaccgugcuggagaagaacgugaccgugacccacagcgugaaccugcuggaggacaagcacaacggcaagcugugcaagcugagaggcguggccccccugcaccugggcaagugcaacaucgccggcuggauccugggcaaccccgagugcgagagccugagcaccgccagcagcuggagcuacaucguggagaccagcagcagcgacaacggcaccugcuaccccggcgacuucaucgacuacgaggagcagaaggagcagcugagcagcgugagcagcuucgagagauucgagaucuuccccaagaccagcagcuggcccaaccacgacagcaacaagggcgugaccgccgccugcccccacgccggcgccaagagcuucuacaagaaccugaucuggcuggugaagaagggcaacagcuaccccaagcugagcaagagcuacaucaacgacaagggcaaggaggugcuggugcuguggggcauccaccaccccagcaccagcgccgaccagcagagccuguaccagaacgccgacgccuacguguucgugggcaccagcagauacagcaagaaguucaagcccgagaucgccaucagacccaaggugagagaccaggagggcagaaugaacuacuacuggacccugguggagcccggcgacaagaucaccuucgaggccaccggcaaccugguggugcccagauacgccuucgccauggagaucaacgccggcagcggcaucaucaucagcgacacccccgugcacgacugcaacaccaccugccagacccccaagggcgccaucaacaccagccugcccuuccagaacauccaccccaucaccaucggcaagugccccaaguacgugaagagcaccaagcugagacuggccaccggccugagaaacgugcccagcauccagagcagaggccuguucggcgccaucgccggcuucaucgagggcggcuggaccggcaugguggacggcugguacggcuaccaccaccagaacgagcagggcagcggcuacgccgccgaccugaagagcacccagaacgccaucgacaagaucaccaacaaggugaacagcgugaucgagaagaugaacacccaguucaccgccgugggcaaggaguucaaccaccuggagaagagaaucgagaaccugaacaagaagguggacgacggcuuccuggacaucuggaccuacaacgccgagcugcuggugcugcuggagaacgagagaacccuggacuaccacgacagcaacgugaagaaccuguacgagaaggugagaagccagcugaagaacaacgccaaggagaucggcaacggcugcuucgaguucuaccacaagugcgacaacaccugcauggagagcgugaagaacggcaccuacgacuaccccaaguacagcgaggaggccaagcugaacagagaggagaucgacggcgugaagcuggagagcaccagaaucuaccagauccuggccaucuacagcaccguggccagcagccuggugcugguggugagccugggcgccaucagcuucuggaugugcagcaacggcagccugcagugcagaaucugcaucuga

SEQ ID NO: 173846 - RNA, 1701 nt, Artificial Sequence; identical to SEQ ID NO: 173808
  derived and/or modified CDS sequence (opt4) from hemagglutinin__InfluenzaA__BAJ40045

SEQ ID NO: 173847 - RNA, 1701 nt, Artificial Sequence
  derived and/or modified CDS sequence (opt4) from hemagglutinin__InfluenzaA__BAJ40046
augaaggccauccugguggugcugcuguacaccuucgccaccgccaacgccgacacccugugcaucggcuaccacgccaacaacagcaccgacaccguggacaccgugcuggagaagaacgugaccgugacccacagcgugaaccugcuggaggacaagcacaacggcaagcugugcaagcugagaggcguggccccccugcaccugggcagaugcaacaucgccggcuggauccugggcaaccccgagugcgagagccugagcaccgccagcagcuggagcuacaucguggagaccagcaucagcgacaacggcaccugcuaccccggcgacuucaucgacuacgaggagcugaaggagcagcugagcagcgugagcagcuucgagagauucgagaucuuccccaagaccagcagcuggcccaaccacgacagcaacaagggcgugaccgccgccugcccccacgccggcgccaagagcuucuacaagaaccugaucuggcuggugaagaagggcaacagcuaccccaagcugagcaagagcuacaucaacgacaagggcaaggaggugcuggugcuguggggcauccaccaccccagcaccagcgccgaccagcagagccuguaccagaacgccgacgccuacguguucgugggcaccagcagauacagcaagaaguucaagcccgagaucgccaucagacccaaggugagagaccaggagggcagaaugaacuacuacuggacccugguggagcccggcgacaagaucaccuucgaggccaccggcaaccugguggugcccagauacgccuucgccauggagagaaacgccggcagcggcaucaucaucagcgacacccccgugcacgacugcaacaccaccugccagacccccaagggcgccaucaacaccagccugcccuuccagaacauccaccccaucaccaucggcaagugccccaaguacgugaagagcaccaagcugagacuggccaccggccugagaaacgugcccagcauccagagcagaggccuguucggcgccaucgccggcuucaucgagggcggcuggaccggcaugguggacggcugguacggcuaccaccaccagaacgagcagggcagcggcuacgccgccgaccugaagagcacccagaacgccaucgacaagaucaccaacaaggugaacagcgugaucgagaagaugaacacccaguucaccgccgugggcaaggaguucaaccaccuggagaagaagaucgagaaccugaacaagaagguggacgacggcuuccuggacaucuggaccuacaacgccaagcugcuggugcugcuggagaacgagagaacccuggacuaccacgacagcaacgugaagaaccuguacgagaaggugagaagccagcugaagaacaacgccaaggagaucggcaacggcugcuucgaguucuaccacaagugcgacaacaccugcauggagagcgugaagaacggcaccuacgacuaccccaaguacagcgaggaggccaagcugaacagagaggagaucgacggcgugaagcuggagagcaccagaaucuaccagauccuggccaucuacagcaccguggccagcagccuggugcugguggugagccugggcgccaucagcuucuggaugugcagcaacggcagccugcagugcagaaucugcaucuga

SEQ ID NO: 173848 - RNA, 1701 nt, Artificial Sequence; identical to SEQ ID NO: 173831
  derived and/or modified CDS sequence (opt4) from hemagglutinin__InfluenzaA__BAJ40047

SEQ ID NO: 173849 - RNA, 1701 nt, Artificial Sequence; identical to SEQ ID NO: 173802
  derived and/or modified CDS sequence (opt4) from hemagglutinin__InfluenzaA__BAJ40048

SEQ ID NO: 173850 - RNA, 1701 nt, Artificial Sequence
  derived and/or modified CDS sequence (opt4) from hemagglutinin__InfluenzaA__BAJ40050
augaaggccauccugguggugcugcuguacaccuucgccaccgccaacgccgacacccugugcaucggcuaccacgccaacaacagcaccgacaccguggacaccgugcuggagaagaacgugaccgugacccacagcgugaaccugcuggaggacaagcacaacggcaagcugugcaagcugagaggcguggccccccugcaccugggcaagugcaacaucgccggcuggauccugggcaaccccgagugcgagagccugagcaccgccagcagcuggagcuacaucguggagaccagcagcagcgacaacggcaccugcuaccccggcgacuucaucgacuacgaggagcugaaggagcagcugagcagcgugagcagcuucgagagauucgagaucuuccccaagaccagcagcuggcccaaccacgacagcaacaagggcgugaccgccgccugcccccacgccggcgccaagagcuucuacaagaaccugaucuggcuggugaagaagggcaacagcuaccccaagcugagcaagagcuacaucaacgacaagggcaaggaggugcuggugcuguggggcauccaccaccccagcaccagcgccgaccagcagagccuguaccagaacgccgacgccuacguguucgugggcaccagcagauacagcaagaaguucaagcccgagaucgccaucagacccaaggugagagaccaggagggcagaaugaacuacuacuggacccugguggagcccggcgacaagaucaccuucgaggccaccggcaaccugguggugcccagauacgccuucgccauggagagaaacgccggcagcggcaucaucaucagcgacacccccgugcacgacugcaacaccaccugccagacccccaagggcgccaucaacaccagccugcccuuccagaacauccaccccaucaccaucggcaagugccccaaguacgugaagagcaccaagcugagacuggccaccggccugagaaacgugcccagcauccagagcagaggccuguucggcgccaucgccggcuucaucgagggcggcuggaccggcaugguggacggcugguacggcuaccaccaccagaacgagcagggcagcggcuacgccgccgaccugaagagcacccagaacgccaucgacaagaucaccaacaaggugaacagcgugaucgagaagaugaacacccaguucaccgccgugggcaaggaguucaaccaccuggagaagagaaucgagaaccugaacaagaagguggacgacggcuuccuggacaucuggaccuacaacgccgagcugcuggugcugcuggagaacgagagaacccuggacuaccacgacagcaacgugaagaaccuguacgagaaggugagaagccagcugaagaacaacgccaaggagaucggcaacggcugcuucgaguucuaccacaagugcgacaacaccugcauggagagcgugaagaacggcaccuacgacuaccccaaguacagcgaggaggccaagcugaacagagaggagaucgacggcgugaagcuggagagcaccagaaucuaccagauccuggccaucuacagcaccguggccagcagccuggugcugguggugagccugggcgccaucagcuucuggaugugcagcaacggcagccugcagugcagaaucugcaucuga

SEQ ID NO: 173851 - RNA, 1701 nt, Artificial Sequence; identical to SEQ ID NO: 163893
  derived and/or modified CDS sequence (opt4) from hemagglutinin__InfluenzaA__BAJ40051

SEQ ID NO: 173852 - RNA, 1701 nt, Artificial Sequence
  derived and/or modified CDS sequence (opt4) from hemagglutinin__InfluenzaA__BAJ40052
augaaggccauccugguggugcugcuguacaccuucgccaccgccaacgccgacacccugugcaucggcuaccacgccaacaacagcaccgacaccguggacaccgugcuggagaagaacgugaccgugacccacagcgugaaccugcuggaggacaagcacaacggcaagcugugcaagcugagaggcguggccccccugcaccugggcaagugcaacaucgccggcuggauccugggcaaccccgagugcgagagccugagcaccgccagcagcuggagcuacaucguggagaccagcagcagcgacaacggcaccugcuaccccggcgacuucaucgacuacgaggagcugagagagcagcugagcagcgugagcagcuucgagagauucgagaucuuccccaagaccagcagcuggcccaaccacgacagcaacaagggcgugaccgccgccugcccccacgccggcgccaagagcuucuacaagaaccugaucuggcuggugaagaagggcaacagcuaccccaagcugagcaagagcuacaucaacgacaagggcagagaggugcuggugcuguggggcauccaccaccccagcaccaccgccgaccagcagagccuguaccagaacgccgacaccuacguguucgugggcaccagcagauacagcaagaaguucaagcccgagaucgccaucagacccaaggugagagaccaggagggcagaaugaacuacuacuggacccugguggagcccggcgacaagaucaccuucgaggccaccggcaaccugguggugcccagauacgccuucgccauggagagaaacgccggcagcggcaucaucaucagcgacacccccgugcacgacugcaacaccaccugccagacccccaagggcgccaucaacaccagccugcccuuccagaacauccaccccaucaccaucggcaagugccccaaguacgugaagagcaccaagcugagacuggccaccggccugagaaacgugcccagcauccagagcagaggccuguucggcgccaucgccggcuucaucgagggcggcuggaccggcaugguggacggcugguacggcuaccaccaccagaacgagcagggcagcggcuacgccgccgaccugaagagcacccagaacgccaucgacgagaucaccaacaaggugaacagcgugaucgagaagaugaacacccaguucaccgccgugggcaaggaguucaaccaccuggagaagagaaucgagaaccugaacaagaagguggacgacggcuuccuggacaucuggaccuacaacgccgagcugcuggugcugcuggagaacgagagaacccuggacuaccacgacagcaacgugaagaaccuguacgagaaggugagaagccagcugaagaacaacgccaaggagaucggcaacggcugcuucgaguucuaccacaagugcgacaacaccugcauggagagcgugaagaacggcaccuacgacuaccccaaguacagcgaggaggccaagcugaacagagaggagaucgacggcgugaagcuggagagcaccagaaucuaccagauccuggccaucuacagcaccguggccagcagccuggugcugguggugagccugggcgccaucagcuucuggaugugcagcaacggcagccugcagugcagaaucugcaucuga

SEQ ID NO: 173853 - RNA, 1701 nt, Artificial Sequence
  derived and/or modified CDS sequence (opt4) from hemagglutinin__InfluenzaA__BAJ40053
augaaggccauccugguggugcugcuguacaccuucgccaccgccaacgccgacacccugugcaucggcuaccacgccaacaacagcaccgacaccguggacaccgugcuggagaagaacgugaccgugacccacagcgugaaccugcuggaggacaagcacaacggcaagcugugcaagcugagaggcguggccccccugcaccugggcaagugcaacaucgccggcuggauccugggcaaccccgagugcgagagccugagcaccgccagcagcuggagcuacaucguggagaccagcagcagcgacaacggcaccugcuaccccggcgacuucaucgacuacgaggagcugagagagcagcugagcagcgugagcagcuucgagagauucgagaucuuccccaagaccagcagcuggcccaaccacgacagcaacaagggcgugaccgccgccugcccccacgccggcgccaagagcuucuacaagaaccugaucuggcuggugaagaagggcaacagcuaccccaagcugagcaagagcuacaucaacgacaagggcaaggaggugcuggugcuguggggcauccaccaccccagcaccagcgccgaccagcagagccuguaccagaacgccgacaccuacguguucgugggcaccagcagauacagcaagaaguucaagcccgagaucgccaucagacccaaggugagagaccaggagggcagaaugaacuacuacuggacccugguggagcccggcgacaagaucaccuucgaggccaccggcaaccugguggugcccagauacgccuucgccauggagagaaacgccggcagcggcaucaucaucagcgacacccccgugcacgacugcaacaccaccugccagacccccaagggcgccaucaacaccagccugcccuuccagaacauccaccccaucaccaucggcaagugccccaaguacgugaagagcaccaagcugagacuggccaccggccugagaaacgugcccagcauccagagcagaggccuguucggcgccaucgccggcuucaucgagggcggcuggaccggcaugguggacggcugguacggcuaccaccaccagaacgagcagggcagcggcuacgccgccgaccugaagagcacccagaacgccaucgacgagaucaccaacaaggugaacagcgugaucgagaagaugaacacccaguucaccgccgugggcaaggaguucaaccaccuggagaagagaaucgagaaccugaacaagaagguggacgacggcuuccuggacaucuggaccuacaacgccgagcugcuggugcugcuggagaacgagagaacccuggacuaccacgacagcaacgugaagaaccuguacgagaaggugagaaaccagcugaagaacaacgccaaggagaucggcaacggcugcuucgaguucuaccacaagugcgacaacaccugcauggagagcgugaagaacggcaccuacgacuaccccaaguacagcgaggaggccaagcugaacagagaggagaucgacggcgugaagcuggagagcaccagaaucuaccagauccuggccaucuacagcaccguggccagcagccuggugcugguggugagccugggcgccaucagcuucuggaugugcagcaacggcagccugcagugcagaaucugcaucuga

SEQ ID NO: 173854 - RNA, 1701 nt, Artificial Sequence; identical to SEQ ID NO: 163893
  derived and/or modified CDS sequence (opt4) from hemagglutinin__InfluenzaA__BAJ40054

SEQ ID NO: 173855 - RNA, 1701 nt, Artificial Sequence
  derived and/or modified CDS sequence (opt4) from hemagglutinin__InfluenzaA__BAJ40055
augaaggccauccugguggugcugcuguacaccuucgccaccgccaacgccgacacccugugcaucggcuaccacgccaacaacagcaccgacaccguggacaccgugcuggagaagaacgugaccgugacccacagcgugaaccugcuggaggacaagcacaacggcaagcugugcaagcugagaggcguggccccccugcaccugggcaagugcaacaucgccggcuggauccugggcaaccccgagugcgagagccugagcaccgccagcagcuggagcuacaucguggagaccagcagcagcgacaacggcaccugcuaccccggcgacuucaucgacuacgaggagcugagagagcagcugagcagcgugagcagcuucgagagauucgagaucuuccccaagaccagcagcuggcccaaccacgacagcaacaagggcgugaccgccgccugcccccacgccggcgccaagagcuucuacaagaaccugaucuggcuggugaagaagggcaacagcuaccccaagcugagcaagagcuacaucaacgacaagggcaaggaggugcuggugcuguggggcauccaccaccccagcaccagcaccgaccagcagagccuguaccagaacgccgacaccuacguguucgugggcaccagcagauacagcaagaaguucaagcccgagaucgccaucagacccaaggugagagaccaggagggcagaaugaacuacuacuggacccugguggagcccggcgacaagaucaccuucgaggccaccggcaaccugguggugcccagauacgccuucgccauggagagaaacgccggcagcggcaucaucaucagcgacacccccgugcacgacugcaacaccaucugccagacccccaagggcgccaucaacaccagccugcccuuccagaacauccaccccaucaccaucggcaagugccccaaguacgugaagagcaccaagcugagacuggccaccggccugagaaacgugcccagcgugcagagcagaggccuguucggcgccaucgccggcuucaucgagggcggcuggaccggcaugguggacggcugguacggcuaccaccaccagaacgagcagggcagcggcuacgccgccgaccugaagagcacccagaacgccaucgacgagaucaccaacaaggugaacagcgugaucgagaagaugaacacccaguucaccgccgugggcaaggaguucaaccaccuggagaagagaaucgagaaccugaacaagaagguggacgacggcuuccuggacaucuggaccuacaacgccgagcugcuggugcugcuggagaacgagagaacccuggacuaccacgacagcaacgugaagaaccuguacgagaaggugagaagccagcugaagaacaacgccaaggagaucggcaacggcugcuucgaguucuaccacaagugcgacaacaccugcauggagagcgugaagaacggcaccuacgacuaccccaaguacagcgaggaggccaagcugaacagagaggagaucgacggcgugaagcuggagagcaccagaaucuaccagauccuggccaucuacagcaccguggccagcagccuggugcugguggugagccugggcgccaucagcuucuggaugugcagcaacggcagccugcagugcagaaucugcaucuga

SEQ ID NO: 173856 - RNA, 1701 nt, Artificial Sequence
  derived and/or modified CDS sequence (opt4) from hemagglutinin__InfluenzaA__BAJ40056
augaaggccauccugguggugcugcuguacaccuucgccaccgccaacgccgacacccugugcaucggcuaccacgccaacaacagcaccgacaccguggacaccgugcuggagaagaacgugaccgugacccacagcgugaaccugcuggaggacaagcacaacggcaagcugugcaagcugagaggcguggccccccugcaccugggcaagugcaacaucgccggcuggauccugggcaaccccgagugcgagcugcugagcaccgccagcagcuggagcuacaucguggagaccagcagcagcgacaacggcaccugcuaccccggcgacuucaucgacuacgaggagcugagagagcagcugagcagcgugagcagcuucgagagauucgagaucuuccccaagaccagcagcuggcccaaccacgacagcaacaagggcgugaccgccgccugcccccacgccggcgccaagagcuucuacaagaaccugaucuggcaggugaagaagggcaacagcuaccccaagcugagcaagagcuacaucaacgacaagggcaaggaggugcuggugcuguggggcauccaccaccccagcaccagcgccgaccagcagagccuguaccagaacgccgacgccuacguguucgugggcaccagcagauacagcaagaaguucaagcccgagaucgccaucagacccaaggugagagaccaggagggcagaaugaacuacuacuggacccugguggagcccggcgacaagaucaccuucgaggccaccggcaaccugguggugcccagacacgccuucgccauggagagaaacgccggcagcggcaucaucaucagcgacacccccgugcacaacugcaacaccaccugccagacccccaagggcgccaucaacaccagccugcccuuccagaacauccaccccaucaccaucggcaagugccccaaguacgugaagagccccaagcugagacuggccaccggccugagaaacgugcccagcauccagagcagaggccuguucggcgccaucgccggcuucaucgagggcggcuggaccggcaugguggacggcugguacggcuaccaccaccagaacgagcagggcagcggcuacgccgccgaccugaagagcacccagaacgccaucgacaagaucaccaacaaggugaacagcgugaucgagaagaugaacacccaguucaccgccgugggcaaggaguucaaccaccuggagaagagaaucgagaaccugaacaagaagguggacgacggcuuccuggacaucuggaccuacaacgccgagcugcuggugcugcuggagaacgagagaacccuggacuaccacgacagcuacgugaagaaccuguacgagaaggugagaagccagcugaagaacaacgccaaggagaucggcaacggcugcuucgaguucuaccacaagugcgacaacaccugcauggagagcgugaagaacggcaccuacgacuaccccaaguacagcgaggaggccaagcugaacagagaggagaucgacggcgugaagcuggagagcaccagaaucuaccagauccuggccaucuacagcaccguggccagcagccuggugcugguggugagccugggcgccaucagcuucuggaugugcagcaacggcagccugcagugcagaaucugcaucuga

SEQ ID NO: 173857 - RNA, 1701 nt, Artificial Sequence
  derived and/or modified CDS sequence (opt4) from hemagglutinin__InfluenzaA__BAJ40057
augaaggccauccugguggugcugcuguacaccuucgccaccgccaacgccgacacccugugcaucggcuaccacgccaacaacagcaccgacaccguggacaccgugcuggagagaaacgugaccgugacccacagcgugaaccugcuggaggacaagcacaacggcaagcugugcaagcugagaggcguggccccccugcaccugggcaagugcaacaucgccggcuggauccugggcaaccccgagugcgagagccugagcaccgccagcagcuggagcuacaucguggagaccagcagcagcgacaacggcaccugcuaccccggcgacuucaucgacuacgaggagcugagagagcagcugagcagcgugagcagcuucgagagauucgagaucuuccccaagaccagcagcuggcccaaccacgacagcaacaagggcgugaccgccgccugcccccacgccggcgccaagagcuucuacaagaaccugaucuggcuggugaagaagggcaacagcuaccccaagcugagcaagagcuacaucaacgacaagggcaaggaggugcuggugcuguggggcauccaccaccccagcaccagcgccgaccagcagagccuguaccagaacgccgacaccuacguguucgugggcaccagcagauacagcaagaaguucaagcccgagaucgccaucagacccaaggugagagaccaggagggcagaaugaacuacuacuggacccugguggagcccggcgacaagaucaccuucgaggccaccggcaaccugguggugcccagauacgccuucgccauggagagaaacgccggcagcggcaucaucaucagcgacacccccgugcacgacugcaacaccaccugccagacccccaagggcgccaucaacaccagccugcccuuccagaacauccaccccaucaccaucggcaagugccccaaguacgugaagagcaccaagcugagacuggccaccggccugagaaacgugcccagcauccagagcagaggccuguucggcgccaucgccggcuucaucgagggcggcuggaccggcaugguggacggcugguacggcuaccaccaccagaacgagcagggcagcggcuacgccgccgaccugaagagcacccagaacgccaucgacgagaucaccaacgaggugaacagcgugaucgagaagaugaacacccaguucaccgccgugggcaaggaguucaaccaccuggagaagagaaucgagaaccugaacaagaagguggacgacggcuuccuggacaucuggaccuacaacgccgagcugcuggugcugcuggagaacgagagaacccuggacuaccacgacagcaacgugaagaaccuguacgagaaggugagaagccagcugaagaacaacgccaaggagaucggcaacggcugcuucgaguucuaccacaagugcgacaacaccugcauggagagcgugaagaacggcaccuacgacuaccccaaguacagcgaggaggccaagcugaacagagaggagaucgacggcgugaagcuggagagcaccagaaucuaccagauccuggccaucuacagcaccguggccagcagccuggugcugguggugagccugggcgccaucagcuucuggaugugcagcaacggcagccugcagugcagaaucugcaucuga

SEQ ID NO: 173858 - RNA, 1701 nt, Artificial Sequence; identical to SEQ ID NO: 169332
  derived and/or modified CDS sequence (opt4) from hemagglutinin__InfluenzaA__BAJ40058

SEQ ID NO: 173859 - RNA, 1701 nt, Artificial Sequence; identical to SEQ ID NO: 173802
  derived and/or modified CDS sequence (opt4) from hemagglutinin__InfluenzaA__BAJ40059

SEQ ID NO: 173860 - RNA, 1701 nt, Artificial Sequence; identical to SEQ ID NO: 163893
  derived and/or modified CDS sequence (opt4) from hemagglutinin__InfluenzaA__BAJ40060

SEQ ID NO: 173861 - RNA, 1701 nt, Artificial Sequence
  derived and/or modified CDS sequence (opt4) from hemagglutinin__InfluenzaA__BAJ40061
augaaggccauccugguggugcugcuguacaccuucgccaccgccaacgccgacacccugugcaucggcuaccacgccaacaacagcaccgacaccguggacaccgugcuggagaagaacgugaccgugacccacagcgugaaccugcuggaggacaagcacaacggcaagcugugcaagcugagaggcguggccccccugcaccugggcaagugcaacaucgccggcuggauccugggcaaccccgagugcgagagccugagcaccgccagcagcuggagcuacaucguggagaccagcagcagcgacaacggcaccugcuaccccggcgacuucaucgacuacgaggagcugagagagcagcugagcagcgugagcagcuucgagagauucgagaucuuccccaaggccagcagcuggcccaaccacgacagcaacaagggcgugaccgccgccugcccccacgccggcgccaagagcuucuacaagaaccugaucuggcuggugaagaagggcaacagcuaccccaagcugagcaagagcuacaucaacgacaagggcaaggaggugcuggugcuguggggcauccaccaccccagcaccagcgccgaccagcagagccuguaccagaacgccgacgccuacguguucgugggcaccagcagauacagcaagaaguucaagcccgagaucgccaucagacccaaggugagagaccaggagggcagaaugaacuacuacuggacccugguggagcccggcgacaagaucaccuucgaggccaccggcaaccugguggugcccagauacgccuucgccauggagagaaacgccggcagcggcaucaucaucagcgacacccccgugcacgacugcaacaccaccugccagacccccaagggcgccaucaacaccagccugcccuuccagaacauccaccccaucaccaucggcaagugccccaaguacgugaagagcaccaagcugagacuggccaccggccugagaaacgugcccagcauccagagcagaggccuguucggcgccaucgccggcuucaucgagggcggcuggaccggcaugguggacggcugguacggcuaccaccaccagaacgagcagggcagcggcuacgccgccgaccugaagagcacccagaacgccaucgacaagaucaccaacaaggugaacagcgugaucgagaagaugaacacccaguucaccgccgugggcaaggaguucaaccaccuggagaagagaaucgagaaccugaacaagaagguggacgacggcuuccuggacaucuggaccuacaacgccgagcugcuggugcugcuggagaacgagagaacccuggacuaccacgacagcaacgugaagaaccuguacgagaaggugagaagccagcugaagaacaacgccaaggagaucggcaacggcugcuucgaguucuaccacaagugcgacaacaccugcauggagagcgugaagaacggcaccuacgacuaccccaaguacagcgaggaggccaagcugaacagagaggagaucgacggcgugaagcuggagagcaccagaaucuaccagauccuggccaucuacagcaccguggccagcagccuggugcugguggugagccugggcgccaucagcuucuggaugugcagcaacggcagccugcagugcagaaucugcaucuga

SEQ ID NO: 173862 - RNA, 1701 nt, Artificial Sequence
  derived and/or modified CDS sequence (opt4) from hemagglutinin__InfluenzaA__BAJ40062
augaaggccauccugguggugcugcuguacaccuucgccaccgccaacgccgacacccugugcaucggcuaccacgccaacaacagcaccgacaccguggacaccgugcuggagaagaacgugaccgugacccacagcgugaaccugcuggaggacaagcacaacggcaagcugugcaagcugagaggcguggccccccugcaccugggcaagugcaacaucgccggcuggauccugggcaaccccgagugcgagagccugagcaccgccagcagcuggagcuacaucguggagaccagcagcagcgacaacggcaccugcuaccccggcgacuucaucgacuacgaggagcugagagagcagcugagcagcgugagcagcuucgagagauucgagaucuuccccaagaccagcagcuggcccaaccacgacagcaacaagggcgugaccgccgccugcccccacgccggcgccaagagcuucuacaagaaccugaucuggcuggugaagaagggcaacagcuaccccaagcugagcaagagcuacaucaacgacaagggcaaggaggugcuggugcuguggggcauccaccaccccagcaccagcgccgaccagcagagccuguaccagaacgccgacaccuacguguucgugggcaccagcagauacagcaagaaguucaagcccgagaucgccaucagacccaaggugagagaccaggagggcagaaugaacuacuacuggacccugguggagcccggcgacaagaucaccuucgaggccaccggcaaccugguggugcccagauacgccuucgccauggagagaaacgccggcagcggcaucaucaucagcgacacccccgugcacgacugcaacaccaccugccagacccccaagggcgccaucaacaccagccugcccuuccagaacauccaccccaucaccaucggcaagugccccaaguacgugaagagcaccaagcugagacuggccaccggccugagaaacgugcccagcauccagagcagaggccuguucggcgccaucgccggcuucaucgagggcggcuggaccggcaugguggacggcugguacggcuaccaccaccagaacgagcagggcagcggcuacgccgccgaccugaagagcacccagaacgccaucgacgagaucaccaacaaggugaacagcgugaucgagaagaugaacacccaguucaccgccgugggcaaggaguucaaccaccuggagaagaagaucgagaaccugaacaagaagguggacgacggcuuccuggacaucuggaccuacaacgccgagcugcuggugcugcuggagaacgagagaacccuggacuaccacgacagcaacgugaagaaccuguacgagaaggugagaagccagcugaagaacaacgccaaggagaucggcaacggcugcuucgaguucuaccacaagugcgacaacaccugcauggagagcgugaagaacggcaccuacgacuaccccaaguacagcgaggaggccaagcugaacagagaggagaucgacggcgugaagcuggagagcaccagaaucuaccagauccuggccaucuacagcaccguggccagcagccuggugcugguggugagccugggcgccaucagcuucuggaugugcagcaacggcagccugcagugcaagaucugcaucuga

SEQ ID NO: 173863 - RNA, 1701 nt, Artificial Sequence; identical to SEQ ID NO: 173861
  derived and/or modified CDS sequence (opt4) from hemagglutinin__InfluenzaA__BAJ40063

SEQ ID NO: 173864 - RNA, 1701 nt, Artificial Sequence; identical to SEQ ID NO: 169332
  derived and/or modified CDS sequence (opt4) from hemagglutinin__InfluenzaA__BAJ40064

SEQ ID NO: 173865 - RNA, 1707 nt, Artificial Sequence
  derived and/or modified CDS sequence (opt4) from hemagglutinin__InfluenzaA__BAK23398
auggagaagaucgugcugcugcuggccaucgugagccuggugaagagcgaccagaucugcaucggcuaccacgccaacaacagcaccgagcagguggacaccaucauggagaagaacgugaccgugacccacgcccaggacauccuggagaagacccacaacggcaagcugugcgaccuggacggcgugaagccccugauccugagagacugcagcguggccggcuggcugcugggcaaccccaugugcgacgaguuccugaacgugcccgaguggagcuacaucguggagaagaucaaccccgugaacgaccugugcuaccccggcaacuucaacgacuacgaggagcugaagcaccugcugagcagaaucaaccacuucgagaagauccagaucuuccccaagagcagcuggagcgaccacgaggccagcagcggcgugagcagcgccugccccuaccagggcagaagcagcuucuucagaaacgugguguggcuggugaagaaggacaacgccuaccccaccaucaagaagagcuacaacaacaccaaccaggaggaccugcugauccuguggggcauccaccaccccaacgacgccgccgagcagaccagacuguaccagaaccccaccaccuacaucagcgugggcaccagcacccugaaccagagacuggugcccaagaucgccaccagaagcaaggugaacggccagagcggcagaaucgaguucuucuggaccauccugaagagcaacgacgugaucaacuucgagagcaacggcaacuucaucgcccccgagaacgccuacaagaucgugaagaagggcgacagcaccaucaugaagagcgagcuggaguacggcaacugcaacaccaagugccagacccccaucggcgccaucaacagcagcaugcccuuccacaacauccacccccugaccaucggcgagugccccaaguacgugaagagcaacagacuggugcuggccaccggccugagaaacagccccagaggcgagagaagaagaaagaagagaggccuguucggcgccaucgccggcuucaucgagggcggcuggcagggcaugguggacggcugguacggcuaccaccacagcaacgagcagggcagcggcuacgccgccgacaaggagagcacccagaaggccaucgacggcgugaccaacaaggugaacagcaucaucgacaagaugaacacccaguucgaggccgugggcagagaguucaacaaccuggagagaagaaucgagaaccugaacaagaagauggaggacggcuuccuggacguguggaccuacaacgccgagcugcuggugcugauggagaacgagagaacccuggacuuccacgacagcaacgugaagaaccuguacgacaaggugagacugcagcugagagacaacgccaaggagcugggcaacggcugcuucgaguucuaccacagaugcgacaacgagugcauggagagcgugaagaacggcaccuacgacuacccccaguacagcgaggaggccagacugaagagagaggagaucagcggcgugaagcuggagagcaucggcaccuaccagauccugagcaucuacagcaccguggccagcagccuggcccuggccaucaugauggccggccuguuccuguggaugugcagcaacggcagccugcagugcagaaucugcaucuga

SEQ ID NO: 173866 - RNA, 1707 nt, Artificial Sequence
  derived and/or modified CDS sequence (opt4) from hemagglutinin__InfluenzaA__BAK23400
auggagaagaucgugcugcugcuggccaucgugagccuggugaagagcgaccagaucugcaucggcuaccacgccaacaacagcaccgagcagguggacaccaucauggagaagaacgugaccgugacccacgcccaggacauccuggagaagacccacaacggcaagcugugcgaccugaacggcgugaagccccugauccugagagacugcagcguggccggcuggcugcugggcaaccccaugugcgacgaguuccugaacgugcccgaguggagcuacaucguggagaagaucaaccccgccaacgaccugugcuaccccggcgacuucaacgacuacgaggagcugaagcaccugcugagcagaaucaaccacuucgagaagauccagaucauccccaagagcagcuggagcgaccacgaggccagcagcggcgugagcagcgccugccccuaccagggcagaagcagcuucuucagaaacgugguguggcugaucaagaaggacaacgccuaccccaccaucaagagaagcuacaacaacaccaaccaggaggaccugcuggugcuguggggcauccaccaccccaacgacgccgccgagcagaccagacuguaccacaaccccaccaccuacaucagcgugggcaccagcacccugaaccagagacuggugcccaagaucgccaccagaagcaaggugaacggccagagcggcagaauggaguucuucuggaccauccugaagcccaacgacgccaucaacuucgagagcaacggcaacuucaucgcccccgagaacgccuacaagaucgugaagaagggcgacagcaccaucaugaagagcgagcuggaguacggcaacugcaacaccaagugccagacccccaucggcgccaucaacagcagcaugcccuuccacaacauccacccccugaccaucggcgagugccccaaguacgugaagagcagcagacuggugcuggccaccggccugagaaacagcccccagggcaagagcagaagaaagaagagaggccuguucggcgccaucgccggcuucaucgagggcggcuggcagggcaugguggacggcugguacggcuaccaccacagcaacgagcagggcagcggcuacgccgccgacaaggagagcacccagagagccaucgacggcgugaccaacaaggugaacagcaucaucgacaagaugaacacccaguucgaggccgugggcagagaguucaacaaccuggagagaagaaucgagaaccugaacaagaagauggaggacggcuuccuggacguguggaccuacaacgccgagcugcuggugcugauggagaacgagagaacccuggacuuccacgacagcaacgugaagaaccuguacgacaaggugagacugcagcugagagacaacgccaaggagcugggcaacggcugcuucgaguucuaccacagaugcgacaacgagugcauggagagcgugagaaacggcaccuacgacuacccccaguacagcgaggaggccagacugaagagagaggagaucagcggcgugaagcuggagagcaucggcaucuaccagauccugagcaucuacagcaccguggccagcagccuggcccuggccaucaugguggccggccuguuccuguggaugugcagcaacggcagccugcagugcagaaucugcaucuga

SEQ ID NO: 173867 - RNA, 1707 nt, Artificial Sequence
  derived and/or modified CDS sequence (opt4) from hemagglutinin__InfluenzaA__BAK23401
auggagaagaucgugcugcugcuggccaucgugagccuggugaagagcgaccagaucugcaucggcuaccacgccaacaacagcaccgagcagguggacaccaucauggagaagaacgugaccgugacccacgcccaggacauccuggagaagacccacaacggcaagcugugcgaccuggacggcgugaagccccugauccugagagacugcagcguggccggcuggcugcugggcaaccccaugugcgacgaguuccugaacgugagcgaguggagcuacaucguggagaagaucaaccccgccaacgaccugugcuaccccggcaacuucaacaacuacgaggagcugaagcaccugcugagcagaaucaacagauucgagaagauccagaucauccccaagagcagcuggcccgaccacgaggccagccugggcgugagcagcgccugccccuaccagggcggccccagcuucuacagaaacgugguguggcugaucaagaagaacaacaccuaccccaucaucaagaagagcuaccacaacaccaaccaggaggaccugcuggugcuguggggcauccaccaccccaacgacgaggaggagcagaccagaaucuacaagaaccccaccaccuacaucagcgugggcaccagcacccugaaccagagacuggugcccaagaucgccaccagaagcaaggugaacggccagagcggcagaguggaguucuucuggaccauccugaagagcaacgacaccaucaacuucgagagcaacggcaacuucaucgcccccgagaacgccuacaagaucgugaagaagggcgacagcaccaucaugaagagcgagcuggaguacggcaacugcaacaccaagugccagacccccaucggcgccaucaacagcagcaugcccuuccacaacauccacccccugaccaucggcgagugccccaaguacgugaagagcaacagacuggugcuggccaccggccugagaaacagcccccagggcgagagaagaagaaagaagagaggccuguucggcgccaucgccggcuucaucgagggcggcuggcagggcaugguggacggcugguacggcuaccaccacagcaacgagcagggcagcggcuacgccgccgacaaggagagcacccagaaggccaucgacggcgugaccaacaaggugaacagcaucaucgacaagaugaacauccaguucgaggccgugggcagagaguucaacaaccuggagagaagaaucgagaaccugaacaagaagauggaggacggcuuccuggacguguggaccuacaacgccgagcugcuggugcugauggagaacgagagaacccuggacuuccacgacagcaacgugaagaaccuguacgacaaggugagacugcagcugagagacaacgccaaggagcugggcaacggcugcuucgaguucuaccacagaugcgacaacgagugcauggagagcgugagaaacggcaccuacgacuacccccaguacagcgaggaggccagacugaagagagaggagaucagcggcgugaagcuggagagcaucggcaccuaccagauccugagcaucuacagcaccguggccagcagccuggcccuggccaucaugguggccggccuguuccuguggaugugcagcaacggcagccugcagugcagaaucugcaucuga

SEQ ID NO: 173868 - RNA, 1707 nt, Artificial Sequence
  derived and/or modified CDS sequence (opt4) from hemagglutinin__InfluenzaA__BAK23402
auggagaagaucgugcugcugcuggccaucgugagccuggugaagagcgaccagaucugcaucggcuaccacgccaacaacagcaccgagcagguggacaccaucauggagaagaacgugaccgugacccacgcccaggacauccuggagaagacccacaacggcaagcugugcgaccuggacggcgugaagccccugauccugagagacugcagcguggccggcuggcugcugggcaaccccaugugcgacgaguuccugaacgugcccgaguggagcuacaucguggagaagaucaaccccgccaacgaccugugcuaccccggcaacuucaacgacuacgaggagcugaagcaccugcugagcagaaucaaccacuucgagaagauccagaucauccccaagagcagcuggagcaaccacgaggccagcagcggcgugagcagcgccugccccuaccagggcagaagcagcuucuucagaaacgugguguggcugaucaagaaggacaacgccuaccccaccaucaagaucagcuacaacaacaccaaccaggaggaccugcuggugcuguggggcauccaccaccccaacgacgccgccgagcagaccagacuguaccagaaccccaccaccuacaucagcgugggcaccagcacccugaaccagagacuggugcccaagaucgccaccagaagcaaggugaacggccagagcggcagaauggaguucuucuggaccauccugaagagcaacgacgccaucaacuucgagagcaacggcaacuucaucgcccccgagaacgccuacaagaucgugaagaagggcgacagcaccaucaugaagagcgagcuggaguacggcaacugcaacaccaagugccagacccccaucggcgccaucaacagcagcaugcccuuccacaacacccacccccugaccaucggcgagugccccaaguacgugaagagcaacagacuggugcuggccaccggccugagaaacagcccccacggcgagagaagaagaaagaagagaggccuguucggcgccaucgccggcuucaucgagggcggcuggcagggcaugguggacggcugguacggcuaccaccacagcaacgagcagggcagcggcuacgccgccgacaaggagagcacccagaaggccaucgacggcgugaccaacaaggugaacagcaucaucgacaagaugaacacccaguucgaggccgugggcagagaguucaacaaccuggagagaagaaucgagaaccugaacaagaagauggaggacggcuuccuggacguguggaccuacaacgccgagcugcuggugcugauggagaacgagagaacccuggacuuccacgacagcaacgugaagaaccuguacgacaaggugagacugcagcugagagacaacgccaaggagcugggcaacggcugcuucgaguucuaccacagaugcgacaacgagugcauggagagcgugagaaacggcaccuacgacuacccccaguacagcgaggaggccagacugaagagagaggagaucagcggcgugaagcuggagagcaucggcaccuaccagauccugagcaucuacagcaccguggccagcagccuggcccuggccaucaugguggccggccuguuccuguggaugugcagcaacggcagccugcagugcagaaucugcaucuga

SEQ ID NO: 173869 - RNA, 1707 nt, Artificial Sequence
  derived and/or modified CDS sequence (opt4) from hemagglutinin__InfluenzaA__BAK23403
auggagaagaucgugcugcugcuggccaucgugagccuggugaagagcgaccagaucugcaucggcuaccacgccaacaacagcaccgagcagguggacaccaucauggagaagaacgugaccgugacccacgcccaggacauccuggagaagacccacaacggcaagcugugcgaccuggacggcgugaagccccugauccugagagacugcagcguggccggcuggcugcugggcaaccccaugugcgacgaguuccugaacgugcccgaguggagcuacaucguggagaagaucaaccccgccaacgaccugugcuaccccggcaacuucaacgacuacgaggagcugaagcaccugcugagcagaaucaaccacuucgagaagauccagaucauccccaagagcagcuggagcaaccacgaggccagcagcggcgugagcagcgccugccccuaccagggcagaagcagcuucuucagaaacgugguguggcugaucaagaaggacaacgccuaccccaccaucaagaucagcuacaacaacaccaaccaggaggaccugcuggugcuguggggcauccaccaccccaacgacgccgccgagcagaccagacuguaccagaaccccaccaccuacaucagcgugggcaccagcacccugaaccagagacuggugcccaagaucgccaccagaagcaaggugaacggccagagcggcagaauggaguucuucuggaccauccugaagagcaacgacgccaucaacuucgagagcaacggcaacuucaucgcccccgagaacgccuacaagaucgugaagaagggcgacagcaccaucaugaagagcgagcuggaguacggcaacugcaacaccaagugccagacccccaucggcgccaucaacagcagcaugcccuuccacaacauccacccccugaccaucggcgagugccccaaguacgugaagagcaacagacuggugcuggccaccggccugagaaacagcccccagggcgagagaagaagaaagaagagaggccuguucggcgccaucgccggcuucaucgagggcggcuggcagggcaugguggacggcugguacggcuaccaccacagcaacgagcagggcagcggcuacgccgccgacaaggagagcacccagaaggccaucgacggcgugaccaacaaggugaacagcaucaucgacaagaugaacacccaguucgaggccgugggcagagaguucaacaaccuggagagaagaaucgagaaccugaacaagaagauggaggacggcuuccuggacguguggaccuacaacgccgagcugcuggugcugauggagaacgagagaacccuggacuuccacgacagcaacgugaagaaccuguacgacaaggugagacugcagcugagagacaacgccaaggagcugggcaacggcugcuucgaguucuaccacagaugcgacaacgagugcauggagagcgugagaaacggcaccuacgacuacccccaguacagcgaggaggccagacugaagagagaggagaucagcggcgugaagcuggagagcaucggcaccuaccagauccugagcaucuacagcaccguggccagcagccuggcccuggccaucaugguggccggccuguuccuguggaugugcagcaacggcagccugcagugcagaaucugcaucuga

SEQ ID NO: 173870 - RNA, 1707 nt, Artificial Sequence
  derived and/or modified CDS sequence (opt4) from hemagglutinin__InfluenzaA__BAK23404
auggagaagaucgugcugcugcuggccaucgugagccuggugaagagcgaccagaucugcaucggcuaccacgccaacaacagcaccgagcagguggacaccaucauggagaagaacgugaccgugacccacgcccaggacauccuggagaagacccacaacggcaagcugugcgaccuggacggcgugaagccccugauccugagagacugcagcguggccggcuggcugcugggcaaccccaugugcgacgaguuccugaacgugcccgaguggagcuacaucguggagaagaucaaccccgccaacgaccugugcuaccccggcaacuucaacgacuacgaggagcugaagcaccugcugagcagaaucaaccacuucgagaagauccagaucauccccaagagcagcuggagcgaccacgaggccagcagcggcgugagcagcgccugccccuaccagggcagaagcagcuucuucagaaacgugguguggcugaucaagaaggacaacgccuaccccaccaucaagagaagcuacaacaacaccaaccaggaggaccugcuggugcuguggggcauccaccaccccaacgacgccgccgagcagaccagacuguaccagaaccccaccaccuacaucagcgugggcaccagcacccugaaccagagacuggugcccaagaucgccaccagaagcaaggugaacggccagagcggcagaauggaguucuucuggaccauccugaagagcaacgacgccaucaacuucgagagcaacggcaacuucaucgcccccgagaacgccuacaagaucgugaagaagggcgacagcaccaucaugaagagcgagcuggaguacggcaacugcaacaccaagugccagacccccaucggcgccaucaacagcagcaugcccuuccacaacauccacccccugaccaucggcgagugccccaaguacgugaagagcaacagacuggugcuggccaccggccugagaaacagcccccagggcgagagaagaagaaagaagagaggccuguucggcgccaucgccggcuucaucgagggcggcuggcagggcaugguggacggcugguacggcuaccaccacagcaacgagcagggcagcggcuacgccgccgacaaggagagcacccagaaggccaucgacggcgugaccaacaaggugaacagcaucaucgacaagaugaacacccaguucgaggccgugggcagagaguucaacaaccuggagagaagaaucgagaaccugaacaagaagauggaggacggcuuccuggacguguggaccuacaacgccgagcugcuggugcugauggagaacgagagaacccuggacuuccacgacagcaacgugaagaaccuguacgacaaggugagacugcagcugagagacaacgccaaggagcugggcaacggcugcuucgaguucuaccacagaugcgacaacgagugcauggagagcgugagaaacggcaccuacgacuacccccaguacagcgaggaggccagacugaagagagaggagaucagcggcgugaagcuggagagcaucggcaccuaccagauccugagcaucuacagcaccguggccagcagccuggcccuggccaucaugguggccggccuguuccuguggaugugcagcaacggcagccugcagugcagaaucugcaucuga

SEQ ID NO: 173871 - RNA, 1707 nt, Artificial Sequence; identical to SEQ ID NO: 173870
  derived and/or modified CDS sequence (opt4) from hemagglutinin__InfluenzaA__BAK23405

SEQ ID NO: 173872 - RNA, 1707 nt, Artificial Sequence
  derived and/or modified CDS sequence (opt4) from hemagglutinin__InfluenzaA__BAK23406
auggagaagaucgugcugcugcuggccaucgugagccuggugaagagcgaccagaucugcaucggcuaccacgccaacaacagcaccgagcagguggacaccaucauggagaagaacgugaccgugacccacgcccaggacauccuggagaagacccacaacggcaagcugugcgaccuggacggcgugaagccccugauccugagagacugcagcguggccggcuggcugcugggcaaccccaugugcgacgaguuccugaacgugcccgaguggagcuacaucguggagaagaucaaccccgugaacgaccugugcuaccccggcaacuucaacgacuacgaggagcugaagcaccugcugagcagaaucaaccacuucgagaagauccagaucuuccccaagagcagcuggagcgaccacgaggccagcagcggcgugagcagcgccugccccuaccagggcagaagcagcuucuucagaaacgugguguggcuggugaagaaggacaacgccuaccccaccaucaagaagagcuacaacaacaccaaccaggaggaccugcugauccuguggggcauccaccaccccaacgacgccgccgagcagaccagacuguaccagaaccccaccaccuacaucagcgugggcaccagcacccugaaccagagacuggugcccaagaucgccaccagaagcaaggugaacggccagagcggcagaaucgaguucuucuggaccauccugaagagcaacgacgugaucaacuucgagagcaacggcaacuucaucgcccccgagaacgccuacaagaucgugaagaagggcgacagcaccaucaugaagagcgagcuggaguacggcaacugcaacaccaagugccagacccccaucggcgccaucaacagcagcaugcccuuccacaacauccacccccugaccaucggcgagugccccaaguacgugaagagcaacagacuggugcuggccaccggccugagaaacagcccccagggcgagagaagaagaaagaagagaggccuguucggcgccaucgccggcuucaucgagggcggcuggcagggcaugguggacggcugguacggcuaccaccacagcaacgagcagggcagcggcuacgccgccgacaaggagagcacccagaaggccaucgacggcgugaccaacaaggugaacagcaucaucgacaagaugaacacccaguucgaggccgugggcagagaguucaacaaccuggagagaagaaucgagaaccugaacaagaagauggaggacggcuuccuggacguguggaccuacaacgccgagcugcuggugcugauggagaacgagagaacccuggacuuccacgacagcaacgugaagaaccuguacgacaaggugagacugcagcugagagacaacgccaaggagcugggcaacggcugcuucgaguucuaccacagaugcgacaacgagugcauggagagcgugaagaacggcaccuacgacuacccccaguacagcgaggaggccagacugaagagagaggagaucagcggcgugaagcuggagagcaucggcaccuaccagauccugagcaucuacagcaccguggccagcagccuggcccuggccaucaugauggccggccuguuccuguggaugugcagcaacggcagccugcagugcagaaucugcaucuga

SEQ ID NO: 173873 - RNA, 1707 nt, Artificial Sequence
  derived and/or modified CDS sequence (opt4) from hemagglutinin__InfluenzaA__BAK23407
auggagaagaucgugcugcugcuggccaucgugagccuggugaagagcggccagaucugcaucggcuaccacgccaacaacagcaccgagcagguggacaccaucauggagaagaacgugaccgugacccacgcccaggacauccuggagaagacccacaacggcaagcugugcgaccuggacggcgugaagccccugauccugagagacugcagcguggccggcuggcugcugggcaaccccaugugcgacgaguuccugaacgugagcgaguggagcuacaucguggagaagaucaaccccgccaacgaccugugcuaccccggcaacuucaacaacuacgaggagcugaagcaccugcugagcagaaucaacagauucgagaagauccagaucauccccaagagcagcuggcccgaccacgaggccagccugggcgugagcgccgccugccccuaccagggcggccccagcuucuacagaaacgugguguggcugaucaagaagaacaacaccuaccccaccaucgagaagagcuaccacaacaccaaccaggaggaccugcuggugcuguggggcauccaccaccccaacgacgaggccgagcagaccagaaucuacaagaaccccaccaccuacaucagcgugggcaccagcacccugaaccagagacuggugcccaagaucgccaccagaagcaaggugaacggccagagcggcagaguggaguucuucuggaccauccugaagagcaacgacaccaucaacuucgagagcaacggcaacuucaucgcccccgagaacgccuacaagaucgugaagaagggcgacagcaccaucaugaagagcgagcuggaguacggcaacugcaacaccagaugccagacccccaucggcgccaucaacagcagcaugcccuuccacaacauccacccccugaccaucggcgagugccccaaguacgugaagagcaacagacuggugcuggccaccggccugagaaacagcccccagggcgagagaagaagaaagaagagaggccuguucggcgccaucgccggcuucaucgagggcggcuggcagggcaugguggacggcugguacggcuaccaccacagcaacgagcagggcagcggcuacgccgccgacaaggagagcacccagaaggccaucgacggcgugaccaacaaggugaacagcaucaucgacaagaugaacacccaguucgaggccgugggcagagaguucaacaaccuggagagaagaaucgagaaccugaacaagaagauggaggacggcuuccuggacguguggaccuacaacgccgagcugcuggugcugauggagaacgagagaacccuggacuuccacgacagcaacgugaagaaccuguacgacaaggugagacugcagcugagagacaacgccaaggagcugggcaacggcugcuucgaguucuaccacagaugcgacaacgagugcauggagagcgugagaaacggcaccuacgacuacccccaguacagcgaggaggccagacugaagagagaggagaucagcggcgugaagcuggagagcaucggcaccuaccagauccugagcaucuacagcaccguggccagcagccuggcccuggccaucaugguggccggccuguuccuguggaugugcagcaacggcagccugcagugcagaaucugcaucuga

SEQ ID NO: 173874 - RNA, 1707 nt, Artificial Sequence
  derived and/or modified CDS sequence (opt4) from hemagglutinin__InfluenzaA__BAK23408
auggagaagaucgugcugcugcuggccaucgugagccuggugaagagcgaccagaucugcaucggcuaccacgccaacaacagcaccgagcagguggacaccaucauggagaagaacgugaccgugacccacgcccaggacauccuggagaagacccacaacggcaagcugugcgaccuggacggcgugaagccccugauccugagagacugcagcguggccggcuggcugcugggcaaccccaugugcgacgaguuccccaacgugagcgaguggagcuacaucguggagaagaucaaccccgccaacgaccugugcuaccccggcaacuucaacaacuacgaggagcugaagcaccugcugagcagaaucaacagauucgagaagauccagaucauccccaagagcagcuggcccgaccacgaggccagccugggcgugagcagcgccugccaguaccagggcggccccagcuucuacagaaacgugguguggcugaucaagaaggacaacgccuaccccaccaucaagaagagcuaccacaacaccaacaaggaggaccugcuggugcuguggggcauccaccaccccaacaacgaggaggagcagaccaagcuguaccagaaccccaccaccuacaucagcgugggcaccagcacccugaaccagagacuggugcccaagaucgccaccagaagcaaggugaacggccagagcggcagaguggaguucuucuggaccauccugaagagcaacgacgccaucaacuucgagagcaacggcaacuucaucgcccccgagaacgccuacaagaucgugaagaagggcgacagcaccaucaugaagagcgagcuggaguacggcaacuacaacaccaagugccagacccccaucggcgccaucaacagcagcaugcccuuccacaacauccacccccugaccaucggcgagugccccaaguacgugaagagcaacagacuggugcuggccaccggccugagaaacagcccccagggcgagagaagaagaaagaagagaggccuguucggcgccaucgccggcuucaucgagggcggcuggcagggcaugguggacggcugguacggcuaccaccacagcaacgagcagggcagcggcuacgccgccgacaaggagagcacccagaaggccaucgacggcgugaccaacaaggugaacagcaucaucgacaagaugaacacccaguucgaggccgugggcaaggaguucaacaaccuggagagaagaaucgagaaccugaacaagaagauggaggacggcuuccuggacguguggaccuacaacgccgagcugcuggugcugauggagaacgagagaacccuggacuuccacgacagcaacgugaagaaccuguacgacaaggugagacugcagcugagagacaacgccaaggagcugggcaacggcugcuucgaguucuaccacagaugcgacaacgagugcauggagagcgugagaaacggcaccuacgacuacccccaguacagcgaggaggccagacugaagagagaggagaucagcggcgugaagcuggagagcaucggcaccuaccagauccugagcaucuacagcaccguggccagcagccuggcccuggccaucaugguggccggccuguuccuguggaugugcagcaacggcagccugcagugcagaaucugcaucuga

SEQ ID NO: 173875 - RNA, 1707 nt, Artificial Sequence
  derived and/or modified CDS sequence (opt4) from hemagglutinin__InfluenzaA__BAK23411
auggagaagaucgugcugcugcuggccaucgugagccuggugaagagcgaccagaucugcaucggcuaccacgccaacaacagcaccgagcagguggacaccaucauggagaagaacgugaccgugacccacgcccaggacauccuggagaagacccacaacggcaagcugugcgaccuggacggcgugaagccccugauccugagagacugcagcguggccggcuggcugcugggcaaccccaugugcgacgaguuccugaacgugagcgaguggagcuacaucguggagaagaucaaccccgccaacgaccugugcuaccccggcaacuucaacaacuacgaggagcugaagcaccugcugagcagaaucaacagauucgagaagauccagaucauccccaagagcagcuggcccgaccacgaggccagccugggcgugagcagcgccugccaguaccagggcggccccagcuucuacagaaacgugguguggcugaucaagaaggacaacgccuaccccaccaucaagaagagcuaccacaacaccaacaaggaggaccugcuggugcuguggggcauccaccaccccaacaacgaggaggagcagaccaagcuguaccagaaccccaccaccuacaucagcgugggcaccagcacccugaaccagagacuggugcccaagaucgccaccagaagcaaggugaacggccagagcggcagaguggaguucuucuggaccauccugaagagcaacgacgccaucaacuucgagagcaacggcaacuucaucgcccccgagaacgccuacaagaucgugaagaagggcgacagcaccaucaugaagagcgagcuggaguacggcaacugcaacaccaagugccagacccccaucggcgccaucaacagcagcaugcccuuccacaacauccacccccugaccaucggcgagugccccaaguacgugaagagcaacagacuggugcuggccaccggccugagaaacagcccccagggcgagagaagaagaaagaagagaggccuguucggcgccaucgccggcuucaucgagggcggcuggcagggcaugguggacggcugguacggcuaccaccacagcaacgagcagggcagcggcuacgccgccgacaaggagagcacccagaaggccaucgacggcgugaccaacaaggugaacagcaucaucgacaagaugaacacccaguucgaggccgugggcaaggaguucaacaaccuggagagaagaaucgagaaccugaacaagaagauggaggacggcuuccuggacguguggaccuacaacgccgagcugcuggugcugauggagaacgagagaacccuggacuuccacgacagcaacgugaagaaccuguacgacaaggugagacugcagcugagagacaacgccaaggagcugggcaacggcugcuucgaguucuaccacagaugcgacaacgagugcauggagagcgugagaaacggcaccuacgacuacccccaguacagcgaggaggccagacugaagagagaggagaucagcggcgugaagcuggagagcaucggcaccuaccagauccugagcaucuacagcaccguggccagcagccuggcccuggccaucaugguggccggccuguuccuguggaugugcagcaacggcagccugcagugcagaaucugcaucuga

SEQ ID NO: 173876 - RNA, 1707 nt, Artificial Sequence
  derived and/or modified CDS sequence (opt4) from hemagglutinin__InfluenzaA__BAK23412
auggagaagaucgugcugcugcuggccaucgugagccuggugaagagcgaccagaucugcaucggcuaccacgccaacaacagcaccgagcagguggacaccaucauggagaagaacgugaccgugacccacgcccaggacauccuggagaagacccacaagggcaagcugugcgaccuggacggcgugaagccccugauccugagagacugcagcguggccggcuggcugcugggcaaccccaugugcgacgaguuccugaacgugagcgaguggagcuacaucguggagaagaucaaccccgccaacgaccugugcuaccccggcaacuucaacaacuacgaggagcugaagcaccugcugagcagaaucaacagauucgagaagauccagaucauccccaagagcagcuggcccgaccacgaggccagccugggcgugagcagcgccugccaguaccagggcggccccagcuucuacagaaacgugguguggcugaucaagaaggacaacaccuaccccaccaucaagaagagcuaccacaacaccaacaaggaggaccugcuggugcuguggggcauccaccaccccaacaacgaggaggagcagaccaagcuguaccagaaccccaccaccuacaucagcgugggcaccagcacccugaaccagagacuggugcccaagaucgccaccagaagcaaggugaacggccagagcggcagaguggaguucuucuggaccauccugaagagcaacgacgccaucaacuucgagagcaacggcaacuucaucgcccccgagaacgccuacaagaucgugaagaagggcgacagcaccaucaugaagagcgagcuggaguacggcaacugcaacaccaagugccagacccccaucggcgccaucaacagcagcaugcccuuccacaacauccacccccugaccaucggcgagugccccaaguacgugaagagcaacagacuggugcuggccaccggccugagaaacagcccccagggcgagagaagaagaaagaagagaggccuguucggcgccaucgccggcuucaucgagggcggcuggcagggcaugguggacggcugguacggcuaccaccacagcaacgagcagggcagcggcuacgccgccgacaaggagagcacccagaaggccaucgacggcgugaccaacaaggugaacagcaucaucgacaagaugaacacccaguucgaggccgugggcaaggaguucaacaaccuggagagaagaaucgagaaccugaacaagaagauggaggacggcuuccuggacguguggaccuacaacgccgagcugcuggugcugauggagaacgagagaacccuggacuuccacgacagcaacgugaagaaccuguacgacaaggugagacugcagcugagagacaacgccaaggagcugggcaacggcugcuucgaguucuaccacagaugcgacaacgagugcauggagagcgugagaaacggcaccuacgacuacccccaguacagcgaggaggccagacugaagagagaggagaucagcggcgugaagcuggagagcaccggcaccuaccagauccugagcaucuacagcaccguggccagcagccuggcccuggccaucaugguggccggccuguuccuguggaugugcagcaacggcagccugcagugcagaaucugcaucuga

SEQ ID NO: 173877 - RNA, 1707 nt, Artificial Sequence
  derived and/or modified CDS sequence (opt4) from hemagglutinin__InfluenzaA__BAK23413
auggagaagaucgugcugcugcuggccaucgugagccuggugaagagcgaccagaucugcaucggcuaccacgccaacaacagcaccgagcagguggacaccaucauggagaagaacgugaccgugacccacgcccaggacauccuggagaagacccacaacggcaagcugugcgaccuggacggcgugaagccccugauccugagagacugcagcguggccggcuggcugcugggcaaccccaugugcgacgaguuccugaacgugagcgaguggagcuacaucguggagaagaucaaccccgccaacgaccugugcuaccccggcaacuucaacaacuacgaggagcugaagcaccugcugagcagaaucaacagauucgagaagauccagaucauccccaagagcagcuggcccgaccacgaggccagccugggcgugagcagcgccugccaguaccagggcggccccagcuucuacagaaacgugguguggcugaucaagaaggacaacaccuaccccaccaucaagaagagcuaccacaacaccaacaaggaggaccugcuggugcuguggggcauccaccaccccaacaacgaggaggagcagaccaagcuguaccagaaccccaccaccuacaucagcgugggcaccagcacccugaaccagagacuggugcccaagaucgccaccagaagcaaggugaacggccagagcggcagaguggaguucuucuggaccauccugaagagcaacgacgccaucaacuucgagagcaacggcaacuucaucgcccccgagaacgccuacaagaucgugaagaagggcgacagcaccaucaugaagagcgagcuggaguacggcaacugcaacaccaagugccagacccccaucggcgccaucaacagcagcaugcccuuccacaacauccacccccugaccaucggcgagugccccaaguacgugaagagcaacagacuggugcuggccaccggccugagaaacagcccccagggcgagagaagaagaaagaagagaggccuguucggcgccaucgccggcuucaucgagggcggcuggcagggcaugguggacggcugguacggcuaccaccacagcaacgagcagggcagcggcuacgccgccgacaaggagagcacccagaaggccaucgacggcgugaccaacaaggugaacagcaucaucgacaagaugaacacccaguucgaggccgugggcaaggaguucaacaaccuggagagaagaaucgagaaccugaacaagaagauggaggacggcuuccuggacguguggaccuacaacgccgagcugcuggugcugauggagaacgagagaacccuggacuuccacgacagcaacgugaagaaccuguacgacaaggugagacugcagcugagagacaacgccaaggagcugggcaacggcugcuucgaguucuaccacagaugcgacaacgagugcauggagagcgugagaaacggcaccuacgacuacccccaguacagcgaggaggccagacugaagagagaggagaucagcggcgugaagcuggagagcaucggcaccuaccagauccugagcaucuacagcaccguggccagcagccuggcccuggccaucaugguggccggccuguuccuguggaugugcagcaacggcagccugcagugcagaaucugcaucuga

SEQ ID NO: 173878 - RNA, 1707 nt, Artificial Sequence; identical to SEQ ID NO: 173875
  derived and/or modified CDS sequence (opt4) from hemagglutinin__InfluenzaA__BAK23414

SEQ ID NO: 173879 - RNA, 1698 nt, Artificial Sequence
  derived and/or modified CDS sequence (opt4) from hemagglutinin__InfluenzaA__BAM65746
auggaggugaagcugcuggugcugcugugcaccuucaccgccaccuacgccgacaccaucugcaucggcuaccacgccaacaacagcaccgacaccguggacacccugcccgagaagaacgugaccgugacccacagcgugaaccugcuggaggacacccacaacggcaagcugugccugcugaagggcaucgccccccugcagcugggcaacugcagcguggccggcuggauccugggcaaccccgagugcgagcugcugaucagcagagagagcuggagcuacaucguggagaagcccaaccccgagaacggcaucugcuaccccggccacuucgccgacuacgaggagcugagagagcagcugagcagcgugagcagcuucgagagauucgagaucuuccccaaggagagcagcuggcccaaccacaccgccaccggcgugagcgccagcugcagccacaacggcaagagcagcuucuacaagaaccugcuguggcugaccgugaagaacggccuguaccccaaccugagcaagagcuacgccaacaacaaggagaaggaggugcuggugcuguggggcgugcaccaccccaccaacaucggcgaccagagagcccuguaccacaccgagaacgccuacgugagcguggugagcagccacuacagcagaagauucacccccgagaucgccaagagacccaaggugagagaccaggagggcagaaucaacuacuacuggacccugcuggagcccggcgacaccaucaucuucgaggccaacggcaaccugaucgcccccagauacgccuucgcccugagcagaggcuucggcagcggcaucaucaagagcaacgcccccauggacgagugcaacgccaagugccagaccccccagggcgccaucaacagcagccugcccuuccagaacgugcaccccgugaccaucggcgagugccccaaguacgugagaagcaccaagcugagaauggugaccggccugagaaacacccccagcauccagagcagaggccuguucggcgccaucgccggcuucaucgagggcggcuggaccggcaugguggacggcugguacggcuaccaccaccagaacgagcagggcagcggcuacgccgccgaccagaagagcacccagaacgccaucaacggcaucaccaacaaggugaacagcgugaucgagaagaugaacacccaguucaccgccguggacaaggaguucaacaagcuggagagaagaauggagaacuucaacaagaagguggacgacggcuucaucgacaucuggaccuacaacgccgagcugcugauccugcuggagaacgagagaacccuggacuuccacgacagcaacgugaagaaccuguacgagaaggugaagagccagcugaagaacaacgccaaggagaucggcaacggcugcuucgaguucuaccacaagugcaacgacgagugcauggagagcgugaagaacggcaccuacgacuaccccaaguacagcgaggagagcaagcugaacagagagaagaucgacggcgugaagcuggagagcaugggcguguaccagauccuggccaucuacagcaccguggccagcagcauggugcugcuggugagccugggcgccaucagcuucuggaugugcagcaacggcagccugcagugcagaaucugcaucuga

SEQ ID NO: 173880 - RNA, 1701 nt, Artificial Sequence; identical to SEQ ID NO: 172626
  derived and/or modified CDS sequence (opt4) from hemagglutinin__InfluenzaA__BAO79716

SEQ ID NO: 173881 - RNA, 1683 nt, Artificial Sequence
  derived and/or modified CDS sequence (opt4) from Hemagglutinin__InfluenzaA__CAB95856
auggagaccaucagccugaucaccauccugcugguggugaccgccagcaacgccgacaagaucugcaucggccaccagagcaccaacagcaccgagaccguggacacccugaccgagaccaacgugcccgugacccacgccaaggagcugcugcacaccgagcacaacggcaugcugugcgccaccagccugggccacccccugauccuggacaccugcaccaucgagggccugguguacggcaaccccagcugcgaccugcugcugggcggcagagaguggagcuacaucguggagagaagcagcgccgugaacggcaccugcuaccccggcaacguggagaaccuggaggagcugagaacccuguucagcagcgccagcagcuaccagagaauccagaucuuccccgacaccaccuggaacgugaccuacaccggcaccagcagagccugcagcggcagcuucuacagaagcaugagauggcugacccagaagagcggcuucuaccccgugcaggacgcccaguacaccaacaacagaggcaagagcauccuguucguguggggcauccaccacccccccaccuacaccgagcagaccaaccuguacaucagaaacgacaccaccaccagcgugaccaccgaggaccugaacagaaccuucaagcccgugaucggccccagaccccuggugaacggccugcagggcagaaucgacuacuacuggagcgugcugaagcccggccagacccugagagugagaagcaacggcaaccugaucgcccccugguacggccacgugcugagcggcggcagccacggcagaauccugaagaccgaccugaagggcggcaacugcguggugcagugccagaccgagaagggcggccugaacagcacccugcccuuccacaacaucagcaaguacgccuucggcaccugccccaaguacgugagagugaacagccugaagcuggccgugggccugagaaacgugcccgccagaagcagcagaggccuguucggcgccaucgccggcuucaucgagggcggcuggcccggccugguggccggcugguacggcuuccagcacagcaacgaccagggcgugggcauggccgccgacagagacagcacccagaaggccaucgacaagaucaccagcaaggugaacaacaucguggacaagaugaacaagcaguacgagaucaucgaccacgaguucagcgagguggagaccagacugaacaugaucaacaacaagaucgacgaccagauccaggacgugugggccuacaacgccgagcugcuggugcugcuggagaaccagaagacccuggacgagcacgacgccaacgugaacaaccuguacaacaaggugaagagagcccugggcagcaacgccauggaggacggcaagggcugcuucgagcuguaccacaagugcgacgaccagugcauggagaccaucagaaacggcaccuacaacagaagaaaguacagagaggagagcagacuggagagacagaagaucgagggcgugaagcuggagagcgagggcaccuacaagauccugaccaucuacagcaccguggccagcagccuggugcuggccaugggcuucgccgccuuccuguucugggccaugagcaacggcagcugcagaugcaacaucugcaucuga

SEQ ID NO: 173882 - RNA, 1683 nt, Artificial Sequence
  derived and/or modified CDS sequence (opt4) from Hemagglutinin__InfluenzaA__CAB95857
auggagaccaucagccugaucaccauccugcugguggugaccgccagcaacgccgacaagaucugcaucggccaccagagcaccaacagcaccgagaccguggacacccugaccgagaccaacgugcccgugacccacgccaaggagcugcugcacaccgagcacaacggcaugcugugcgccaccagccugggccacccccugauccuggacaccugcaccaucgagggccugguguacggcaaccccagcugcgaccugcugcuggagggcagagaguggagcuacaucguggagagaagcagcgccgugaacggcaccugcuaccccggcaacguggagaaccuggaggagcugagaacccuguucagcagcgccagcagcuaccagagaauccagaucuuccccgacaccaccuggaacgugaccuacaccggcaccagcagagccugcagcggcagcuucuacagaagcaugagauggcugacccagaagagcggcuucuaccccgugcaggacgcccaguacaccaacaacagaggcaagagcauccuguucguguggggcauccaccacccccccaccuacaccgagcagaccaaccuguacaucagaaacgacaccaccaccagcgugaccaccgaggaccugaacagaaccuucaagcccgugaucggccccagaccccuggugaacggccugcagggcagaaucgacuacuacuggagcgugcugaagcccggccagacccugagagugagaagcaacggcaaccugaucgcccccugguacggccacgugcugagcggcggcagccacggcagaauccugaagaccgaccugaagagcggcaacugcguggugcagugccagaccgagaagggcggccugaacagcacccugcccuuccacaacaucagcaaguacgccuucggcaccugccccaaguacgugagagugaacagccugaagcuggccgugggccugagaaacgugcccgccagaagcagcagaggccuguucggcgccaucgccggcuucaucgagggcggcuggcccggccugguggccggcugguacggcuuccagcacagcaacgaccagggcgugggcauggccgccgacagagacagcacccagaaggccaucgacaagaucaccagcaaggugaacaacaucguggacaagaugaacaagcaguacgagaucaucgaccacgaguucagcgagguggagaccagacugaacaugaucaacaacaagaucgacgaccagauccaggacgugugggccuacaacgccgagcugcuggugcugcuggagaaccagaagacccuggacgagcacgacgccaacgugaacaaccuguacaacaaggugaagagagcccugggcagcaacgccauggaggacggcaagggcugcuucgagcuguaccacaagugcgacgaccagugcauggagaccaucagaaacggcaccuacaacagaagaaaguacagagaggagagcagacuggagagacagaagaucgagggcgugaagcuggagagcgagggcgccuacaagauccugaccaucuacagcaccguggccagcagccuggugcuggccaugggcuucgccgccuuccuguucugggccaugagcaacggcagcugcagaugcaacaucugcaucuga

SEQ ID NO: 173883 - RNA, 1707 nt, Artificial Sequence
  derived and/or modified CDS sequence (opt4) from hemagglutinin__InfluenzaA__CBW54815
auggagaagaucgugcugcugcuggccaucgugagccuggugaagagcgaccagaucugcaucggcuaccacgccaacaacagcaccgagcagguggacaccaucauggagaagaacgugaccgugacccacgcccaggacauccuggagaagacccacaacggcaagcugugcgaccuggacggcgugaagccccugauccugagagacugcagcguggccggcuggcugcugggcaaccccaugugcgacgaguuccccaacgugagcgaguggagcuacaucguggagaagaccaaccccgccaacgaccugugcuaccccggcaacuucgacaacuacgaggagcugaagcaccugcugagcagaaucaacagauucgagaagauccagaucauccccaagagcagcuggcccgaccacgaggccagccugggcgugagcagcgccugccccuaccagggcggccccagcuucuacagaaacgugguguggcugaucaagaagaacaacaccuaccccaccaucaaggagagcuaccacaacaccaaccaggaggaccugcuggugcuguggggcauccaccaccccaacgacgaggaggagcagaccagaaucuacaagaaccccaccaccuacaucagcgugggcaccagcacccugaaccagagacuggugcccaagaucgccaccagaagcaaggugaacggccagagcggcagaguggaguucuucuggaccauccugaagagcaacgacaccaucaacuucgagagcaacggcaacuucaucgcccccgagaacgccuacaagaucgugaagaagggcgacagcaccaucaugaagagcgagcuggaguacggcaacugcagcaccaagugccagacccccaucggcgccaucaacagcagcaugcccuuccacaacauccacccccugaccaucggcgagugccccaaguacgugaagagcaacagacuggugcuggccaccggccugagaaacagcccccagggcgagggcagaagaaagaagagaggccuguucggcgccaucgccggcuucaucgagggcggcuggcagggcaugguggacggcugguacggcuaccaccacagcaacgagcagggcagcggcuacgccgccgacaaggagagcacccagaaggccaucgacggcgugaccaacaaggugaacagcaucaucgacaagaugaacacccaguucgaggccgugggcagagaguucaacaaccuggagaagagaaucgagaaccugaacaagaagauggaggacggcuuccuggacguguggaccuacaacgccgagcugcuggugcugauggagaacgagagaacccuggacuuccacgacagcaacgugaagaaccuguacgacaaggugagacugcagcugagagacaacgccaaggagcugggcaacggcugcuucgaguucuaccacagaugcgacaacgagugcauggagagcgugagaaacggcaccuacgacuacccccaguacagcgaggaggccagacugaagagagaggagaucagcggcgugaagcuggagagcaucggcaccuaccagauccugagcaucuacagcaccguggccagcagccuggcccuggccaucaugguggccggccuguuccuguggaugugcagcaacggcagccugcagugcagaaucugcaucuga

SEQ ID NO: 173884 - RNA, 1707 nt, Artificial Sequence
  derived and/or modified CDS sequence (opt4) from hemagglutinin__InfluenzaA__CBW54817
auggagaagaucgugcugcugcuggccaucgugagccuggugaagagcgaccagaucugcaucggcuaccacgccaacaacagcaccgagcagguggacaccaucauggagaagaacgugaccgugacccacgcccaggacauccuggagaagacccacaacggcaagcugugcgaccuggacggcgugaagccccugauccugagagacugcagcguggccggcuggcugcugggcaaccccaugugcgacgaguuccccaacgugagcgaguggagcuacaucguggagaagaucaaccccgccaacgaccugugcuaccccggcaacuucaacaacuacgaggagcugaagcaccugcugagcagaaucaacagauucgagaagauccagaucauccccaagagcagcuggcccgaccacgaggccagccugggcgugagcagcgccugccccuaccagagaggccccagcuucuacagaaacgugguguggcugaucaagaagaacgacaccuaccccaccaucaaggagagcuaccacaacaccaaccaggaggaccugcuggugcuguggggcauccaccaccccaacgacgaggaggagcagaagagaaucuacaagaaccccaccaccuacaucagcgugggcaccagcacccugaaccagagacuggugcccaagaucgccaccagaagcaaggugaacggccagagcggcagaguggaguucuucuggaccauccugaagagcaacgacaccaucaacuucgagagcaacggcaacuucaucgcccccgagaacgccuacaagaucgugaagaagggcgacagcaccaucaugaagagcgagcuggaguacggcaacugcagcaccaagugccagacccccaucggcgccaucaacaccagcaugcccuuccacaacauccacccccugaccaucggcgagugccccaaguacgugaagagcaacagacuggugcuggccaccggccugagaaacagcccccagggcgagggcagaagaaagaagagaggccuguucggcgccaucgccggcuucaucgagggcggcuggcagggcaugguggacggcugguacggcuaccaccacagcaacgagcagggcagcggcuacgccgccgacaaggagagcacccagaaggccaucgacggcgugaccaacaaggugaacagcaucaucgacaagaugaacacccaguucgaggccgugggcagagaguucaacaaccuggagaagagaaucgagaaccugaacaagaagauggaggacggcuuccuggacguguggaccuacaacgccgagcugcuggugcugauggagaacgagagaacccuggacuuccacgacagcaacgugagaaaccuguacgacaaggugagacugcagcugagagacaacgccaaggagcugggcaacggcugcuucgaguucuaccacagaugcgacaacgagugcauggagagcgugagaaacggcaccuacgacuacccccaguacagcgaggaggccagacugaagagagaggagaucagcggcgugaagcuggagagcaucggcaccuaccagauccugagcaucuacagcaccguggccagcagccuggcccuggccaucaugguggccggccuguuccuguggaugugcagcaacggcagccugcagugcagaaucugcaucuga

SEQ ID NO: 173885 - RNA, 1707 nt, Artificial Sequence
  derived and/or modified CDS sequence (opt4) from hemagglutinin__InfluenzaA__CBW54818
auggagaagaucgugcugcugcuggccaucgugagccuggugaagagcgaccagaucugcaucggcuaccacgccaacaacagcaccgagcagguggacaccaucauggagaagaacgugaccgugacccacgcccaggacauccuggagaagacccacaacggcaagcugugcgaccuggacggcgugaagccccugauccugagagacugcagcguggccggcuggcugcugggcaaccccaugugcgacgaguuccccaacgugagcgaguggagcuacaucguggagaagaccaaccccgccaacgaccugugcuaccccggcaacuucaacaacuacgaggagcugaagcaccugcugagcagaaucaacagauucgagaagaucaagaucauccccaagagcagcuggcccgaccacgaggccagccugggcgugagcagcgccugccccuaccagggcggccccagcuucuacagaaacgugguguggcugaucaagaagaacaacaccuaccccaccaucaaggagagcuaccacaacaccaaccaggaggaccugcuggugcuguggggcauccaccaccccaacgacgaggaggagcagaccagaaucuacaagaaccccaccaccuacaucagcgugggcaccagcacccugaaccagagacuggugcccaagaucgccaccagaagcaaggugaacggccagagcggcagaguggaguucuucuggaccauccugaagagcaacgacaccaucaacuucgagagcaacggcaacuucaucgcccccgagaacgccuacaagaucgugaagaagggcgacagcaccaucaugaagagcgagcuggaguacggcaacugcagcaccaagugccagacccccgugggcgccaucaacagcagcaugcccuuccacaacauccacccccugaccaucggcgagugccccaaguacgugaagagcaacagacuggugcuggccaccggccugagaaacagcccccagggcgagggcagaagaaagaagagaggccuguucggcgccaucgccggcuucaucgagggcggcuggcagggcaugguggacggcugguacggcuaccaccacagcaacgagcagggcagcggcuacgccgccgacagagagagcacccagaaggccaucgacggcgugaccaacaaggugaacagcaucaucgacaagaugaacacccaguucgaggccgugggcagagaguucaacaaccuggagaagagaaucgagaaccugaacaagaagauggaggacggcuuccuggacguguggaccuacaacgccgagcugcuggugcugauggagaacgagagaacccuggacuuccacgacagcaacgugaagaaccuguacgacaaggugagacugcagcugagagacaacgccaaggagcugggcaacggcugcuucgaguucuaccacagaugcgacaacgagugcauggagagcgugagaaacggcaccuacgacuacccccaguacagcgaggaggccagacugaagagagaggagaucagcggcgugaagcuggagagcaucggcaccuaccagauccugagcaucuacagcaccguggccagcagccuggcccuggccaucaucguggccggccugcugcuguggaugugcagcaacggcagccugcagugcagaaucugcaucuga

SEQ ID NO: 173886 - RNA, 1701 nt, Artificial Sequence
  derived and/or modified CDS sequence (opt4) from hemagglutinin__InfluenzaA__CCG47908
augaagaccgugaucgcccugagcuacguguucugccugggcuucggccagggccugcccggcaagggcaacaacaccgccacccugugccugggccaccacgccgugcccaacggcacccuggugaagaccaucaccgacgaccagaucgaggugaccaacgccaccgagcuggugcagaacuucagcaugggcaagaucugcaagaacccccacagaauccuggacggcgccaacugcacccugaucgacagccugcugggcgacccccacugcgacggcuuccaggacgagaagugggaccuguucaucgagagaagcaaggccuucagcaacugcuaccccuacgacgugcccgaguacaccagccugagaagcaucaucgccagcagcggcacccuggaguucaccaacgaggacuucaacuggaccggcgugacccagaacggcggcagcagcgccugcaagagaggccccaacaacagcuucuucagcagacugaacuggcuguacaagagcggcaacaccuaccccaugcugaacgugaccaugcccaacagcgacgacuucgacaagcuguacaucuggggcgugcaccaccccagcaccgacagagagcagaccaaccuguacauccaggccagcggcaagaucaucgugagcaccaagagaagccagcagaccaucauccccaacaucggcagcagacccugggugagaggccugagcagcagaaucagcaucuacuggaccaucgugaagcccggcgacauccugaucaucaacagcaacggcaaccugaucgcccccagaggcuacuucaagauccagaccggcaagagcagcgugaugagaagcgacgcccccaucgacaccugcaacagcgagugcaucacccccaacggcagcauccccaacgacaagcccuuccagaacgugaacagaaucaccuacggcgccugccccaaguacaucaagcagaacacccugaagcuggccaccggcaugagaaacauccccgagagacagaccagaggcaucuucggcgccaucgccggcuucaucgagaacggcugggagggcauggugaacggcugguacggcuucagacaccagaacagcgagggcaucggccaggccgccgaccugaagagcacccaggccgccaucaaccagaucaacggcaagcugaacagagugaucgagaagaccaacgagaaguuccaccagaucgagaaggaguucagcgagguggagggcagaauccaggaccuggagagauacguggaggacaccaagaucgaccuguggagcuacaacgccgagcugcugguggcccuggagaaccagcacaccaucgaccugaccgacagcgagaugaacaagcuguucgagaagaccagaaagcagcugagagagaacgccgaggacaugggcaacggcugcuucaagaucuaccacaagugcgacaacagcugcauggagagcaucagaaacggcaccuacgaccacaacgaguacagagacgaggccgugaacaacagauuccagaucaagagcguggagcugaagagcggcuacaaggacuggauccuguggaucagcuucgccaucagcugcuuccugcugugcgccguguggcugggcuucaucaucugggccugccagaagggcaacaucagaugcaacaucugcaucuga

SEQ ID NO: 173887 - RNA, 1701 nt, Artificial Sequence
  derived and/or modified CDS sequence (opt4) from hemagglutinin__InfluenzaA_ _AAB39851
augaaggccauccugcuggugcugcugugcaccuucgccgccaccaacgccgacacccugugcaucggcuaccacgccaacaacagcaccgacaccguggacaccgugcuggagaagaacgugaccgugacccacagcgugaaccugcuggaggacagacacaacggcaagcugugcaagcugggcggcaucgccccccugcaccugggcaagugcaacaucgccggcagacugcugggcaaccccgagugcgagcugcugcugaccgugagcagcuggagcuacaucguggagaccagcaagagcgacaacggcaccugcuaccccggcgacuucaucaacuacgaggagcugagagagcagcugagcagcgugagcagcuucgagagauucgagaucuuccccaagaccagcagcuggcccaaccacgagaccaacagaggcgugaccgccgccugccccuacgccggcgccaacagcuucuacagaaaccugaucuggcuggugaagaaggagaacagcuaccccaagcugagcaagagcuacgugaacaacaagggcaaggaggugcuggugcuguggggcauccaccacccccccaccagcaccgaccagcagagccuguaccagaacgccgacgccuacguguucgugggcagcagcaaguacaacagaaaguucaagcccgagaucgccgccagacccaaggugagaggccaggccggcagaaugagcuacuacuggacccugaucgagcccggcgacaccaucaccuucgaggccaccggcaaccugguggugcccagauacgccuucgccaugaacagaggcagcggcagcggcaucaucaucugggacgcccccgugcacgacugcaacaccaagugccagacccccaagggcgccaucaacaccagccugcccuuccagaacauccaccccgugaccaucggcgagugccccaaguacgugaagagcaccaagcugagaauggccaccggccugagaaacgugcccagcauccagagcagaggccuguucggcgccaucgccggcuucaucgagggcggcuggaccggcaugaucgacggcugguacggcuaccaccaccagaacgagcagggcagcggcuacgccgccgaccagagaagcacccagaacgccaucgacggcaucaccaacaaggugaacagcgugaucgagaagaugaacacccaguucaccgccgugggcaaggaguucaaccaccuggagaagagaaucgagaaccugaacaagaagguggacgacggcuuccuggacaucuggaccuacaacgccgagcugcuggugcugcuggagaacgagagaacccuggacuuccacgacagcaacgugaagaaccuguacgagaaggugagaagccagcugagaaacaacgccaaggagaucggcaacggcugcuucgaguucuaccacaagugcgacgacaccugcauggagagcgugaagaacggcaccuacgacuaccccaaguacagcgaggagagcaagcugaacagagaggagaucgacggcgugaagcuggagagcaccagaaucuaccagauccuggccaucuacagcaccguggccagcagccuggugcugcuggugagccugggcgccaucagcuucuggaugugcagcaacggcagccugcagugcagaaucugcaucuga

SEQ ID NO: 173888 - RNA, 1701 nt, Artificial Sequence
  derived and/or modified CDS sequence (opt4) from hemagglutinin__InfluenzaA__AAA43178
augaagaccaucaucgcccugagcuacaucuucugccuggcccugggccaggaccugcccggcaacgacaacagcaccgccacccugugccugggccaccacgccgugcccaacggcacccuggugaagaccaucaccgacgaccagaucgaggugaccaacgccaccgagcuggugcagagcagcagcaccggcaagaucugcaacaacccccacagaauccuggacggcaucgacugcacccugaucgacgcccugcugggcgacccccacugcgacguguuccagaacgagaccugggaccuguucguggagagaagcaaggccuucagcaacugcuaccccuacgacgugcccgacuacgccagccugagaagccugguggccagcagcggcacccuggaguucaucaccgagggcuucaccuggaccggcgugacccagaacggcggcagcaacgccugcaagagaggccccggcagcggcuucuucagcagacugaacuggcugaccaagagcggcagcaccuaccccgugcugaacgugaccaugcccaacaacgacaacuucgacaagcuguacaucuggggcauccaccaccccagcaccaaccaggagcagaccagccuguacgugcaggccagcggcagagugaccgugagcaccagaagaagccagcagaccaucauccccaacaucggcagcagacccugggugagaggccugagcagcagaaucagcaucuacuggaccaucgugaagcccggcgacgugcuggugaucaacagcaacggcaaccugaucgcccccagaggcuacuucaagaugagaaccggcaagagcagcaucaugagaagcgacgcccccaucgacaccugcaucagcgagugcaucacccccaacggcagcauccccaacgacaagcccuuccagaacgugaacaagaucaccuacggcgccugccccaaguacgugaagcagaacacccugaagcuggccaccggcaugagaaacgugcccgagaagcagaccagaggccuguucggcgccaucgccggcuucaucgagaacggcugggagggcaugaucgacggcugguacggcuucagacaccagaacagcgagggcaccggccaggccgccgaccugaagagcacccaggccgccaucgaccagaucaacggcaagcugaacagagugaucgagaagaccaacgagaaguuccaccagaucgagaaggaguucagcgagguggagggcagaauccaggaccuggagaaguacguggaggacaccaagaucgaccuguggagcuacaacgccgagcugcugguggcccuggagaaccagcacaccaucgaccugaccgacagcgagaugaacaagcuguucgagaagaccagaagacagcugagagagaacgccgaggagaugggcaacggcugcuucaagaucuaccacaagugcgacaacgccugcaucgagagcaucagaaacggcaccuacgaccacgacguguacagagacgaggcccugaacaacagauuccagaucaagggcguggagcugaagagcggcuacaaggacuggauccuguggaucagcuucgccaucagcugcuuccugcugugcguggugcugcugggcuucaucaugugggccugccagagaggcaacaucagaugcaacaucugcaucuga

SEQ ID NO: 173889 - RNA, 1689 nt, Artificial Sequence
  derived and/or modified CDS sequence (opt4) from hemagglutinin__InfluenzaA__AAA43185
auggccaucaucuaccugauccugcuguucaccgccgugagaggcgaccagaucugcaucggcuaccacgccaacaacagcaccgagaagguggacaccaaccuggagagaaacgugaccgugacccacgccaaggacauccuggagaagacccacaacggcaagcugugcaagcugaacggcauccccccccuggagcugggcgacugcagcaucgccggcuggcugcugggcaaccccgagugcgacagacugcugagcgugcccgaguggagcuacaucauggagaaggagaaccccagagacggccugugcuaccccggcagcuucaacgacuacgaggagcugaagcaccugcugagcagcgugaagcacuucgagaaggugaagauccugcccaaggacagauggacccagcacaccaccaccggcggcagcagagccugcgccgugagcggcaaccccagcuucuucagaaacaugguguggcugaccaaggagggcagcgacuaccccguggccaagggcagcuacaacaacaccagcggcgagcagaugcugaucaucuggggcgugcaccaccccaucgacgagaccgagcagagaacccuguaccagaacgugggcaccuacgugagcgugggcaccagcacccugaacaagagaagcacccccgagaucgccaccagacccaaggugaacggccagggcggcagaauggaguucagcuggacccugcuggacaugugggacaccaucaacuucgagagcaccggcaaccugaucgcccccgaguacggcuucaagaucagcaagagaggcagcagcggcaucaugaagaccgagggcacccuggagaacugcgagaccaagugccagaccccccugggcgccaucaacaccacccugcccuuccacaacgugcacccccugaccaucggcgagugccccaaguacgugaagagcgagaagcuggugcuggccaccggccugagaaacgugccccagaucgagagcagaggccuguucggcgccaucgccggcuucaucgagggcggcuggcagggcaugguggacggcugguacggcuaccaccacagcaacgaccagggcagcggcuacgccgccgacaaggagagcacccagaaggccuucgacggcaucaccaacaaggugaacagcgugaucgagaagaugaacacccaguucgaggccgugggcaaggaguucggcaaccuggagagaagacuggagaaccugaacaagagaauggaggacggcuuccuggacguguggaccuacaacgccgagcugcuggugcugauggagaacgagagaacccuggacuuccacgacagcaacgugaagaaccuguacgacaaggugagaaugcagcugagagacaacgugaaggagcugggcaacggcugcuucgaguucuaccacaagugcgacgacgagugcaugaacagcgugaagaacggcaccuacgacuaccccaaguacgaggaggagagcaagcugaacagaaacgagaucaagggcgugaagcugagcagcaugggcguguaccagauccuggccaucuacgccaccguggccggcagccugagccuggccaucaugauggccggcaucagcuucuggaugugcagcaacggcagccugcagugcagaaucugcaucuga

SEQ ID NO: 173890 - RNA, 1701 nt, Artificial Sequence
  derived and/or modified CDS sequence (opt4) from hemagglutinin__InfluenzaA__AAA43187
augaagaccaucaucgcccugagccacaucuucugccuggugcugggccaguaccugcccggcaacgacaacagcaccgccacccugugccugggccaccacgccgugcccaacggcacccuggugaagaccaucaccaacgaccagaucgaggugaccaacgccaccgagcuggugcagagcagcagcaccggcaagaucugcaacaacccccacagaauccuggacggcaucgacugcacccugaucgacgcccugcugggcgacccccacugcgacggcuuccagaacgagaccugggaccuguucguggagagaagcaaggccuucagcaacugcuaccccuacgacgugcccgacuacgccagccugagaagccugguggccagcagcggcacccuggaguucaucaccgagggcuucaccuggaccggcgugacccagaacggcggcagcaacgccugcaagagaggccccggcagcggcuucuucagcagacugaacuggcugaccaagagcgagagcaccuaccccgugcugaacgugaccaugcccaacaacgacaacuucgacaagcuguacaucuggggcgugcaccaccccagcaccaaccaggagcagaccagccuguacgugcaggccagcggcagagugaccgugagcaccagaagaagccagcagaccaucauccccaacaucggcagcagacccugggugagaggccugagcagcagaaucagcaucuacuggaccaucgugaagcccggcgacgugcuggugaucaacagcaacgccaaccugaucgcccccagaggcuacuucaagaugagaaccggcaagagcagcaucaugagaagcgacgcccccaucgacaccugcaucagcgagugcaucacccccaacggcagcauccccaacgacaagcccuuccagaacgugaacaagaucaccuacggcgccugccccaaguacgugaagcagaacacccugaagcuggccaccagaaugagaaacgugcccgagaagcagaccagaggccuguucggcgccaucgccggcuucaucgagaacggcugggagggcaugaucgacggcugguacggcuucagacaccagaacagcgagggcaccggccaggccgccgaccugaagagcacccaggccgccaucgaccagaucaacggcaagcugaacagagugaucgagaagaccaacgagaaguuccaccagaucgagaaggaguucagcgagguggagggcagaauccaggaccuggagaaguacguggaggacaccaagaucgaccuguggagcuacaacgccgagcugcugguggcccuggagaaccagcacaccaucgaccugaccgacagcgagaugaacaagcuguucgagaagaccagaagacagcugagagagaacgccgaggacaugggcaacggcugcuucaagaucuacgacaagugcgacaacgccugcaucgagagcaucagaaacggcaccuacgaccacgacguguacagagacgaggcccugaacaacagauuccagaucaagggcguggagcugaagagcggcuacaaggacuggauccuguggaucagcuucgccaucagcugcuuccugcugugcguggugcugcugggcuucaucaugugggccugccagagaggcaacaucagaugcaacaucugcaucuga

SEQ ID NO: 173891 - RNA, 1698 nt, Artificial Sequence
  derived and/or modified CDS sequence (opt4) from hemagglutinin__InfluenzaA__AAA43209
augaaggccaagcugcuggugcugcuguacgccuucguggccaccgacgccgacaccaucugcaucggcuaccacgccaacaacagcaccgacaccguggacaccaucuucgagaagaacguggccgugacccacagcgugaaccugcuggaggacagacacaacggcaagcugugcaagcugaagggcaucgccccccugcagcugggcaagugcaacaucaccggcuggcugcugggcaaccccgagugcgacagccugcugcccgccagaagcuggagcuacaucguggagacccccaacagcgagaacggcgccugcuaccccggcgacuucaucgacuacgaggagcugagagagcagcugagcagcgugagcagccuggagagauucgagaucuuccccaaggagagcagcuggcccaaccacaccuucaacggcgugaccgugagcugcagccacagaggcaagagcagcuucuacagaaaccugcuguggcugaccaagaagggcgacagcuaccccaagcugaccaacagcuacgugaacaacaagggcaaggaggugcuggugcuguggggcgugcaccaccccagcagcagcgacgagcagcagagccuguacagcaacggcaacgccuacgugagcguggccagcagcaacuacaacagaagauucacccccgagaucgccgccagacccaaggugaaggaccagcacggcagaaugaacuacuacuggacccugcuggagcccggcgacaccaucaucuucgaggccaccggcaaccugaucgcccccugguacgccuucgcccugagcagaggcuucgagagcggcaucaucaccagcaacgccagcaugcacgagugcaacaccaagugccagaccccccagggcagcaucaacagcaaccugcccuuccagaacauccaccccgugaccaucggcgagugccccaaguacgugagaagcaccaagcugagaauggugaccggccugagaaacauccccagcauccaguacagaggccuguucggcgccaucgccggcuucaucgagggcggcuggaccggcaugaucgacggcugguacggcuaccaccaccagaacgagcagggcagcggcuacgccgccgaccagaagagcacccagaacgccaucaacggcaucaccaacaaggugaacagcgugaucgagaagaugaacacccaguucaccgccgugggcaaggaguucaacaaccuggagaagagaauggagaaccugaacaagaagguggacgacggcuuccuggacaucuggaccuacaacgccgagcugcuggugcugcuggagaacgagagaacccuggacuuccacgaccugaacgugaagaaccuguacgagaaggugaagagccagcugaagaacaacgccaaggagaucggcaacggcugcuucgaguucuaccacaagugcgacaacgagugcauggagagcgugagaaacggcaccuacgacuaccccaaguacagcgaggagagcaagcugaacagagagaagaucgacggcgugaagcuggagagcaugggcguguaccagauccuggccaucuacagcaccguggccagcagccuggugcugcuggugagccugggcgccaucagcuucuggaugugcagcaacggcagccugcagugcagaaucugcaucuga

SEQ ID NO: 173892 - RNA, 1683 nt, Artificial Sequence
  derived and/or modified CDS sequence (opt4) from hemagglutinin__InfluenzaA__AAC40998
augaacacccagauccugauccuggcccugguggccaucauccccaccaacgccgacaagaucugccugggccaccacgccgugagcaacggcgccaaggugaacacccugaccgagagaggcguggagguggugaacgccaccgagaccguggagagaaccaacgugcccagaaucugcagcaagggcaagagaaccguggaccugggccagugcggccugcugggcaccaucaccggccccccccagugcgaccaguuccuggaguucagcgccgaccugaucaucgagagaagagagggcaacgacgugugcuaccccggcaaguucgugaacgaggaggcccugagacagauccugagaaagagcggcggcaucgacaaggagaccaugggcuucaccuacagcggcaucagaaccaacggcgccaccagcgccugcagaagaagcggcagcagcuucuacgccgagaugaaguggcugcugagcaacaccgacaacgccgccuucccccagaugaccaagagcuacaagaacaucagaaaggaccccgcccugaucaucuggggcauccaccacagcggcagcaccgccgagcagaccaagcuguacggcagcggcaacaagcugaucaccgugggcagcagcaacuaccagcagagcuucgugcccagccccggcgccagaccccaggugaacggccagagcggcagaaucgacuuccacuggcugaugcugaaccccaacgacaccgugaccuucagcuucaacggcgccuucaucgcccccgacagagccagcuuccugagaggcaagagcaugggcauccagagcgaggugcagguggacgccaacugcgagggcgacugcuaccacagcggcggcaccauccugagcagccugcccuuccagaacaucaacagcagaaccgugggcgagugccccagauacgugaagcaggagagccugcugcuggccaccggcaugaagaacgugcccgagauccccaagggcagaggccuguucggcgccaucgccggcuucaucgagaacggcugggagggccugguggacggcugguacggcuucagacaccagaacgcccagggcgagggcaccgccgccgacuacaagagcacccagagcgccaucgaccagaucaccggcaagcugaacagacugaucgagaagaccaaccagcaguucgagcugaucgacaacgaguucaccgagguggagaagcagaucggcaacgugaucaacuggaccagagacagccugaccgagauguggagcuacaacgccgagcugcugguggccauggagaaccagcacaccaucgaccuggccgacagcgagaugaacaagcuguacgagagagugagaagacagcugagagagaacgccgaggaggacggcaccggcugcuucgagaucuuccacaagugcgacgacgacugcauggccagcaucagaaacaacaccuacgaccacagcaaguacagagaggaggccauccagaacagaauccagaucgaccccgugaagcugagcagcggcuacaaggacgugauccugugguucagcuucggcgccagcugcuucauccugcuggccaucgccaugggccugguguucaucugcgugaagaacggcaacaugagaugcaccaucugcaucuga

SEQ ID NO: 173893 - RNA, 1683 nt, Artificial Sequence
  derived and/or modified CDS sequence (opt4) from hemagglutinin__InfluenzaA__AAC40999
augaacacccagauccugauccuggcccugguggccaucauccccaccaacgccgacaagaucugccugggccaccacgccgugagcaacggcaccaaggugaacacccugaccgagagaggcguggagguggugaacgccaccgagaccguggagagaaccaacgugcccagaaucugcagcaagggcaagagaaccguggaccugggccagugcggccugcugggcaccaucaccggccccccccagugcgaccaguuccuggaguucagcgccgaccugaucaucgagagaagagagggcgacgacgugugcuaccccggcaaguucgugaacgaggaggcccugagacagauccugagagagagcggcggcaucgacaaggagaccaugggcuucaccuacagcggcaucagaaccaacggcgccaccagcgccugcagaagaagcggcagcagcuucuacgccgagaugaaguggcugcugagcaacaccgacaacgccgccuucccccagaugaccaagagcuacaagaacaucagaaaggaccccgcccugaucaucuggggcauccaccacagcggcagcaccgccgagcagaccaagcuguacggcagcggcaacaagcugaucaccgugggcagcagcaacuaccagcagagcuucgugcccauccccggcgccagaccccaggugaacggccagagcggcagaaucgacuuccacuggcugaugcugaaccccaacgacaccgugaccuucagcuucaacggcgccuucaucgcccccgacagagccagcuuccugagaggcaagagcaugggcauccagagcgaggugcagguggacgccaacugcgagggcgacugcuaccacagcggcggcaccauccugaacaaccugcccuuccagaacaucaacggcagagccgugggcaagugccccagauacgugaagcaggagagccugcugcuggccaccggcaugaagaacgugcccgagauccccaagggcagaggccuguucggcgccaucgccggcuucaucgagaacggcugggagggccugguggacggcugguacggcuucagacaccagaacgcccagggcgagggcaccgccgccgacuacaagagcacccagagcgccaucgaccagaucaccggcaagcugaacagacugaucgagaagaccaaccagcaguucgagcugaucgacaacgaguucaccgagguggagaagcagaucggcaacgugaucaacuggaccagagacagcaugaccgagguguggagcuacaacgccgagcugcugguggccauggagaaccagcacaccaucgaccuggccgacagcgagaugaacaagcuguacgagagagugagaagacagcugagagagaacgccgaggaggacggcaccggcugcuucgagaucuuccacaagugcgacgacgacugcauggccagcaucagaaacaacaccuacgaccacagcaaguacagagaggaggccauccagaacagaauccagaucgaccccgugaagcugagcagcggcuacaaggacgugauccugugguucagcuucggcgccagcugcuucauccugcuggccaucgccaugggccugguguucaucugcgugaagaacggcaacaugagaugcaccaucugcaucuga

SEQ ID NO: 173894 - RNA, 1698 nt, Artificial Sequence; identical to SEQ ID NO: 162548
  derived and/or modified CDS sequence (opt4) from hemagglutinin__InfluenzaA__ACA28844

SEQ ID NO: 173895 - RNA, 1698 nt, Artificial Sequence; identical to SEQ ID NO: 167853
  derived and/or modified CDS sequence (opt4) from hemagglutinin__InfluenzaA__ACA28844/m1

SEQ ID NO: 173896 - RNA, 1701 nt, Artificial Sequence; identical to SEQ ID NO: 169210
  derived and/or modified CDS sequence (opt4) from hemagglutinin__InfluenzaA__ACV82259

SEQ ID NO: 173897 - RNA, 1701 nt, Artificial Sequence; identical to SEQ ID NO: 169210
  derived and/or modified CDS sequence (opt4) from hemagglutinin__InfluenzaA__ACV82259/m1

SEQ ID NO: 173898 - RNA, 1701 nt, Artificial Sequence; identical to SEQ ID NO: 169210
  derived and/or modified CDS sequence (opt4) from hemagglutinin__InfluenzaA__ACV82259/m2

SEQ ID NO: 173899 - RNA, 1701 nt, Artificial Sequence; identical to SEQ ID NO: 162727
  derived and/or modified CDS sequence (opt4) from hemagglutinin__InfluenzaA__ACP41953

SEQ ID NO: 173900 - RNA, 1701 nt, Artificial Sequence; identical to SEQ ID NO: 172301
  derived and/or modified CDS sequence (opt4) from hemagglutinin__InfluenzaA__AFM72832

SEQ ID NO: 173901 - RNA, 1701 nt, Artificial Sequence
  derived and/or modified CDS sequence (opt4) from hemagglutinin__InfluenzaA__EPI516528
augaaggccauccugguggugcugcuguacaccuucgccaccgccaacgccgacacccugugcaucggcuaccacgccaacaacagcaccgacaccguggacaccgugcuggagaagaacgugaccgugacccacagcgugaaccugcuggaggacaagcacaacggcaagcugugcaagcugagaggcguggccccccugcaccugggcaagugcaacaucgccggcuggauccugggcaaccccgagugcgagagccugagcaccgccagcagcuggagcuacaucguggagacccccagcagcgacaacggcaccugcuaccccggcgacuucaucgacuacgaggagcugagagagcagcugagcagcgugagcagcuucgagagauucgagaucuuccccaagaccagcagcuggcccaaccacgacagcaacaagggcgugaccgccgccugcccccacgccggcgccaagagcuucuacaagaaccugaucuggcuggugaagaagggcaacagcuaccccaagcugagcaagagcuacaucaacgacaagggcaaggaggugcuggugcuguggggcauccaccaccccagcaccagcgccgaccagcagagccuguaccagaacgccgacgccuacguguucgugggcagcagcagauacagcaagaaguucaagcccgagaucgccaucagacccaaggugagagaccaggagggcagaaugaacuacuacuggacccugguggagcccggcgacaagaucaccuucgaggccaccggcaaccugguggugcccagauacgccuucgccauggagagaaacgccggcagcggcaucaucaucagcgacacccccgugcacgacugcaacaccaccugccagacccccaagggcgccaucaacaccagccugcccuuccagaacauccaccccaucaccaucggcaagugccccaaguacgugaagagcaccaagcugagacuggccaccggccugagaaacauccccagcauccagagcagaggccuguucggcgccaucgccggcuucaucgagggcggcuggaccggcaugguggacggcugguacggcuaccaccaccagaacgagcagggcagcggcuacgccgccgaccugaagagcacccagaacgccaucgacgagaucaccaacaaggugaacagcgugaucgagaagaugaacacccaguucaccgccgugggcaaggaguucaaccaccuggagaagagaaucgagaaccugaacaagaagguggacgacggcuuccuggacaucuggaccuacaacgccgagcugcuggugcugcuggagaacgagagaacccuggacuaccacgacagcaacgugaagaaccuguacgagaaggugagaagccagcugaagaacaacgccaaggagaucggcaacggcugcuucgaguucuaccacaagugcgacaacaccugcauggagagcgugaagaacggcaccuacgacuaccccaaguacagcgaggaggccaagcugaacagagaggagaucgacggcgugaagcuggagagcaccagaaucuaccagauccuggccaucuacagcaccguggccagcagccuggugcugguggugagccugggcgccaucagcuucuggaugugcagcaacggcagccugcacugcagaaucugcguguga

SEQ ID NO: 173902 - RNA, 1701 nt, Artificial Sequence
  derived and/or modified CDS sequence (opt4) from hemagglutinin__InfluenzaA__AGM53850
augaaggccauccugguggugcugcuguacaccuucgccaccgccaacgccgacacccugugcaucggcuaccacgccaacaacagcaccgacaccguggacaccgugcuggagaagaacgugaccgugacccacagcgugaaccugcuggaggacaagcacaacggcaagcugugcaagcugagaggcguggccccccugcaccugggcaagugcaacaucgccggcuggauccugggcaaccccgagugcgagagccugagcaccgccagcagcuggagcuacaucguggagacccccagcagcgacaacggcaccugcuaccccggcgacuucaucgacuacgaggagcugagagagcagcugagcagcgugagcagcuucgagagauucgagaucuuccccaagaccagcagcuggcccaaccacgacagcaacaagggcgugaccgccgccugcccccacgccggcgccaagagcuucuacaagaaccugaucuggcuggugaagaagggcaacagcuaccccaagcugagcaagagcuacaucaacgacaagggcaaggaggugcuggugcuguggggcauccaccacccccccaccagcgccgaccagcagagccuguaccagaacgccgacgccuacguguucgugggcagcagcagauacagcaagaaguucaagcccgagaucgccaucagacccaaggugagagaccaggagggcagaaugaacuacuacuggacccugguggagcccggcgacaagaucaccuucgaggccaccggcaaccugguggugcccagauacgccuucgccauggagagaaacgccggcagcggcaucaucaucagcgacacccccgugcacgacugcaacaccaccugccagacccccaagggcgccaucaacaccagccugcccuuccagaacauccaccccaucaccaucggcaagugccccaaguacgugaagagcaccaagcugagacuggccaccggccugagaaacauccccagcauccagagcagaggccuguucggcgccaucgccggcuucaucgagggcggcuggaccggcaugguggacggcugguacggcuaccaccaccagaacgagcagggcagcggcuacgccgccgaccugaagagcacccagaacgccaucgacgagaucaccaacaaggugaacagcgugaucgagaagaugaacacccaguucaccgccgugggcaaggaguucaaccaccuggagaagagaaucgagaaccugaacaagaagguggacgacggcuuccuggacaucuggaccuacaacgccgagcugcuggugcugcuggagaacgagagaacccuggacuaccacgacagcaacgugaagaaccuguacgagaaggugagaagccagcugaagaacaacgccaaggagaucggcaacggcugcuucgaguucuaccacaagugcgacaacaccugcauggagagcgugaagaacggcaccuacgacuaccccaaguacagcgaggaggccaagcugaacagagaggagaucgacggcgugaagcuggagagcaccagaaucuaccagauccuggccaucuacagcaccguggccagcagccuggugcugguggugagccugggcgccaucagcuucuggaugugcagcaacggcagccugcagugcagaaucugcaucuga

SEQ ID NO: 173903 - RNA, 1701 nt, Artificial Sequence
  derived and/or modified CDS sequence (opt4) from hemagglutinin__InfluenzaA__EPI731463
augaaggccauccugguggugcugcuguacaccuucgccaccgccaacgccgacacccugugcaucggcuaccacgccaacaacagcaccgacaccguggacaccgugcuggagaagaacgugaccgugacccacagcgugaaccugcuggaggacaagcacaacggcaagcugugcaagcugagaggcguggccccccugcaccugggcaagugcaacaucgccggcuggauccugggcaaccccgagugcgagagccugagcaccgccagcagcuggagcuacaucguggagacccccagcagcgacaacggcaccugcuaccccggcgacuucaucgacuacgaggagcugagagagcagcugagcagcgugagcagcuucgagagauucgagaucuuccccaacaccagcagcuggcccaaccacgacagcaacaagggcgugaccgccgccugcccccacgccggcgccaagagcuucuacaagaaccugaucuggcuggugaagaagggcaacagcuaccccaagcugagcaagagcuacaucaacgacaagggcaaggaggugcuggugcuguggggcauccaccaccccagcaccagcgccgaccagcagagccuguaccagaacgccgacgccuacguguucgugggcagcagcagauacagcaagaaguucaagcccgagaucgccaucagacccaaggugagaggccaggagggcagaaugaacuacuacuggacccugguggagcccggcgacaagaucaccuucgaggccaccggcaaccugguggugcccagauacgccuucgccauggagagaaacgccggcagcggcaucaucaucagcgacacccccgugcacgacugcaacaccaccugccagacccccaagggcgccaucaacaccagccugcccuuccagaacauccaccccaucaccaucggcaagugccccaaguacgugaagagcaccaagcugagacuggccaccggccugagaaacauccccagcauccagagcagaggccuguucggcgccaucgccggcuucaucgagggcggcuggaccggcaugguggacggcugguacggcuaccaccaccagaacgagcagggcagcggcuacgccgccgaccugaagagcacccagaacgccaucgacgagaucaccaacaaggugaacagcgugaucgagaagaugaacacccaguucaccgccgugggcaaggaguucaaccaccuggagaagagaaucgagaaccugaacaagaagguggacgacggcuuccuggacaucuggaccuacaacgccgagcugcuggugcugcuggagaacgagagaacccuggacuaccacgacagcaacgugaagaaccuguacgagaaggugagaagccagcugaagaacaacgccaaggagaucggcaacggcugcuucgaguucuaccacaagugcgacaacaccugcauggagagcgugaagaacggcaccuacgacuaccccaaguacagcgaggaggccaagcugaacagagaggagaucgacggcgugaagcuggagagcaccagaaucuaccagauccuggccaucuacagcaccguggccagcagccuggugcugguggugagccugggcgccaucagcuucuggaugugcagcaacggcagccugcagugcagaaucugcaucuga

SEQ ID NO: 173904 - RNA, 1701 nt, Artificial Sequence; identical to SEQ ID NO: 164558
  derived and/or modified CDS sequence (opt4) from hemagglutinin__InfluenzaA__EPI696972

SEQ ID NO: 173905 - RNA, 1701 nt, Artificial Sequence; identical to SEQ ID NO: 173746
  derived and/or modified CDS sequence (opt4) from hemagglutinin__InfluenzaA__EPI662594

SEQ ID NO: 173906 - RNA, 1701 nt, Artificial Sequence
  derived and/or modified CDS sequence (opt4) from hemagglutinin__InfluenzaA__EPI685579
augaaggccauccugguggugcugcuguacaccuucaccaccgccaacgccgacacccugugcaucggcuaccacgccaacaacagcaccgacaccguggacaccgugcuggagaagaacgugaccgugacccacagcgugaaccugcuggaggacaagcacaacggcaagcugugcaagcugagaggcguggccccccugcaccugggcaagugcaacaucgccggcuggauccugggcaaccccgagugcgagagccugagcaccgccagcagcuggagcuacaucguggagaccagcaacagcgacaacggcaccugcuaccccggcgacuucaucaacuacgaggagcugagagagcagcugagcagcgugagcagcuucgagagauucgagaucuuccccaagaccagcagcuggcccaaccacgacagcaacaagggcgugaccgccgccugcccccacgccggcgccaagagcuucuacaagaaccugaucuggcuggugaagaagggcaacagcuaccccaagcugaaccagagcuacaucaacgacaagggcaaggaggugcuggugcuguggggcauccaccaccccagcaccaccgccgaccagcagagccuguaccagaacgccgacgccuacguguucgugggcaccagcagauacagcaagaaguucaagcccgagaucgccaccagacccaaggugagagacagagagggcagaaugaacuacuacuggacccugguggagcccggcgacaagaucaccuucgaggccaccggcaaccugguggugcccagauacgccuucaccauggagagaaacgccggcagcggcaucaucaucagcgacacccccgugcacgacugcaacaccaccugccagacccccgagggcgccaucaacaccagccugcccuuccagaacauccaccccaucaccaucggcaagugccccaaguacgugaagagcaccaagcugagacuggccaccggccugagaaacgugcccagcauccagagcagaggccuguucggcgccaucgccggcuucaucgagggcggcuggaccggcaugguggacggcugguacggcuaccaccaccagaacgagcagggcagcggcuacgccgccgaccugaagagcacccagaacgccaucgacaagaucaccaacaaggugaacagcgugaucgagaagaugaacacccaguucaccgccgugggcaaggaguucaaccaccuggagaagagaaucgagaaccugaacaagaagguggacgacggcuuccuggacaucuggaccuacaacgccgagcugcuggugcugcuggagaacgagagaacccuggacuaccacgacagcaacgugaagaaccuguacgagaaggugagaaaccagcugaagaacaacgccaaggagaucggcaacggcugcuucgaguucuaccacaagugcgacaacaccugcauggagagcgugaagaacggcaccuacgacuaccccaaguacagcgaggaggccaagcugaacagagagaagaucgacggcgugaagcuggagagcaccagaaucuaccagauccuggccaucuacagcaccguggccagcagccuggugcugguggugagccugggcgccaucagcuucuggaugugcagcaacggcagccugcagugcagaaucugcaucuga

SEQ ID NO: 173907 - RNA, 1701 nt, Artificial Sequence
  derived and/or modified CDS sequence (opt4) from hemagglutinin__InfluenzaA__EPI830230
augaaggccauccugguggugcugcuguacaccuucaccaccgccaacgccgacacccugugcaucggcuaccacgccaacaacagcaccgacaccguggacaccgugcuggagaagaacgugaccgugacccacagcgugaaccugcuggaggacaagcacaacggcaagcugugcaagcugagaggcguggccccccugcaccugggcaagugcaacaucgccggcuggauccugggcaaccccgagugcgagagccugagcaccgccagcagcuggagcuacaucguggagaccagcaacagcgacaacggcaccugcuaccccggcgacuucaucaacuacgaggagcugagagagcagcugagcagcgugagcagcuucgagagauucgagaucuuccccaagaccagcagcuggcccaaccacgacagcaacaagggcgugaccgccgccugcccccacgccggcgccaagagcuucuacaagaaccugaucuggcuggugaagaagggcaacagcuaccccaagcugaaccagagcuacaucaacgacaagggcaaggaggugcuggugcuguggggcauccaccaccccagcaccaccgccgaccagcagagccuguaccagaacgccgacgccuacguguucgugggcaccagcagauacagcaagauguucaagcccgagaucgccaccagacccaaggugagagacagagagggcagaaugaacuacuacuggacccugguggagcccggcgacaagaucaccuucgaggccaccggcaaccugguggugcccagauacgccuucaccauggagagaaacgccggcagcggcaucaucaucagcgacacccccgugcacgacugcaacaccaccugccagacccccgagggcgccaucaacaccagccugcccuuccagaacauccaccccaucaccaucggcaagugccccaaguacgugaagagcaccaagcugagacuggccaccggccugagaaacgugcccagcauccagagcagaggccuguucggcgccaucgccggcuucaucgagggcggcuggaccggcaugguggacggcugguacggcuaccaccaccagaacgagcagggcagcggcuacgccgccgaccugaagagcacccagaacgccaucgacaagaucaccaacaaggugaacagcgugaucgagaagaugaacacccaguucaccgccgugggcaaggaguucaaccaccuggagaagagaaucgagaaccugaacaagaagguggacgacggcuuccuggacaucuggaccuacaacgccgagcugcuggugcugcuggagaacgagagaacccuggacuaccacgacagcaacgugaagaaccuguacgagaaggugagaaaccagcugaagaacaacgccaaggagaucggcaacggcugcuucgaguucuaccacaagugcgacaacaccugcauggagagcgugaagaacggcaccuacgacuaccccaaguacagcgaggaggccaagcugaacagagagaagaucgacggcgugaagcuggagagcaccagaaucuaccagauccuggccaucuacagcaccguggccagcagccuggugcugguggugagccugggcgccaucagcuucuggaugugcagcaacggcagccugcagugcagaaucugcaucuga

SEQ ID NO: 173908 - RNA, 1701 nt, Artificial Sequence; identical to SEQ ID NO: 162716
  derived and/or modified CDS sequence (opt4) from hemagglutinin__InfluenzaA__ACQ45338

SEQ ID NO: 173909 - RNA, 1701 nt, Artificial Sequence; identical to SEQ ID NO: 162716
  derived and/or modified CDS sequence (opt4) from hemagglutinin__InfluenzaA__ACQ45338/m1

SEQ ID NO: 173910 - RNA, 1701 nt, Artificial Sequence; identical to SEQ ID NO: 162716
  derived and/or modified CDS sequence (opt4) from hemagglutinin__InfluenzaA__ACQ45338/m2

SEQ ID NO: 173911 - RNA, 1701 nt, Artificial Sequence; identical to SEQ ID NO: 162378
  derived and/or modified CDS sequence (opt4) from hemagglutinin__InfluenzaA__ACU79871

SEQ ID NO: 173912 - RNA, 1701 nt, Artificial Sequence
  derived and/or modified CDS sequence (opt4) from hemagglutinin__InfluenzaA__ACU79871/m1
augaagaccaucaucgcccugagcuacaucuucugccuggcccugggccaggaccugcccggcaacgacaacagcaccgccacccugugccugggccaccacgccgugcccaacggcacccuggugaagaccaucaccgacgaccagaucgaggugaccaacgccaccgagcuggugcagagcagcagcaccggcaagaucugcaacaacccccacagaauccuggacggcaucgacugcacccugaucgacgcccugcugggcgacccccacugcgacguguuccagaacgagaccugggaccuguucguggagagaagcaaggccuucagcaacugcuaccccuacgacgugcccgacuacgccagccugagaagccugguggccagcagcggcacccuggaguucaucaccgagggcuucaccuggaccggcgugacccagaacggcggcagcaacgccugcaagagaggccccggcagcggcuucuucagcagacugaacuggcugaccaagagcggcagcaccuaccccgugcugaacgugaccaugcccaacaacgacaacuucgacaagcuguacaucuggggcgugcaccaccccagcaccaaccaggagcagaccagccuguacgugcaggccagcggcagagugaccgugagcaccagaagaagccagcagaccaucauccccaacaucgagagcagacccugggugagaggccagagcagcagaaucagcaucuacuggaccaucgugaagcccggcgacgugcuggugaucaacagcaacggcaaccugaucgcccccagaggcuacuucaagaugagaaccggcaagagcagcaucaugagaagcgacgcccccaucgacaccugcaucagcgagugcaucacccccaacggcagcauccccaacgacaagcccuuccagaacgugaacaagaucaccuacggcgccugccccaaguacgugaagcagaacacccugaagcuggccaccggcaugagaaacgugcccgagaagcagaccagaggccuguucggcgccaucgccggcuucaucgagaacggcugggagggcaugaucgacggcugguacggcuucagacaccagaacagcgagggcaccggccaggccgccgaccugaagagcacccaggccgccaucgaccagaucaacggcaaggugaacagaaucaucgagaagaccaacgagaaguuccaccagaucgagaaggaguucagcgagguggagggcagaauccaggaccuggagaaguacguggaggacaccaagaucgaccuguggagcuacaacgccgagcugcugguggcccuggagaaccagcacaccaucgaccugaccgacagcgagaugaacaagcuguucgagaagaccagaagacagcugagagagaacgccgaggacaugggcaacggcugcuucaagaucuaccacaagugcgacaacgccugcaucgagagcaucagaagcggcaccuacgaccacgacguguacagagacgaggcccugaacaacagauuccagaucaagggcguggagcugaagagcggcuacaaggacuggauccuguggaucagcuucgccaucagcugcuuccugcugugcguggugcugcugggcuucaucaugugggccugccagagaggcaacaucagaugcaacaucugcaucuga

SEQ ID NO: 173913 - RNA, 1701 nt, Artificial Sequence
  derived and/or modified CDS sequence (opt4) from hemagglutinin__InfluenzaA__EPI643118
augaagaccaucaucgcccugagcuacauccugugccugguguucgcccagaagauccccggcaacgacaacagcaccgccacccugugccugggccaccacgccgugcccaacggcaccaucgugaagaccaucaccaacgacagaaucgaggugaccaacgccaccgagcuggugcagaacagcagcaucggcgagaucugcgacagcccccaccagauccuggacggcgagaacugcacccugaucgacgcccugcugggcgacccccagugcgacggcuuccagaacaagaagugggaccuguucguggagagaagcaaggccuacagcaacugcuaccccuacgacgugcccgacuacgccagccugagaagccugguggccagcagcggcacccuggaguucaacaacgagagcuucaacuggaccggcgugacccagaacggcaccagcagcgccugcaucagaagaagcagcagcagcuucuucagcagacugaacuggcugacccaccugaacuacaaguaccccgcccugaacgugaccaugcccaacaacgagcaguucgacaagcuguacaucuggggcgugcaccaccccggcaccgacaaggaccagaucuuccccuacgcccagagcagcggcagaaucaucgugagcaccaagagaagccagcaggccgugauccccaacaucggcagcagacccagaaucagagacauccccagcagaaucagcaucuacuggaccaucgugaagcccggcgacauccugcugaucaacagcaccggcaaccugaucgcccccagaggcuacuucaagcugagaagcggcaagagcagcaucaugagaagcgacgcccccaucggcaagugcaagagcgagugcaucacccccaacggcagcauccccaacgacaagcccuuccagaacgugaacagaaucaccuacggcgccugccccagauacgugaagcacagcacccugaagcuggccaccggcaugagaaacgugcccgagaagcagaccagaggcaucuucggcgccaucgccggcuucaucgagaacggcugggagggcaugguggacggcugguacggcuucagacaccagaacagcgagggcagaggccaggccgccgaccugaagagcacccaggccgccaucgaccagaucaacggcaagcugaacagacugaucggcaagaccaacgagaaguuccaccagaucgagaaggaguucagcgagguggagggcagaauccaggaccuggagaaguacguggaggacaccaagaucgaccuguggagcuacaacgccgagcugcugguggcccuggagaaccagcacaccaucgaccugaccgacagcgagaugaacaagcuguucgagaagaccaagaagcagcugagagagaacgccgaggacaugggcaacggcugcuucaagaucuaccacaagugcgacaacgccugcaucggcagcaucagaaacggcaccuacgaccacaacguguacagagacgaggcccugaacaacagauuccagaucaagggcguggagcugaagagcggcuacaaggacuggauccuguggaucagcuucgccaucagcugcuuccugcugugcguggcccugcugggcuucaucaugugggccugccagaagggcaacaucagaugcaacaucugcaucuga

SEQ ID NO: 173914 - RNA, 1701 nt, Artificial Sequence; identical to SEQ ID NO: 172501
  derived and/or modified CDS sequence (opt4) from hemagglutinin__InfluenzaA__EPI675798

SEQ ID NO: 173915 - RNA, 1701 nt, Artificial Sequence
  derived and/or modified CDS sequence (opt4) from hemagglutinin__InfluenzaA__EPI578430
augaagaccaucaucgcccugagcuacauccugugccugguguucgcccagaagauccccggcaacgacaacagcaccgccacccugugccugggccaccacgccgugcccaacggcaccaucgugaagaccaucaccaacgacagaaucgaggugaccaacgccaccgagcuggugcagaacagcagcaucggcgagaucugcgacagcccccaccagauccuggacggcgagaacugcacccugaucgacgcccugcugggcgacccccagugcgacggcuuccagaacaagaagugggaccuguucguggagagaagcaaggccuacagcagcugcuaccccuacgacgugcccgacuacgccagccugagaagccugguggccagcagcggcacccuggaguucaacaacgagagcuucaacuggaccggcgugacccagaacggcaccagcagcgccugcaucagaagaagcagcagcagcuucuucagcagacugaacuggcugacccaccugaacuacaaguaccccgcccugaacgugaccaugcccaacaacgagcaguucgacaagcuguacaucuggggcgugcaccaccccggcaccgacaaggaccagaucuuccccuacgcccagagcagcggcagaaucaccgugagcaccaagagaagccagcaggccgugauccccaacaucggcagcagacccagaaucagagacauccccagcagaaucagcaucuacuggaccaucgugaagcccggcgacauccugcugaucaacagcaccggcaaccugaucgcccccagaggcuacuucaagaucagaagcggcaagagcagcaucaugagaagcgacgcccccaucggcaagugcaagagcgagugcaucacccccaacggcagcauccccaacgacaagcccuuccagaacgugaacagaaucaccuacggcgccugccccagauacgugaagcacagcacccugaagcuggccaccggcaugagaaacgugcccgagaagcagaccagaggcaucuucggcgccaucgccggcuucaucgagaacggcugggagggcaugguggacggcugguacggcuucagacaccagaacagcgagggcagaggccaggccgccgaccugaagagcacccaggccgccaucgaccagaucaacggcaagcugaacagacugaucggcaagaccaacgagaaguuccaccagaucgagaaggaguucagcgagguggagggcagaauccaggaccuggagaaguacguggaggacaccaagaucgaccuguggagcuacaacgccgagcugcugguggcccuggagaaccagcacaccaucgaccugaccgacagcgagaugaacaagcuguucgagaagaccaagaagcagcugagagagaacgccgaggacaugggcaacggcugcuucaagaucuaccacaagugcgacaacgccugcaucggcagcaucagaaacggcaccuacgaccacaacguguacagagacgaggcccugaacaacagauuccagaucaagggcguggagcugaagagcggcuacaaggacuggauccuguggaucagcuucgccaucagcugcuuccugcugugcguggcccugcugggcuucaucaugugggccugccagaagggcaacaucagaugcaacaucugcaucuga

SEQ ID NO: 173916 - RNA, 1701 nt, Artificial Sequence
  derived and/or modified CDS sequence (opt4) from hemagglutinin__InfluenzaA__EPI614406
augaagaccaucaucgcccugagcuacauccugugccugguguucgcccagaagauccccggcaacgacaacagcaccgccacccugugccugggccaccacgccgugcccaacggcaccaucgugaagaccaucaccaacgacagaaucgaggugaccaacgccaccgagcuggugcagaacagcagcaucggcgagaucugcgacagcccccaccagauccuggacggcgagaacugcacccugaucgacgcccugcugggcgacccccagugcgacggcuuccagaacaagaagugggaccuguucguggagagaagcaaggccuacagcagcugcuaccccuacgacgugcccgacuacgccagccugagaagccugguggccagcagcggcacccuggaguucaacaacgagagcuucaacuggaccggcgugacccagaacggcaccagcagcgccugcaucagaagaagcagcagcagcuucuucagcagacugaacuggcugacccaccugaacuacaaguaccccgcccugaacgugaccaugcccaacaacgagcaguucgacaagcuguacaucuggggcgugcaccaccccggcaccgacaaggaccagaucuuccccuacgcccagagcagcggcagaaucaccgugagcaccaagagaagccagcaggccgugauccccaacaucggcagcagacccagaaucagaaacauccccagcagaaucagcaucuacuggaccaucgugaagcccggcgacauccugcugaucaacagcaccggcaaccugaucgcccccagaggcuacuucaagaucagaagcggcaagagcagcaucaugagaagcgacgcccccaucggcaagugcaagagcgagugcaucacccccaacggcagcauccccaacgacaagcccuuccagaacgugaacagaaucaccuacggcgccugccccagauacgugaagcacagcacccugaagcuggccaccggcaugagaaacgugcccgagaagcagaccagaggcaucuucggcgccaucgccggcuucaucgagaacggcugggagggcaugguggacggcugguacggcuucagacaccagaacagcgagggcagaggccaggccgccgaccugaagagcacccaggccgccaucgaccagaucaacggcaagcugaacagacugaucggcaagaccaacgagaaguuccaccagaucgagaaggaguucagcgagguggagggcagaauccaggaccuggagaaguacguggaggacaccaagaucgaccuguggagcuacaacgccgagcugcugguggcccuggagaaccagcacaccaucgaccugaccgacagcgagaugaacaagcuguucgagaagaccaagaagcagcugagagagaacgccgaggacaugggcaacggcugcuucaagaucuaccacaagugcgacaacgccugcaucggcagcaucagaaacggcaccuacgaccacaacguguacagagacgaggcccugaacaacagauuccagaucaagggcguggagcugaagagcggcuacaaggacuggauccuguggaucagcuucgccaucagcugcuuccugcugugcguggcccugcugggcuucaucaugugggccugccagaagggcaacaucagaugcaacaucugcaucuga

SEQ ID NO: 173917 - RNA, 1695 nt, Artificial Sequence
  derived and/or modified CDS sequence (opt4) from hemagglutinin__InfluenzaA__ACU65077/m1
auggagaagaucgugcugcuguucgccaucgugagccuggugaagagcgaccagaucugcaucggcuaccacgccaacaacagcaccgagcagguggacaccaucauggagaagaacgugaccgugacccacgcccaggacauccuggagaagacccacaacggcaagcugugcgaccuggacggcgugaagccccugauccugagagacugcagcguggccggcuggcugcugggcaaccccaugugcgacgaguucaucaacgugcccgaguggagcuacaucguggagaaggccaaccccgugaacgaccugugcuaccccggcgacuucaacgacuacgaggagcugaagcaccugcugagcagaaucaaccacuucgagaagauccagaucauccccaagagcagcuggagcagccacgaggccagccugggcgugagcagcgccugccccuaccagggcaagagcagcuucuucagaaacgugguguggcugaucaagaagaacagcaccuaccccaccaucaagagaagcuacaacaacaccaaccaggaggaccugcuggugcuguggggcauccaccaccccaacgacgccgccgagcagaccaagcuguaccagaaccccaccaccuacaucagcgugggcaccagcacccugaaccagagacuggugcccagaaucgccaccagaagcaaggugaacggccagagcggcagaauggaguucuucuggaccauccugaagcccaacgacgccaucaacuucgagagcaacggcaacuucaucgcccccgaguacgccuacaagaucgugaagaagggcgacagcaccaucaugaagagcgagcuggaguacggcaacugcaacaccaagugccagacccccaugggcgccaucaacagcagcaugcccuuccacaacauccacccccugaccaucggcgagugccccaaguacgugaagagcaacagacuggugcuggccaccggccugagaaacagcccccagagagagaccagaggccuguucggcgccaucgccggcuucaucgagggcggcuggcagggcaugguggacggcugguacggcuaccaccacagcaacgagcagggcagcggcuacgccgccgacaaggagagcacccagaaggccaucgacggcgugaccaacaaggugaacagcaucaucgacaagaugaacacccaguucgaggccgugggcagagaguucaacaaccuggagagaagaaucgagaaccugaacaagaagauggaggacggcuuccuggacguguggaccuacaacgccgagcugcuggugcugauggagaacgagagaacccuggacuuccacgacagcaacgugaagaaccuguacgacaaggugagacugcagcugagagacaacgccaaggagcugggcaacggcugcuucgaguucuaccacaagugcgacaacgagugcauggagagcgugagaaacggcaccuacgacuacccccaguacagcgaggaggccagacugaagagagaggagaucagcggcgugaagcuggagagcaucggcaucuaccagauccugagcaucuacagcaccguggccagcagccuggcccuggccaucaugguggccggccugagccuguggaugugcagcaacggcagccugcagugcagaaucugcaucuga

SEQ ID NO: 173918 - RNA, 1695 nt, Artificial Sequence; identical to SEQ ID NO: 173917
  derived and/or modified CDS sequence (opt4) from hemagglutinin__InfluenzaA__ACU65077/m2

SEQ ID NO: 173919 - RNA, 1707 nt, Artificial Sequence; identical to SEQ ID NO: 160088
  derived and/or modified CDS sequence (opt4) from hemagglutinin__InfluenzaA__ABP51976

SEQ ID NO: 173920 - RNA, 1707 nt, Artificial Sequence; identical to SEQ ID NO: 160088
  derived and/or modified CDS sequence (opt4) from hemagglutinin__InfluenzaA__ABP51976/m1

SEQ ID NO: 173921 - RNA, 1695 nt, Artificial Sequence
  derived and/or modified CDS sequence (opt4) from hemagglutinin__InfluenzaA__ABW90125
auggagaagaucgugcugcuguucgccaucgugagccuggugaagagcgaccagaucugcaucggcuaccacgccaacaacagcaccgagcagguggacaccaucauggagaagaacgugaccgugacccacgcccaggacauccuggagaagaagcacaacggcaagcugugcgaccuggacggcgugaagccccugauccugagagacugcagcguggccggcuggcugcugggcaaccccaugugcgacgaguucaucaacgugcccgaguggagcuacaucguggagaaggccaaccccgugaacgaccugugcuaccccggcgacuucaacgacuacgaggagcugaagcaccugcugagcagaaucaaccacuucgagaagauccagaucauccccaagagcuacuggagcagccacgaggccagccugggcgugagcagcgccugccccuaccagggcaagagcagcuucuucagaaacgugguguggcugaccaagaagaacagcaccuaccccaccaucaagagaagcuacaacaacaccaaccaggaggaccugcuggugcuguggggcauccaccaccccaacgacgccgccgagcagaccaagcuguaccagaaccccaccaccuacaucagcgugggcaccagcacccugaaccagagacuggugcccagaaucgccaccagaagcaaggugaacggccagagcggcagaauggaguucuucuggaccauccugaagcccaacgacgccaucaacuucgagagcaacggcaacuucaucgcccccgaguacgccuacaagaucgugaagaagggcgacagcaccaucaugaagagcgagcuggaguacggcaacugcaacaccaagugccagacccccaugggcgccaucaacagcagcaugcccuuccacaacauccacccccugaccaucggcgagugccccaaguacgugaagagcaacagacuggugcuggccaccggccugagaaacagcccccagagagagaccagaggccuguucggcgccaucgccggcuucaucgagggcggcuggcagggcaugguggacggcugguacggcuaccaccacagcaacgagcagggcagcggcuacgccgccgacaaggagagcacccagaaggccaucgacggcgugaccaacaaggugaacagcaucaucgacaagaugaacacccaguucgaggccgugggcagagaguucaacaaccuggagagaagaaucgagaaccugaacaagaagauggaggacggcuuccuggacguguggaccuacaacgccgagcugcuggugcugauggagaacgagagaacccuggacuuccacgacagcaacgugaagaaccuguacgacaaggugagacugcagcugagagacaacgccaaggagcugggcaacggcugcuucgaguucuaccacaagugcgacaacgagugcauggagagcgugagaaacggcaccuacgacuacccccaguacagcgaggaggccagacugaagagagaggagaucagcggcgugaagcuggagagcaucggcaucuaccagauccugagcaucuacagcaccguggccagcagccuggcccuggccaucaugguggccggccugagccuguggaugugcagcaacggcagccugcagugcagaaucugcaucuga

SEQ ID NO: 173922 - RNA, 1695 nt, Artificial Sequence
  derived and/or modified CDS sequence (opt4) from hemagglutinin__InfluenzaA__ABW90126
auggagaagaucgugcugcuguucgccaucgugagccuggugaagagcgaccagaucugcaucggcuaccacgccaacaacagcaccgagcagguggacaccaucauggagaagaacgugaccgugacccacgcccaggacauccuggagaagaagcacaacggcaagcugugcgaccuggacggcgugaagccccugauccugagagacugcagcguggccggcuggcugcugggcaaccccaugugcgacgaguucaucaacgugcccgaguggagcuacaucguggagaaggccaaccccgugaacgaccugugcuaccccggcgacuucaacgacuacgaggagcugaagcaccugcugagcagaaucaaccacuucgagaagauccagaucauccccaagagcagcuggagcagccacgaggccagccugggcgugagcagcgccugccccuaccagggcaagagcagcuucuucagaaacgugguguggcugaucaagaagaacagcaccuaccccaccaucaagggcagcuacaacaacaccaaccaggaggaccugcuggugcuguggggcauccaccaccccaacgacgccgccgagcagaccaagcuguaccagaaccccaccaccuacaucagcgugggcaccagcacccugaaccagagacuggugcccagaaucgccaccagaagcaaggugaacggccagagcggcagaauggaguucuucuggaccauccugaagcccaacgacgccaucaacuucgagagcaacggcaacuucaucgcccccgaguacgccuacaagaucgugaagaagggcgacagcaccaucaugaagagcgagcuggaguacggcaacugcaacaccaagugccagacccccaugggcgccaucaacagcagcaugcccuuccacaacauccacccccugaccaucggcgagugccccaaguacgugaagagcaacagacuggugcuggccaccggccugagaaacagcccccagagagagaccagaggccuguucggcgccaucgccggcuucaucgagggcggcuggcagggcaugguggacggcugguacggcuaccaccacagcaacgagcagggcagcggcuacgccgccgacaaggagagcacccagaaggccaucgacggcgugaccaacaaggugaacagcaucaucgacaagaugaacacccaguucgaggccgugggcagagaguucaacaaccuggagagaagaaucgagaaccugaacaagaagauggaggacggcuuccuggacguguggaccuacaacgccgagcugcuggugcugauggagaacgagagaacccuggacuuccacgacagcaacgugaagaaccuguacgacaaggugagacugcagcugagagacaacgccaaggagcugggcaacggcugcuucgaguucuaccacaagugcgacaacgagugcauggagagcgugagaaacggcaccuacgacuacccccaguacagcgaggaggccagacugaagagagaggagaucagcggcgugaagcuggagagcaucggcaucuaccagauccugagcaucuacagcaccguggccagcagccuggcccuggccaucaugguggccggccugagccuguggaugugcagcaacggcagccugcagugcagaaucugcaucuga

SEQ ID NO: 173923 - RNA, 1695 nt, Artificial Sequence
  derived and/or modified CDS sequence (opt4) from hemagglutinin__InfluenzaA__ABW90127
auggagaagaucgugcugcuguucgccaucgugagccuggugaagagcgaccagaucugcaucggcuaccacgccaacaacagcaccgagcagguggacaccaucauggagaagaacgugaccgugacccacgcccaggacauccuggagaagaagcacaacggcaagcugugcgaccuggacggcgugaagccccugauccugagagacugcagcguggccggcuggcugcugggcaaccccaugugcgacgaguucaucaacgugcccgaguggagcuacaucguggagaaggccaaccccgugaacgaccugugcuaccccggcgacuucaacgacuacgaggagcugaagcaccugcugagcagaaucaaccacuucgagaagauccagaucauccccaagagcagcuggagcagccacgaggccagccugggcgugagcagcgccugccccuaccagggcgagagcagcuucuucagaaacgugguguggcugaucaagaagaacagcaccuaccccaccaucaagagaagcuacaacaacaccaaccaggaggaccugcuggugcuguggggcauccaccaccccaacgacgccgccgagcagaccaagcuguaccagaaccccaccaccuacaucagcgugggcaccagcacccugaaccagagacuggugcccagaaucgccaccagaagcaaggugaacggccagagcggcagaauggaguucuucuggaccauccugaagcccaacgacgccaucaacuucgagagcaacggcaacuucaucgcccccgaguacgccuacaagaucgugaagaagggcgacagcaccaucaugaagagcgagcuggaguacggcaacugcaacaccaagugccagacccccaugggcgccaucaacagcagcaugcccuuccacaacauccacccccugaccaucggcgagugccccaaguacgugaagagcaacagacuggugcuggccaccggccugagaaacagcccccagagagagaccagaggccuguucggcgccaucgccggcuucaucgagggcggcuggcagggcaugguggacggcugguacggcuaccaccacagcaacgagcagggcagcggcuacgccgccgacaaggagagcacccagaaggccaucgacggcgugaccaacaaggugaacagcaucaucgacaagaugaacacccaguucgaggccgugggcagagaguucaacaaccuggagagaagaaucgagaaccugaacaagaagauggaggacggcuuccuggacguguggaccuacaacgccgagcugcuggugcugauggagaacgagagaacccuggacuuccacgacagcaacgugaagaaccuguacgacaaggugagacugcagcugagagacaacgccaaggagcugggcaacggcugcuucgaguucuaccacaagugcgacaacgagugcauggagagcgugagaaacggcaccuacgacuacccccaguacagcgaggaggccagacugaagagagaggagaucagcggcgugaagcuggagagcaucggcaucuaccagauccugagcaucuacagcaccguggccagcagccuggcccuggccaucaugguggccggccugagccuguggaugugcagcaacggcagccugcagugcagaaucugcaucuga

SEQ ID NO: 173924 - RNA, 1695 nt, Artificial Sequence
  derived and/or modified CDS sequence (opt4) from hemagglutinin__InfluenzaA__ABW90128
auggagaagaucgugcugcuguucgccaucgugagccuggugaagagcgaccagaucugcaucggcuaccacgccaacaacagcaccgagcagguggacaccaucauggagaagaacgugaccgugacccacgcccaggacauccuggagaagaagcacaacggcaagcugugcgaccuggacggcgugaagccccugauccugagagacugcagcguggccggcuggcugcugggcaaccccaugugcgacgaguucaucaacgugcccgaguggagcuacaucguggagaaggccaaccccgugaacgaccugugcuaccccggcgacuucaacgacuacgaggagcugaagcaccugcugagcagaaucaaccacuucgagaagauccagaucauccccaagagcagcuggagcagccacgaggccagccugggcgugagcagcgccugccccuaccagggcaagagcagcuucuucagaaacgugguguggcugaucgagaagaacagcaccuaccccaccaucaagagaagcuacaacaacaccaaccaggaggaccugcuggugcuguggggcauccaccaccccaacgacgccgccgagcagaccaagcuguaccagaaccccaccaccuacaucagcgugggcaccagcacccugaaccagagacuggugcccagaaucgccaccagaagcaaggugaacggccagagcggcagaauggaguucuucuggaccauccugaagcccaacgacgccaucaacuucgagagcaacggcaacuucaucgcccccgaguacgccuacaagaucgugaagaagggcgacagcaccaucaugaagagcgagcuggaguacggcaacugcaacaccaagugccagacccccaugggcgccaucaacagcagcaugcccuuccacaacauccacccccugaccaucggcgagugccccaaguacgugaagagcaacagacuggugcuggccaccggccugagaaacagcccccagagagagaccagaggccuguucggcgccaucgccggcuucaucgagggcggcuggcagggcaugguggacggcugguacggcuaccaccacagcaacgagcagggcagcggcuacgccgccgacaaggagagcacccagaaggccaucgacggcgugaccaacaaggugaacagcaucaucgacaagaugaacacccaguucgaggccgugggcagagaguucaacaaccuggagagaagaaucgagaaccugaacaagaagauggaggacggcuuccuggacguguggaccuacaacgccgagcugcuggugcugauggagaacgagagaacccuggacuuccacgacagcaacgugaagaaccuguacgacaaggugagacugcagcugagagacaacgccaaggagcugggcaacggcugcuucgaguucuaccacaagugcgacaacgagugcauggagagcgugagaaacggcaccuacgacuacccccaguacagcgaggaggccagacugaagagagaggagaucagcggcgugaagcuggagagcaucggcaucuaccagauccugagcaucuacagcaccguggccagcagccuggcccuggccaucaugguggccggccugagccuguggaugugcagcaacggcagccugcagugcagaaucugcaucuga

SEQ ID NO: 173925 - RNA, 1695 nt, Artificial Sequence
  derived and/or modified CDS sequence (opt4) from hemagglutinin__InfluenzaA__ABW90129
auggagaagaucgugcugcuguucgccaucgugagccuggugaagagcgaccagaucugcaucggcuaccacgccaacaacagcaccgagcagguggacaccaucauggagaagaacgugaccgugacccacgcccaggacauccuggagaagaagcacaacggcaagcugugcgaccuggacggcgugaagccccugauccugagagacugcagcguggccggcuggcugcugggcaaccccaugugcgacgaguucaucaacgugcccgaguggagcuacaucguggagaaggccaaccccgugaacgaccugugcuaccccggcgacuucaacgacuacgaggagcugaagcaccugcugagcagaaucaaccacuucgagaagauccagaucauccccaagagcagcuggagcagccacgaggccagccugggcgugagcagcgccugccccuaccagggcaagagcagcuucuucagaaacgugguguggcugaucaagaagaacagcgccuaccccaccaucaagagaagcuacaacaacaccaaccaggaggaccugcuggugcuguggggcauccaccaccccaacgacgccgccgagcagaccgagcuguaccagaaccccaccaccuacaucagcgugggcaccagcacccugaaccagagacuggugcccagaaucgccaccagaagcaaggugaacggccagagcggcagaauggaguucuucuggaccauccugaagcccaacgacgccaucaacuucgagagcaacggcaacuucaucgcccccgaguacgccuacaagaucgugaagaagggcgacagcaccaucaugaagagcgagcuggaguacggcaacugcaacaccaagugccagacccccaugggcgccaucaacagcagcaugcccuuccacaacauccacccccugaccaucggcgagugccccaaguacgugaagagcaacagacuggugcuggccaccggccugagaaacagcccccagagagagaccagaggccuguucggcgccaucgccggcuucaucgagggcggcuggcagggcaugguggacggcugguacggcuaccaccacagcaacgagcagggcagcggcuacgccgccgacaaggagagcacccagaaggccaucgacggcgugaccaacaaggugaacagcaucaucgacaagaugaacacccaguucgaggccgugggcagagaguucaacaaccuggagagaagaaucgagaaccugaacaagaagauggaggacggcuuccuggacguguggaccuacaacgccgagcugcuggugcugauggagaacgagagaacccuggacuuccacgacagcaacgugaagaaccuguacgacaaggugagacugcagcugagagacaacgccaaggagcugggcaacggcugcuucgaguucuaccacaagugcgacaacgagugcauggagagcgugagaaacggcaccuacgacuacccccaguacagcgaggaggccagacugaagagagaggagaucagcggcgugaagcuggagagcaucggcaucuaccagauccugagcaucuacagcaccguggccagcagccuggcccuggccaucaugguggccggccugagccuguggaugugcagcaacggcagccugcagugcagaaucugcaucuga

SEQ ID NO: 173926 - RNA, 1695 nt, Artificial Sequence
  derived and/or modified CDS sequence (opt4) from hemagglutinin__InfluenzaA__ABW90130
auggagaagaucgugcugcuguucgccaucgugagccuggugaagagcgaccagaucugcaucggcuaccacgccaacaacagcaccgagcagguggacaccaucauggagaagaacgugaccgugacccacgcccaggacauccuggagaagaagcacaacggcaagcugugcgaccuggacggcgugaagccccugauccugagagacugcagcguggccggcuggcugcugggcaaccccaugugcgacgaguucaucaacgugcccgaguggagcuacaucguggagaaggccaaccccgugaacgaccugugcuaccccggcgacuucaacgacuacgaggagcugaagcaccugcugagcagaaucaaccacuucgagaagauccagaucauccccaagagcagcuggagcagccacgaggccagccugggcgugagcagcgccugccccuaccagggcaaguucagcuucuucagaaacgugguguggcugaucaagaagaacagcaccuaccccaccaucaagagaagcuacaacaacaccaaccaggaggaccugcuggugcuguggggcauccaccaccccaacgacgccgccgagcagaccaagcuguaccagaaccccaccaccuacaucagcgugggcaccagcacccugaaccagagacuggugcccagaaucgccaccagaagcaaggugaacggccagagcggcagaauggaguucuucuggaccauccugaagcccaacgacgccaucaacuucgagagcaacggcaacuucaucgcccccgaguacgccuacaagaucgugaagaagggcgacagcaccaucaugaagagcgagcuggaguacggcaacugcaacaccaagugccagacccccaugggcgccaucaacagcagcaugcccuuccacaacauccacccccugaccaucggcgagugccccaaguacgugaagagcaacagacuggugcuggccaccggccugagaaacagcccccagagagagaccagaggccuguucggcgccaucgccggcuucaucgagggcggcuggcagggcaugguggacggcugguacggcuaccaccacagcaacgagcagggcagcggcuacgccgccgacaaggagagcacccagaaggccaucgacggcgugaccaacaaggugaacagcaucaucgacaagaugaacacccaguucgaggccgugggcagagaguucaacaaccuggagagaagaaucgagaaccugaacaagaagauggaggacggcuuccuggacguguggaccuacaacgccgagcugcuggugcugauggagaacgagagaacccuggacuuccacgacagcaacgugaagaaccuguacgacaaggugagacugcagcugagagacaacgccaaggagcugggcaacggcugcuucgaguucuaccacaagugcgacaacgagugcauggagagcgugagaaacggcaccuacgacuacccccaguacagcgaggaggccagacugaagagagaggagaucagcggcgugaagcuggagagcaucggcaucuaccagauccugagcaucuacagcaccguggccagcagccuggcccuggccaucaugguggccggccugagccuguggaugugcagcaacggcagccugcagugcagaaucugcaucuga

SEQ ID NO: 173927 - RNA, 1695 nt, Artificial Sequence
  derived and/or modified CDS sequence (opt4) from hemagglutinin__InfluenzaA__ABW90132
auggagaagaucgugcugcuguucgccaucgugagccuggugaagagcgaccagaucugcaucggcuaccacgccaacaacagcaccgagcagguggacaccaucauggagaagaacgugaccgugacccacgcccaggacauccuggagaagaagcacaacggcaagcugugcgaccuggacggcgugaagccccugauccugagagacugcagcguggccggcuggcugcugggcaaccccaugugcgacgaguucaucaacgugcccgaguggagcuacaucguggagaaggccaaccccgugaacgaccugugcuaccccggcgacuucaacgacuacgaggagcugaagcaccugcugagcagaaucaaccacuucgagaagauccagaucauccccaagagcagcuggagcagccacgaggccagccugggcgugagcagcgccugccccuaccagggcaagagcagcuucuucagaaacgugguguggcugaucaagaagaacagcaccuaccccaccaucaagagaagcuacaacaacaccaaccaggaggaccugcuggugcuguggggcauccaccaccccaacaacgccgccgagcagaccgagcuguaccagaaccccaccaccuacaucagcgugggcaccagcacccugaaccagagacuggugcccagaaucgccaccagaagcaaggugaacggccagagcggcagaauggaguucuucuggaccauccugaagcccaacgacgccaucaacuucgagagcaacggcaacuucaucgcccccgaguacgccuacaagaucgugaagaagggcgacagcaccaucaugaagagcgagcuggaguacggcaacugcaacaccaagugccagacccccaugggcgccaucaacagcagcaugcccuuccacaacauccacccccugaccaucggcgagugccccaaguacgugaagagcaacagacuggugcuggccaccggccugagaaacagcccccagagagagaccagaggccuguucggcgccaucgccggcuucaucgagggcggcuggcagggcaugguggacggcugguacggcuaccaccacagcaacgagcagggcagcggcuacgccgccgacaaggagagcacccagaaggccaucgacggcgugaccaacaaggugaacagcaucaucgacaagaugaacacccaguucgaggccgugggcagagaguucaacaaccuggagagaagaaucgagaaccugaacaagaagauggaggacggcuuccuggacguguggaccuacaacgccgagcugcuggugcugauggagaacgagagaacccuggacuuccacgacagcaacgugaagaaccuguacgacaaggugagacugcagcugagagacaacgccaaggagcugggcaacggcugcuucgaguucuaccacaagugcgacaacgagugcauggagagcgugagaaacggcaccuacgacuacccccaguacagcgaggaggccagacugaagagagaggagaucagcggcgugaagcuggagagcaucggcaucuaccagauccugagcaucuacagcaccguggccagcagccuggcccuggccaucaugguggccggccugagccuguggaugugcagcaacggcagccugcagugcagaaucugcaucuga

SEQ ID NO: 173928 - RNA, 1695 nt, Artificial Sequence
  derived and/or modified CDS sequence (opt4) from hemagglutinin__InfluenzaA__ABW90133
auggagaagaucgugcugcuguucgccaucgugagccuggugaagagcgaccagaucugcaucggcuaccacgccaacaacagcaccgagcagguggacaccaucauggagaagaacgugaccgugacccacgcccaggacauccuggagaagaagcacaacggcaagcugugcgaccuggacggcgugaagccccugauccugagagacugcagcguggccggcuggcugcugggcaaccccaugugcgacgaguucaucaacgugcccgaguggagcuacaucguggagaaggccaaccccgugaacgaccugugcuaccccggcgacuucaacgacuacgaggagcugaagcaccugcugagcagaaucaaccacuucgagaagauccagaucauccccaagagcagcuggagcagccacgaggccagccugggcgugagcagcgccugccccuaccagggcaagcccagcuucuucagaaacgugguguggcugaucaagaagaacagcaccuaccccaccaucaagagaagcuacaacaacaccaaccaggaggaccugcuggugcuguggggcauccaccaccccaacgacgccgccgagcagaccaagcuguaccagaaccccaccaccuacaucagcgugggcaccagcacccugaaccagagacuggugcccagaaucgccaccagaagcaaggugaacggccagagcggcagaauggaguucuucuggaccauccugaagcccaacgacgccaucaacuucgagagcaacggcaacuucaucgcccccgaguacgccuacaagaucgugaagaagggcgacagcaccaucaugaagagcgagcuggaguacggcaacugcaacaccaagugccagacccccaugggcgccaucaacagcagcaugcccuuccacaacauccacccccugaccaucggcgagugccccaaguacgugaagagcaacagacuggugcuggccaccggccugagaaacagcccccagagagagaccagaggccuguucggcgccaucgccggcuucaucgagggcggcuggcagggcaugguggacggcugguacggcuaccaccacagcaacgagcagggcagcggcuacgccgccgacaaggagagcacccagaaggccaucgacggcgugaccaacaaggugaacagcaucaucgacaagaugaacacccaguucgaggccgugggcagagaguucaacaaccuggagagaagaaucgagaaccugaacaagaagauggaggacggcuuccuggacguguggaccuacaacgccgagcugcuggugcugauggagaacgagagaacccuggacuuccacgacagcaacgugaagaaccuguacgacaaggugagacugcagcugagagacaacgccaaggagcugggcaacggcugcuucgaguucuaccacaagugcgacaacgagugcauggagagcgugagaaacggcaccuacgacuacccccaguacagcgaggaggccagacugaagagagaggagaucagcggcgugaagcuggagagcaucggcaucuaccagauccugagcaucuacagcaccguggccagcagccuggcccuggccaucaugguggccggccugagccuguggaugugcagcaacggcagccugcagugcagaaucugcaucuga

SEQ ID NO: 173929 - RNA, 1695 nt, Artificial Sequence
  derived and/or modified CDS sequence (opt4) from hemagglutinin__InfluenzaA__ABW90134
auggagaagaucgugcugcuguucgccaucgugagccuggugaagagcgaccagaucugcaucggcuaccacgccaacaacagcaccgagcagguggacaccaucauggagaagaacgugaccgugacccacgcccaggacauccuggagaagaagcacaacggcaagcugugcgaccuggacggcgugaagccccugauccugagagacugcagcguggccggcuggcugcugggcaaccccaugugcgacgaguucaucaacgugcccgaguggagcuacaucguggagaaggccaaccccgugaacgaccugugcuaccccggcgacuucaacgacuacgaggagcugaagcaccugcugagcagaaucaaccacuucgagaagauccagaucauccccaagagcagcuggagcagccacgaggccagccugggcgugagcagcgccugccccuaccaggagaagagcagcuucuucagaaacgugguguggcugaucaagaagaacagcaccuaccccaccaucaagagaagcuacaacaacaccaaccaggaggaccugcuggugcuguggggcauccaccaccccaacgacgccgccgagcagaccaagcuguaccagaaccccaccaccuacaucagcgugggcaccagcacccugaaccagagacuggugcccagaaucgccaccagaagcaaggugaacggccagagcggcagaauggaguucuucuggaccauccugaagcccaacgacgccaucaacuucgagagcaacggcaacuucaucgcccccgaguacgccuacaagaucgugaagaagggcgacagcaccaucaugaagagcgagcuggaguacggcaacugcaacaccaagugccagacccccaugggcgccaucaacagcagcaugcccuuccacaacauccacccccugaccaucggcgagugccccaaguacgugaagagcaacagacuggugcuggccaccggccugagaaacagcccccagagagagaccagaggccuguucggcgccaucgccggcuucaucgagggcggcuggcagggcaugguggacggcugguacggcuaccaccacagcaacgagcagggcagcggcuacgccgccgacaaggagagcacccagaaggccaucgacggcgugaccaacaaggugaacagcaucaucgacaagaugaacacccaguucgaggccgugggcagagaguucaacaaccuggagagaagaaucgagaaccugaacaagaagauggaggacggcuuccuggacguguggaccuacaacgccgagcugcuggugcugauggagaacgagagaacccuggacuuccacgacagcaacgugaagaaccuguacgacaaggugagacugcagcugagagacaacgccaaggagcugggcaacggcugcuucgaguucuaccacaagugcgacaacgagugcauggagagcgugagaaacggcaccuacgacuacccccaguacagcgaggaggccagacugaagagagaggagaucagcggcgugaagcuggagagcaucggcaucuaccagauccugagcaucuacagcaccguggccagcagccuggcccuggccaucaugguggccggccugagccuguggaugugcagcaacggcagccugcagugcagaaucugcaucuga

SEQ ID NO: 173930 - RNA, 1695 nt, Artificial Sequence
  derived and/or modified CDS sequence (opt4) from hemagglutinin__InfluenzaA__ABW90135
auggagaagaucgugcugcuguucgccaucgugagccuggugaagagcgaccagaucugcaucggcuaccacgccaacaacagcaccgagcagguggacaccaucauggagaagaacgugaccgugacccacgcccaggacauccuggagaagaagcacaacggcaagcugugcgaccuggacggcgugaagccccugauccugagagacugcagcguggccggcuggcugcugggcaaccccaugugcgacgaguucaucaacgugcccgaguggagcuacaucguggagaaggccaaccccgugaacgaccugugcuaccccggcgacuucaacgacuacgaggagcugaagcaccugcugagcagaaucaaccacuucgagaagauccagaucauccccaagagcagcuggagcagccacgaggccagccugggcgugagcagcgccugccccuaccagggcaagagcagcuucuucagaaacgugguguggcugaucaacaagaacagcaccuaccccaccaucaagagaagcuacaacaacaccaaccaggaggaccugcuggugcuguggggcauccaccaccccaacgacgccgccgagcagaccaagcuguaccagaaccccaccaccuacaucagcgugggcaccagcacccugaaccagagacuggugcccagaaucgccaccagaagcaaggugaacggccagagcggcagaauggaguucuucuggaccauccugaagcccaacgacgccaucaacuucgagagcaacggcaacuucaucgcccccgaguacgccuacaagaucgugaagaagggcgacagcaccaucaugaagagcgagcuggaguacggcaacugcaacaccaagugccagacccccaugggcgccaucaacagcagcaugcccuuccacaacauccacccccugaccaucggcgagugccccaaguacgugaagagcaacagacuggugcuggccaccggccugagaaacagcccccagagagagaccagaggccuguucggcgccaucgccggcuucaucgagggcggcuggcagggcaugguggacggcugguacggcuaccaccacagcaacgagcagggcagcggcuacgccgccgacaaggagagcacccagaaggccaucgacggcgugaccaacaaggugaacagcaucaucgacaagaugaacacccaguucgaggccgugggcagagaguucaacaaccuggagagaagaaucgagaaccugaacaagaagauggaggacggcuuccuggacguguggaccuacaacgccgagcugcuggugcugauggagaacgagagaacccuggacuuccacgacagcaacgugaagaaccuguacgacaaggugagacugcagcugagagacaacgccaaggagcugggcaacggcugcuucgaguucuaccacaagugcgacaacgagugcauggagagcgugagaaacggcaccuacgacuacccccaguacagcgaggaggccagacugaagagagaggagaucagcggcgugaagcuggagagcaucggcaucuaccagauccugagcaucuacagcaccguggccagcagccuggcccuggccaucaugguggccggccugagccuguggaugugcagcaacggcagccugcagugcagaaucugcaucuga

SEQ ID NO: 173931 - RNA, 1695 nt, Artificial Sequence
  derived and/or modified CDS sequence (opt4) from hemagglutinin__InfluenzaA__HB649491
auggagaagaucgugcugcuguucgccaucgugagccuggugaagagcgaccagaucugcaucggcuaccacgccaacaacagcaccgagcagguggacaccaucauggagaagaacgugaccgugacccacgcccaggacauccuggagaagaagcacaacggcaagcugugcgaccuggacggcgugaagccccugauccugagagacugcagcguggccggcuggcugcugggcaaccccaugugcgacgaguucaucaacgugcccgaguggagcuacaucguggagaaggccaaccccgugaacgaccugugcuaccccggcgacuucaacgacuacgaggagcugaagcaccugcugagcagaaucaaccacuucgagaagauccagaucauccccaagagcagcuggagcagccacgaggccagccugggcgugagcagcgccugccccuaccagggcaagagcagcuucuucagaaacgugguguggcugaucaagaagaacagcaccuaccccaccaucaagagaagcuacaacaacaccaaccaggaggaccugcuggugcuguggggcauccaccaccccaacgacgccgccgagcagaccaagcuguaccagaaccccaccaccuacaucagcgugggcaccagcacccugaaccagagacuggugcccagaaucgccaccagaagcaaggugaacggccagagcggcagaauggaguucuucuggaccauccugaagcccaacgacgccaucaacuucgagagcaacggcaacuucaucgcccccgaguacgccuacaagaucgugaagaagggcgacagcaccaucaugaagagcgagcuggaguacggcaacugcaacaccaagugccagacccccaugggcgccaucaacagcagcaugcccuuccacaacauccacccccugaccaucggcgagugccccaaguacgugaagagcaacagacuggugcuggccaccggccugagaaacagcccccagagagagaccagaggccuguucggcgccaucgccggcuucaucgagggcggcuggcagggcaugguggacggcugguacggcuaccaccacagcaacgagcagggcagcggcuacgccgccgacaaggagagcacccagaaggccaucgacggcgugaccaacaaggugaacagcaucaucgacaagaugaacacccaguucgaggccgugggcagagaguucaacaaccuggagagaagaaucgagaaccugaacaagaagauggaggacggcuuccuggacguguggaccuacaacgccgagcugcuggugcugauggagaacgagagaacccuggacuuccacgacagcaacgugaagaaccuguacgacaaggugagacugcagcugagagacaacgccaaggagcugggcaacggcugcuucgaguucuaccacaagugcgacaacgagugcauggagagcgugagaaacggcaccuacgacuacccccaguacagcgaggaggccagacugaagagagaggagaucagcggcgugaagcuggagagcaucggcaucuaccagauccugagcaucuacagcaccguggccagcagccuggcccuggccaucaugguggccggccugagccuguggaugugcagcaacggcagccugcagugcagaaucugcaucuga

SEQ ID NO: 173932 - RNA, 1683 nt, Artificial Sequence; identical to SEQ ID NO: 170048
  derived and/or modified CDS sequence (opt4) from hemagglutinin__InfluenzaA__EPI439507

SEQ ID NO: 173933 - RNA, 1701 nt, Artificial Sequence
  derived and/or modified CDS sequence (opt4) from hemagglutinin__InfluenzaA__EPI482777
augaaggccauccugguggugcugcuguacaccuucaccaccgccaacgccgacacccugugcaucggcuaccacgccaacaacagcaccgacaccguggacaccgugcuggagaagaacgugaccgugacccacagcgugaaccugcuggagaacagacacaacggcaagcugugcaagcugagaggcguggccccccugcaccugggcaagugcaacaucgccggcuggcugcugggcaaccccgagugcgagagccugagcaccgccagcagcuggagcuacaucguggagaccagcaacagcgacaacggcaccugcuaccccggcgacuucaucaacuacgaggagcugagagagcagcugagcagcgugagcagcuucgagagauucgagaucuuccccaagaccagcagcuggcccaaccacgacaccaacagaggcgugaccgccgccugcccccacgccggcgccaacagcuucuacagaaaccugguguggcuggugaagaagggcaacagcuaccccaagaucaacaagagcuacaucaacaacaaggagaaggaggugcuggugcugugggccauccaccaccccagcaccagcgccgaccagcagagccuguaccagaacgccgacgccuacguguucgugggcagcagcagauacagcagaaaguucgagcccgagaucgccaccagacccaaggugagagaccaggccggcagaaugaacuacuacuggacccugguggagcccggcgacaagaucaccuucgaggccaccggcaaccugguggcccccagauacgccuucgcccugaagagaaacagcggcagcggcaucaucaucagcgacaccagcgugcacgacugcgacaccaccugccagacccccaacggcgccaucaacaccagccugcccuuccagaacauccaccccgugaccaucggcgagugccccaaguacgugaagagcaccaagcugagaauggccaccggccugagaaacauccccagcauccagagcagaggccuguucggcgccaucgccggcuucaucgagggcggcuggaccggcaugaucgacggcugguacggcuaccaccaccagaacgagcagggcagcggcuacgccgccgaccugaagagcacccagaacgccaucgacggcaucaccaacaaggugaacagcgugaucgagaagaugaacacccaguucaccgccgugggcaaggaguucagccaccuggagagaagaaucgagaaccugaacaagaagguggacgacggcuuccuggacaucuggaccuacaacgccgagcugcuggugcugcuggagaacgagagaacccuggacuaccacgacagcaacgugaagaaccuguacgagaaggugagaagccagcugaagaacaacgccaaggagaucggcaacggcugcuucgaguucuaccacaagugcgacgacaugugcauggagagcgugaagaacggcaccuacgacuaccccaaguacagcgaggaggccaagcugaacagagaggagaucgacggcgugaagcuggagagcaccagaaucuaccagauccuggccaucuacagcaccguggccagcagccuggugcugguggugagccugggcgccaucagcuucuggaugugcagcaacggcagccugcagugcagaaucugcaucuga

SEQ ID NO: 173934 - RNA, 1701 nt, Artificial Sequence; identical to SEQ ID NO: 165644
  derived and/or modified CDS sequence (opt4) from hemagglutinin__InfluenzaA__EPI745532

SEQ ID NO: 173935 - RNA, 1701 nt, Artificial Sequence
  derived and/or modified CDS sequence (opt4) from hemagglutinin__InfluenzaA__EPI278594
augaaggccauccugguggugcugcuguacaccuucgccaccgccaacgccgacacccugugcaucggcuaccacgccaacaacagcaccgacaccguggacaccgugcuggagaagaacgugaccgugacccacagcgugaaccugcuggaggacaagcacaacggcaagcugugcaagcugagaggcguggccccccugcaccugggcaagugcaacaucgccggcuggauccugggcaaccccgagugcgagagccugagcaccgccagcagcuggagcuacaucguggagaccagcagcagcgacaacggcaccugcuaccccggcgacuucaucgacuacgaggagcugagagagcagcugagcagcgugagcagcuucgagagauucgagaucuuccccaagaccagcagcuggcccgaccacgagagcaacaagggcgugaccgccgccugcccccacgccggcgccaagagcuucuacaagaaccugaucuggcuggugaagaagggcaacagcuaccccaagcugagcaagagcuacaucaacgacaagggcaaggaggugcuggugcuguggggcauccaccaccccagcaccagcgccgaccagcagagccuguaccagaacgccgacgccuacguguucgugggcaccagcagauacagcaagaaguucaagcccgagaucgccaucagacccaaggugagagaccaggagggcagaaugaacuacuacuggacccugguggagcccggcgacaagaucaccuucgaggccaccggcaaccugguggugcccagauacgccuucgccauggagagaaacgccggcagcggcaucaucaucagcgacacccccgugcacgacugcaacaccaccugccagacccccaagggcgccaucaacaccagccugcccuuccagaacauccaccccaucaccaucggcaagugccccaaguacgugaagagcaccaagcugagacuggccaccggccugagaaacgugcccagcauccagagcagaggccuguucggcgccaucgccggcuucaucgagggcggcuggaccggcaugguggacggcugguacggcuaccaccaccagaacgagcagggcagcggcuacgccgccgaccugaagagcacccagaacgccaucgacaagaucaccaacaaggugaacagcgugaucgagaagaugaacacccaguucaccgccgugggcaaggaguucaaccaccuggagaagagaaucgagaaccugaacaagaagguggacgacggcuuccuggacaucuggaccuacaacgccgagcugcuggugcugcuggagaacgagagaacccuggacuaccacgacagcaacgugaagaaccuguacgagaaggugagaagccagcugaagaacaacgccaaggagaucggcaacggcugcuucgaguucuaccacaagugcgacaacaccugcauggagagcgugaagaacggcaccuacgacuaccccaaguacagcgaggaggccaagcugaacagagaggagaucgacggcgugaagcuggagagcaccagaaucuaccagauccuggccaucuacagcaccguggccagcagccuggugcugguggugagccugggcgccaucagcuucuggaugugcagcaacggcagccugcagugcagaaucugcaucuga

SEQ ID NO: 173936 - RNA, 1701 nt, Artificial Sequence
  derived and/or modified CDS sequence (opt4) from hemagglutinin__InfluenzaA__AEE69009
augaaggccauccugguggugcugcuguacaccuucgccaccgccaacgccgacacccugugcaucggcuaccacgccaacaacagcaccgacaccguggacaccgugcuggagaagaacgugaccgugacccacagcgugaaccugcuggaggacaagcacaacggcaagcugugcaagcugagaggcguggccccccugcaccugggcaagugcaacaucgccggcuggauccugggcaaccccgagugcgagagccugagcaccgccagcagcuggagcuacaucguggagacccccagcagcgacaacggcaccugcuaccccggcgacuucaucgacuacgaggagcugagagagcagcugagcagcgugagcagcuucgagagauucgagaucuuccccaagaccagcagcuggcccaaccacgacagcaacaagggcgugaccgccgccugcccccacgccggcgccaagagcuucuacaagaaccugaucuggcuggugaagaagggcaacagcuaccccaagcugagcaagagcuacaucaacgacaagggcaaggaggugcuggugcuguggggcauccaccacccccccaccagcgccgaccagcagagccuguaccagaacgccgacaccuacguguucgugggcagcagcagauacagcaagaaguucaagcccgagaucgccaucagacccaaggugagagaccaggagggcagaaugaacuacuacuggacccugguggagcccggcgacaagaucaccuucgaggccaccggcaaccugguggugcccagauacgccuucgccauggagagaaacgccggcagcggcaucaucaucagcgacacccccgugcacgacugcaacaccaccugccagacccccaagggcgccaucaacaccagccugcccuuccagaacauccaccccaucaccaucggcaagugccccaaguacgugaagagcaccaagcugagacuggccaccggccugagaaacauccccagcauccagagcagaggccuguucggcgccaucgccggcuucaucgagggcggcuggaccggcaugguggacggcugguacggcuaccaccaccagaacgagcagggcagcggcuacgccgccgaccugaagagcacccagaacgccaucgacgagaucaccaacaaggugaacagcgugaucgagaagaugaacacccaguucaccgccgugggcaaggaguucaaccaccuggagaagagaaucgagaaccugaacaagaagguggacgacggcuuccuggacaucuggaccuacaacgccgagcugcuggugcugcuggagaacgagagaacccuggacuaccacgacagcaacgugaagaaccuguacgagaaggugagaagccagcugaagaacaacgccaaggagaucggcaacggcugcuucgaguucuaccacaagugcgacaacaccugcauggagagcgugaagaacggcaccuacgacuaccccaaguacagcgaggaggccaagcugaacagagaggagaucgacggcgugaagcuggagagcaccagaaucuaccagauccuggccaucuacagcaccguggccagcagccuggugcugguggugagccugggcgccaucagcuucuggaugugcagcaacggcagccugcagugcagaaucugcaucuga

SEQ ID NO: 173937 - RNA, 1701 nt, Artificial Sequence; identical to SEQ ID NO: 163011
  derived and/or modified CDS sequence (opt4) from hemagglutinin__InfluenzaA__GQ280797

SEQ ID NO: 173938 - RNA, 1701 nt, Artificial Sequence; identical to SEQ ID NO: 162744
  derived and/or modified CDS sequence (opt4) from hemagglutinin__InfluenzaA__EPI178457

SEQ ID NO: 173939 - RNA, 1701 nt, Artificial Sequence; identical to SEQ ID NO: 162744
  derived and/or modified CDS sequence (opt4) from hemagglutinin__InfluenzaA__EPI176470

SEQ ID NO: 173940 - RNA, 1701 nt, Artificial Sequence
  derived and/or modified CDS sequence (opt4) from hemagglutinin__InfluenzaA__EPI280341
augaaggccauccugguggugcugcugcacaccuucgccaccgccaacgccgacacccugugcaucggcuaccacgccaacaacagcaccgacaccguggacaccgugcuggagaagaacgugaccgugacccacagcgugaaccugcuggaggacaagcacaacggcaagcugugcaagcugagaggcguggccccccugcaccugggcaagugcaacaucgccggcuggauccugggcaaccccgagugcgagagccugagcaccgccagcagcuggagcuacaucguggagaccagcagcagcgacaacggcaccugcuaccccggcaacuucaucgacuacgaggagcugagagagcagcugagcagcgugagcagcuucgagagauucgagaucuuccccaagaccagcagcuggcccgaccacgacagcaacaagggcgugaccgccgccugcccccacgccggcgccaagagcuucuacaagaaccugaucuggcuggugaagaagggcaacagcuaccccacccugagcaagagcuacaucaacgacaagggcaaggaggugcuggugcuguggggcauccaccaccccagcaccagcgccgaccagcagagccuguaccagaacgccgacgccuacguguucgugggcaccagcagauacagcaagaaguucaagcccgagaucgccaucagacccaaggugagaaaccaggagggcagaaugaacuacuacuggacccugguggagcccggcgacaagaucaccuucgaggccaccggcaaccugguggcccccagauacgccuucgccauggagagaaacgccggcagcggcaucaucaucagcgacacccccgugcacgacugcaacaccaccugccagacccccaagggcgccaucaacaccagccugcccuuccagaacauccaccccaucaccaucggcaagugccccaaguacgugaagagcaccaagcugagacuggccaccggccugagaaacgugcccagcauccagagcagaggccuguucggcgccaucgccggcuucaucgagggcggcuggaccggcaugguggacggcugguacggcuaccaccaccagaacgagcagggcagcggcuacgccgccgaccugaagagcacccagaacgccaucgacaagaucaccaacaaggugaacagcgugaucgagaagaugaacacccaguucaccgccgugggcaaggaguucaaccaccuggagaagagaaucgagaaccugaacaagaagguggacgacggcuuccuggacaucuggaccuacaacgccgagcugcuggugcugcuggagaacgagagaacccuggacuaccacgacagcaacgugaagaaccuguacgagaaggugagaagccagcugaagaacaacgccaaggagaucggcaacggcugcuucgaguucuaccacaagugcgacaacaccugcauggagagcgugaagaacggcaccuacgacuaccccaaguacagcgaggaggccaagcugaacagagaggagaucgacggcgugaagcuggagagcaccagaaucuaccagauccuggccaucuacagcaccguggccagcagccuggugcugguggugagccugggcgccaucagcuucuggaugugcagcaacggcagccugcagugcagaaucugcaucuga

SEQ ID NO: 173941 - RNA, 1701 nt, Artificial Sequence
  derived and/or modified CDS sequence (opt4) from hemagglutinin__InfluenzaA__EPI240319
augaaggccauccugguggugcugcuguacaccuucgccaccgccaacgccgacacccugugcaucggcuaccacgccaacaacagcaccgacaccguggacaccgugcuggagaagaacgugaccgugacccacagcgugaacauccuggaggacaagcacaacggcaagcugugcaagcugagaggcguggccccccugcaccugggcaagugcaacaucgccggcuggauccugggcaaccccgagugcgagagccugagcaccgccagcagcuggagcuacaucguggagaccagcagcagcgacaacggcaccugcuaccccggcgacuucaucgacuacgaggagcugagagagcagcugagcagcgugagcagcuucgagagauucgagaucuuccccaagaccagcagcuggcccaaccacgacagcaacaagggcgugaccgccgccugcccccacgccggcgccaagagcuucuacaagaaccugaucuggcuggugaagaagggcaacagcuaccccaagcugagcaagagcuacaucaacgacaagggcaaggaggugcuggugcuguggggcauccaccaccccagcaccagcgccgaccagcagagccuguaccagaacgccgacgccuacguguucgugggcagcagcagauacagcaagaaguucaagcccgagaucgccaucagacccaaggugagagacagagagggcagaaugaacuacuacuggacccugguggagcccggcgacaagaucaccuucgaggccaccggcaaccugguggugcccagauacgccuucgccauggagagaaacgccggcagcggcaucaucaucagcgacacccccgugcacgacugcaacaccaccugccagacccccaagggcgccaucaacaccagccugcccuuccagaacauccaccccaucaccaucggcaagugccccaaguacgugaagagcaccaagcugagacuggccaccggccugagaaacgugcccagcauccagagcagaggccuguucggcgccaucgccggcuucaucgagggcggcuggaccggcaugguggacggcugguacggcuaccaccaccagaacgagcagggcagcggcuacgccgccgaccugaagagcacccagaacgccaucgacgagaucaccaacaaggugaacagcgugaucgagaagaugaacacccaguucaccgccgugggcaaggaguucaaccaccuggagaagagaaucgagaaccugaacaagaagguggacgacggcuuccuggacaucuggaccuacaacgccgagcugcuggugcugcuggagaacgagagaacccuggacuaccacgacagcaacgugaagaaccuguacgagaaggugagaagccagcugaagaacaacgccaaggagaucggcaacggcugcuucgaguucuaccacaagugcgacaacaccugcauggagagcgugaagaacggcaccuacgacuaccccaaguacagcgaggaggccaagcugaacagagaggagaucgacggcgugaagcuggagagcaccagaaucuaccagauccuggccaucuacagcaccguggccagcagccuggugcugguggugagccugggcgccaucagcuucuggaugugcagcaacggcagccugcagugcagaaucugcaucuga

SEQ ID NO: 173942 - RNA, 1701 nt, Artificial Sequence; identical to SEQ ID NO: 162909
  derived and/or modified CDS sequence (opt4) from hemagglutinin__InfluenzaA__EPI183134

SEQ ID NO: 173943 - RNA, 1701 nt, Artificial Sequence
  derived and/or modified CDS sequence (opt4) from hemagglutinin__InfluenzaA__EPI368693
augaaggccauccugguggugcugcuguacaccuucgccaccgccaacgccgacacccugugcaucggcuaccacgccaacaacagcaccgacaccguggacaccgugcuggagaagaacgugaccgugacccacagcgugaacauccuggaggacaagcacaacggcaagcugugcaagcugagaggcguggccccccugcaccugggcaagugcaacaucgccggcuggauccugggcaaccccgagugcgagagccugagcaccgccagcagcuggagcuacaucguggagaccagcagcagcgacaacggcaccugcuaccccggcgacuucaucgacuacgaggagcugagagagcagcugagcagcgugagcagcuucgagagauucgagaucuuccccaagaccagcagcuggcccaaccacgacagcaacaagggcgugaccgccagcugcccccacgccggcgccaagagcuucuacaagaaccugaucuggcuggugaagaagggcaacagcuaccccaagcugagcaagagcuacaucaacgacaagggcaaggaggugcuggugcuguggggcauccaccaccccagcaccagcgccgaccagcagagccuguaccagaacgccgacgccuacguguucgugggcagcagcagauacagcaagaaguucaagcccgagaucgccaucagacccaaggugagaggccaggagggcagaaugaacuacuacuggacccugguggagcccggcgacaagaucaccuucgaggccaccggcaaccugguggugcccagauacgccuucgccauggagagaaacgccggcagcggcaucaucaucagcgacacccccgugcacgacugcaacaccaccugccagacccccaagggcgccaucaacaccagccugcccuuccagaacauccaccccaucaccaucggcaagugccccaaguacgugaagagcaccaagcugagacuggccaccggccugagaaacgugcccagcauccagagcagaggccuguucggcgccaucgccggcuucaucgagggcggcuggaccggcaugguggacggcugguacggcuaccaccaccagaacgagcagggcagcggcuacgccgccgaccugaagagcacccagaacgccaucgacgagaucaccaacaaggugaacagcgugaucgagaagaugaacacccaguucaccgccgugggcaaggaguucaaccaccuggagaagagaaucgagaaccugaacaagaagguggacgacggcuuccuggacaucuggaccuacaacgccgagcugcuggugcugcuggagaacgagagaacccuggacuaccacgacagcaacgugaagaaccuguacgagaaggugagaagccagcugaagaacaacgccaaggagaucggcaacggcugcuucgaguucuaccacaagugcgacaacaccugcauggagagcgugaagaacggcaccuacgacuaccccaaguacagcgaggaggccaagcugaacagagaggagaucgacggcgugaagcuggagagcaccagaaucuaccagauccuggccaucuacagcaccguggccagcagccuggugcugguggugagccugggcgccaucagcuucuggaugugcagcaacggcagccugcagugcagaaucugcaucuga

SEQ ID NO: 173944 - RNA, 1701 nt, Artificial Sequence
  derived and/or modified CDS sequence (opt4) from hemagglutinin__InfluenzaA__EPI291788
augaaggccauccugguggugcugcuguacaccuucaccaccgccaacgccgacacccugugcaucggcuaccacgccaacaacagcaccgacaccguggacaccgugcuggagaagaacgugaccgugacccacagcgugaaccugcuggagaacagacacaacggcaagcugugcaagcugagaggcguggccccccugcaccugggcaagugcaacaucgccggcuggcugcugggcaaccccgagugcgagagccugagcaccgccagcagcuggagcuacaucguggagaccagcaacagcgacaacggcaccugcuaccccggcgacuucaucaacuacgaggagcugagagagcagcugagcagcgugagcagcuucgagagauucgagaucuuccccaagaccagcagcuggcccaaccacgacaccaacagaggcgugaccgccgccugcccccacgccggcaccaacagcuucuacagaaaccugaucuggcuggugaagaagggcaacagcuaccccaagaucaacaagagcuacaucaacaacaaggagaaggaggugcuggugcugugggccauccaccaccccagcaccagcgccgaccagcagagccuguaccagaacgccgacgccuacguguucgugggcagcagcagauacagcagaaaguucgagcccgagaucgccaccagacccaaggugagagaccaggccggcagaaugaacuacuacuggacccugguggagcccggcgacaagaucaccuucgaggccaccggcaaccugguggugcccagauacgccuucgcccugaagagaaacagcggcagcggcaucaucaucagcgacaccagcgugcacgacugcgacaccaccugccagacccccaacggcgccaucaacaccagccugcccuuccagaacauccaccccgugaccaucggcgagugccccaaguacgugaagagcaccaagcugagaauggccaccggccugagaaacauccccagcauccagagcagaggccuguucggcgccaucgccggcuucaucgagggcggcuggaccggcaugaucgacggcugguacggcuaccaccaccagaacgagcagggcagcggcuacgccgccgaccugaagagcacccagaacgccaucgacggcaucaccaacaaggugaacagcgugaucgagaagaugaacacccaguucaccgccgugggcaaggaguucagccaccuggagagaagaaucgagaaccugaacaagaagguggacgacggcuuccuggacaucuggaccuacaacgccgagcugcuggugcugcuggagaacgagagaacccuggacuaccacgacagcaacgugaagaaccuguacgagaaggugagaagccagcugaagaacaacgccaaggagaucggcaacggcugcuucgaguucuaccacaagugcgacgacaccugcauggagagcgugaagaacggcaccuacgacuaccccaaguacagcgaggaggccaagcugaacagagaggagaucgacggcgugaagcuggagagcaccagaaucuaccagauccuggccaucuacagcaccguggccagcagccuggugcugguggugagccugggcgccaucagcuucuggaugugcagcaacggcagccugcagugcagaaucugcaucuga

SEQ ID NO: 173945 - RNA, 1701 nt, Artificial Sequence
  derived and/or modified CDS sequence (opt4) from hemagglutinin__InfluenzaA__EPI482788
augaaggccauccugguggugcugcuguacaccuucaccaccgccaacgccgacacccugugcaucggcuaccacgccaacaacagcaccgacaccguggacaccgugcuggagaagaacgugaccgugacccacagcgugaaccugcuggagaacagacacaacggcaagcugugcaagcugagaggcguggccccccugcaccugggcaagugcaacaucgccggcuggcugcugggcaaccccgagugcgagagccugagcaccgccagcagcuggagcuacaucguggagaccagcaacagcgacaacggcaccugcuaccccggcgacuucaucaacuacgaggagcugagagagcagcugagcagcgugagcagcuucgagagauucgagaucuuccccaagaccagcagcuggcccaaccacgacaccaacagaggcgugaccgccgccugcccccacgccggcaccaacagcuucuacagaaaccugaucuggcuggugaagaagggcaacagcuaccccaagaucaacaagagcuacaucaacaacaaggagaaggaggugcuggugcugugggccauccaccaccccagcaccagcgccgaccagcagagcaucuaccagaacgccgacgccuacguguucgugggcagcagcagauacagcagaaaguucgagcccgagaucgccaccagacccaaggugagagaccaggccggcagaaugaacuacuacuggacccugguggagcccggcgacaagaucaccuucgaggccaccggcaaccugguggugcccagauacgccuucgcccugaagagaaacagcggcagcggcaucaucaucagcgacaccagcgugcacgacugcgacaccaccugccagacccccaacggcgccaucaacaccagccugcccuuccagaacauccaccccgugaccaucggcgagugccccaaguacgugaagagcaccaagcugagaauggccaccggccugagaaacauccccagcauccagagcagaggccuguucggcgccaucgccggcuucaucgagggcggcuggaccggcaugaucgacggcugguacggcuaccaccaccagaacgagcagggcagcggcuacgccgccgaccugaagagcacccagaacgccaucgacggcaucaccaacaaggugaacagcgugaucgagaagaugaacacccaguucaccgccgugggcaaggaguucagccaccuggagagaagaaucgagaaccugaacaagaagguggacgacggcuuccuggacaucuggaccuacaacgccgagcugcuggugcugcuggagaacgagagaacccuggacuaccacgacagcaacgugaagaaccuguacgagaaggugagaagccagcugaagaacaacgccaaggagaucggcaacggcugcuucgaguucuaccacaagugcgacgacaccugcauggagagcgugaagaacggcaccuacgacuaccccaaguacagcgaggaggccaagcugaacagagaggagaucgacggcgugaagcuggagagcaccagaaucuaccagauccuggccaucuacagcaccguggccagcagccuggugcugguggugagccugggcgccaucagcuucuggaugugcagcaacggcagccugcagugcagaaucugcaucuga

SEQ ID NO: 173946 - RNA, 1701 nt, Artificial Sequence
  derived and/or modified CDS sequence (opt4) from hemagglutinin__InfluenzaA__EPI178946/m1
augaaggccaucaucguggugcugcuguacaccuucgccaccgccgacgccgacacccugugcaucggcuaccacgccaacaacagcaccgacaccguggacaccgugcuggagaagaacgugaccgugacccacagcgugaaccugcuggagaacaagcacgacggcaagcugugcaagcugagaggcguggccccccugcaccugggcaagugcaacaucgccggcuggcugcugggcaaccccgagugcgagagccuguucaccgccagcagcuggagcuacaucguggagacccccaacagcgacaacggcaccugcuaccccggcgacuucaucaacuacgaggagcugagagagcaccugagcagcgugagcagcuucgagagauucgagaucuuccccaaggccaacagcuggcccaaccacgacaccaacaagggcgugaccgccgccugccccuacgccggcgccaacagcuucuacagaaaccugaucuggcuggugaagaagggcaacagcuaccccaagcugagcaagagcuacaucaacaacaagaagaaggaggugcuggugaucuggggcauccaccacccccccaccagcaccgaccagcagacccuguaccagaacgccgacgccuacguguucgugggcagcagcaaguacagcaagagauucaagcccgagaucgccgccagacccaaggugagaaaccaggccggcagaaugaacuacuacuggacccugaucgagcccggcgacaccaucaccuucgaggccaccggcaaccugguggugcccagauacgccuucgccaugaagagaggcagcggcagcggcaucaucgugagcgacgcccccgugcacgacugcaacaccaccugccagacccccaagggcgccaucaacaccagccugcccuuccagaacauccaccccgugaccaucggcgagugccccaaguacgugaagagcaccaagcugagaauggccaccggccugagaaacauccccagcauccagagcagaggccuguucggcgccaucgccggcuuccuggagggcggcuggaccggcaugaucgacggcugguacggcuaccaccaccagaacgagcagggcagcggcuacgccgccgaccagaagagcacccagaacgccaucgacggcaucaccaacaaggugaacagcaucaucgagaagaugaacacccaguucaccgccgugggcaaggaguucaaccagcuggagaagagaaucgagagccugaacaacaagguggacgacggcuuccuggacaucuggaccuacaacgccgagaugcuggugcugcuggagaacgagagaacccuggacuaccacgacagcaacgugaagaaccuguacgagaaggugagaagccagcugaagaacaacgccaaggagaucggcaacggcugcuucgaguucuaccacaagugcgacaacaccugcauggagagcgugaagaacggcaccuacgacuaccccaaguacagcgaggaggccaagcugaacagagaggagaucgacggcgugaagcuggagagcgccagaaucuaccagauccuggccaucuacagcaccguggccagcagccuggugcugcuggugagccugggcgccgugagcuucuggaugugcagcaacggcagccugcagugcagaaucugcaucuga

SEQ ID NO: 173947 - RNA, 1701 nt, Artificial Sequence
  derived and/or modified CDS sequence (opt4) from hemagglutinin__InfluenzaA__EPI482791/m2
augaaggccaucaucguggugcugcuguacaccuucgccaccgccgacgccgacacccugugcaucggcuaccacgccaacaacagcaccgacaccguggacaccgugcuggagaagaacgugaccgugacccacagcgugaaccugcuggagaacaagcacgacggcaagcugugcaagcugagaggcguggccccccugcaccugggcaagugcaacaucgccggcuggcugcugggcaaccccgagugcgagagccuguucaccgccagcagcuggagcuacaucguggagacccccaacagcgacaacggcaccugcuaccccggcgacuucaucaacuacgaggagcugagagagcaccugagcagcgugagcagcuucgagagauucgagaucuuccccaaggccaacagcuggcccaaccacgagaccaacaagggcgugaccgccgccugccccuacgccggcgccaacagcuucuacagaaaccugaucuggcuggugaagaagggcaacagcuaccccaagcugagcaagagcuacaucaacaacaagaagaaggaggugcuggugaucuggggcauccaccacccccccaccagcaccgaccagcagacccuguaccagaacgccgacgccuacguguucgugggcagcagcaaguacagcaagagauucaagcccgagaucgccgccagacccaaggugagaaaccaggccggcagaaugaacuacuacuggacccugaucgagcccggcgacaccaucaccuucgaggccaccggcaaccugguggugcccagauacgccuucgccaugaagagaggcagcggcagcggcaucaucgugagcgacgcccccgugcacgacugcaacaccaccugccagacccccaagggcgccaucaacaccagccugcccuuccagaacauccaccccgugaccaucggcgagugccccaaguacgugaagagcaccaagcugagaauggccaccggccugagaaacauccccagcauccagagcagaggccuguucggcgccaucgccggcuuccuggagggcggcuggaccggcaugaucgacggcugguacggcuaccaccaccagaacgagcagggcagcggcuacgccgccgaccagaagagcacccagaacgccaucgacggcaucaccaacaaggugaacagcaucaucgagaagaugaacacccaguucaccgccgugggcaaggaguucaaccagcuggagaagagaaucgagagccugaacaacaagguggacgacggcuuccuggacaucuggaccuacaacgccgagaugcuggugcugcuggagaacgagagaacccuggacuaccacgacagcaacgugaagaaccuguacgagaaggugagaagccagcugaagaacaacgccaaggagaucggcaacggcugcuucgaguucuaccacaagugcgacaacaccugcauggagagcgugaagaacggcaccuacgacuaccccaaguacagcgaggaggccaagcugaacagagaggagaucgacggcgugaagcuggagagcgccagaaucuaccagauccuggccaucuacagcaccguggccagcagccuggugcugcuggugagccugggcgccgugagcuucuggaugugcagcaacggcagccugcagugcagaaucugcaucuga

SEQ ID NO: 173948 - RNA, 1701 nt, Artificial Sequence
  derived and/or modified CDS sequence (opt4) from hemagglutinin__InfluenzaA__EPI291799
augaaggccauccugguggugcugcuguacaccuucaccaccgccaacgccgacacccugugcaucggcuaccacgccaacaacagcaccgacaccguggacaccgugcuggagaagaacgugaccgugacccacagcgugaaccugcuggagaacagacacaacggcaagcugugcaagcugagaggcguggccccccugcaccugggcaagugcaacaucgccggcuggcugcugggcaaccccgagugcgagagccugagcaccgccagcagcuggagcuacaucguggagaccagcaacagcgacaacggcaccugcuaccccggcgacuucaucaacuacgaggagcugagagagcagcugagcagcgugagcagcuucgagagauucgagaucuuccccaagaccagcagcuggcccaaccacgacaccaacagaggcgugaccgccgccugcccccacgccggcaccaacagcuucuacagaaaccugaucuggcuggugaagaagggcaacagcuaccccaagaucaacaagagcuacaucaacaacaaggagaaggaggugcuggugcugugggccauccaccaccccagcaccagcgccgaccagcagagccuguaccagaacgccgacgccuacguguucgugggcagcagcagauacagcagaaaguucgagcccgagaucgccaccagacccaaggugagagaccaggccggcagaaugaacuacuacuggacccugguggagcccggcgacaagaucaccuucgaggccaccggcaaccugguggugcccagauacgccuucgcccugaagagaaccagcggcagcggcaucaucaucagcgacaccagcgugcacgacugcgacaccaccugccagacccccaacggcgccaucaacaccagccugcccuuccagaacauccaccccgugaccaucggcgagugccccaaguacgugaagagcaccaagcugagaauggccaccggccugagaaacauccccagcauccagagcagaggccuguucggcgccaucgccggcuucaucgagggcggcuggaccggcaugaucgacggcugguacggcuaccaccaccagaacgagcagggcagcggcuacgccgccgaccugaagagcacccagaacgccaucgacggcaucaccaacaaggugaacagcgugaucgagaagaugaacacccaguucaccgccgugggcaaggaguucagccaccuggagagaagaaucgagaaccugaacaagaagguggacgacggcuuccuggacaucuggaccuacaacgccgagcugcuggugcugcuggagaacgagagaacccuggacuaccacgacagcaacgugaagaaccuguacgagaaggugagaagccagcugaagaacaacgccaaggagaucggcaacggcugcuucgaguucuaccacaagugcgacgacaccugcauggagagcgugaagaacggcaccuacgacuaccccaaguacagcgaggaggccaagcugaacagagaggagaucgacggcgugaagcuggagagcaccagaaucuaccagauccuggccaucuacagcaccguggccagcagccuggugcugguggugagccugggcgccaucagcuucuggaugugcagcaacggcagccugcagugcagaaucugcaucuga

SEQ ID NO: 173949 - RNA, 1701 nt, Artificial Sequence
  derived and/or modified CDS sequence (opt4) from hemagglutinin__InfluenzaA__EPI482799
augaaggccauccugguggugcugcuguacaccuucaccaccgccaacgccgacacccugugcaucggcuaccacgccaacaacagcaccgacaccguggacaccgugcuggagaagaacgugaccgugacccacagcgugaaccugcuggagaacagacacaacggcaagcugugcaagcugagaggcguggccccccugcaccugggcaagugcaacaucgccggcuggcugcugggcaaccccgagugcgagagccugagcaccgccagcagcuggagcuacaucguggagaccagcaacagcgacaacggcaccugcuaccccggcgacuucaucaacuacgaggagcugagagagcagcugagcagcgugagcagcuucgagagauucgagaucuuccccaagaccagcagcuggcccaaccacgagaccaacagaggcgugaccgccgccugcccccacgccggcaccaacagcuucuacagaaaccugaucuggcuggugaagaagggcaacagcuaccccaagaucaacaagagcuacaucaacaacaaggagaaggaggugcuggugcugugggccauccaccaccccagcaccagcgccgaccagcagagccuguaccagaacgccgacgccuacguguucgugggcagcagcagauacagcagaaaguucgagcccgagaucgccaccagacccaaggugagagaccaggccggcagaaugaacuacuacuggacccugguggagcccggcgacaagaucaccuucgaggccaccggcaaccugguggugcccagauacgccuucgcccugaagagaaccagcggcagcggcaucaucaucagcgacaccagcgugcacgacugcgacaccaccugccagacccccaacggcgccaucaacaccagccugcccuuccagaacauccaccccgugaccaucggcgagugccccaaguacgugaagagcaccaagcugagaauggccaccggccugagaaacauccccagcauccagagcagaggccuguucggcgccaucgccggcuucaucgagggcggcuggaccggcaugaucgacggcugguacggcuaccaccaccagaacgagcagggcagcggcuacgccgccgaccugaagagcacccagaacgccaucgacggcaucaccaacaaggugaacagcgugaucgagaagaugaacacccaguucaccgccgugggcaaggaguucagccaccuggagagaagaaucgagaaccugaacaagaagguggacgacggcuuccuggacaucuggaccuacaacgccgagcugcuggugcugcuggagaacgagagaacccuggacuaccacgacagcaacgugaagaaccuguacgagaaggugagaagccagcugaagaacaacgccaaggagaucggcaacggcugcuucgaguucuaccacaagugcgacgacaccugcauggagagcgugaagaacggcaccuacgacuaccccaaguacagcgaggaggccaagcugaacagagaggagaucgacggcgugaagcuggagagcaccagaaucuaccagauccuggccaucuacagcaccguggccagcagccuggugcugguggugagccugggcgccaucagcuucuggaugugcagcaacggcagccugcagugcagaaucugcaucuga

SEQ ID NO: 173950 - RNA, 1701 nt, Artificial Sequence
  derived and/or modified CDS sequence (opt4) from hemagglutinin__InfluenzaA__EPI291807
augaaggccaucaucguggugcugcuguacaccuucgccaccgccgacgccgacacccugugcaucggcuaccacgccaacaacagcaccgacaccguggacaccgugcuggagaagaacgugaccgugacccacagcgugaaccugcuggagaacaagcacgacggcaagcugugcaagcugagaggcguggccccccugcaccugggcaagugcaacaucgccggcuggcugcugggcaaccccgagugcgagagccuguucgccgccagcagcuggagcuacaucguggagacccccaacagcgacaacggcaccugcuaccccggcgacuucaucaacuacgaggagcugagagagcaccugagcagcgugagcagcuucgagagauucgagaucuuccccaaggccaacagcuggcccaaccacgacaccaacaagggcgugaccgccgccugccccuacgccggcgccaacagcuucuacagaaaccugaucuggcuggugaagaagggcaacagcuaccccaagcugagcaagagcuacaucaacaacaagaagaaggaggugcuggugaucuggggcauccaccacccccccaccagcaccgaccagcagacccuguaccagaacgccgacgccuacguguucgugggcagcagcaaguacagcaagagauucaagcccgagaucgccgccagacccaaggugagagaccaggccggcagaauggacuacuacuggacccugaucgagcccggcgacaccaucaccuucgaggccaccggcaaccugguggugcccagauacgccuucgccaugaagagaggcagcggcagcggcaucaucgugagcgacgcccccgugcacgacugcaacaccaccugccagacccccaagggcgccaucaacaccagccugcccuuccagaacauccaccccgugaccaucggcgagugccccaaguacgugaagagcaccaagcugagaauggccaccggccugagaaacauccccagcauccagagcagaggccuguucggcgccaucgccggcuucaucgagggcggcuggaccggcaugaucgacggcugguacggcuaccaccaccagaacgagcagggcagcggcuacgccgccgaccagaagagcacccagaacgccaucgacggcaucaccaacaaggugaacagcaucaucgagaagaugaacacccaguucaccgccgugggcaaggaguucagccagcuggagaagagaaucgagagccugaacaacaagguggacgacggcuuccuggacaucuggaccuacaacgccgagcugcuggugcugcuggagaacgagagaacccuggacuaccacgacagcaacgugaagaaccuguacgagaaggugagaagccagcugaagaacaacgccaaggagaucggcaacggcugcuucgaguucuaccacaagugcgacaacaccugcauggagagcgugaagaacggcaccuacgacuaccccaaguacagcgaggaggccaagcugaacagagaggagaucgacggcgugaagcuggagagcgccagaaucuaccagauccuggccaucuacagcaccguggccagcagccuggugcugcuggugagccugggcgccgugagcuucuggaugugcagcaacggcagccugcagugcagaaucugcaucuga

SEQ ID NO: 173951 - RNA, 1701 nt, Artificial Sequence
  derived and/or modified CDS sequence (opt4) from hemagglutinin__InfluenzaA__EPI638970
augaaggccauccugguggugcugcuguacaccuucaccaccgccaacgccgacacccugugcaucggcuaccacgccaacaacagcaccgacaccguggacaccgugcuggagaagaacgugaccgugacccacagcgugaaccugcuggagaacagacacaacggcaagcugugcaagcugagaggcguggccccccugcaccugggcaagugcaacaucgccggcuggauccugggcaaccccgagugcgagagccugagcaccgccagcagcuggagcuacaucguggagaccagcaacagcgagaacggcaccugcuaccccggcgacuucaucaacuacgaggagcugagagagcagcugagcagcgugagcagcuucgagagauucgagaucuuccccaagaccagcagcuggcccaaccacgacaccaacaagggcgugaccgccgccugcccccacagcggcaccaacagcuucuacagaaaccugguguggcuggugcagaagggcaacagcuaccccaagaucaacaagagcuacaucaacaacaaggagaacgaggugcuggugcugugggccauccaccaccccagcaccagcgccgaccagcagagccuguacaagaacgccgacgccuacguguucgugggcagcagcagauacagcagaaaguucgagcccgagaucgccaccagacccaaggugagagaccaggccggcagaaugaacuacuacuggacccugguggagcccggcgacaagaucaccuucgaggccaccggcaaccugguggcccccagauacgccuucacccugaagagaaacagcggcagcggcaucaucaucagcgacaccagcgugcacgacugcgacaccaccugccagacccccaacggcgccaucaacaccagccugcccuuccagaacauccaccccgugaccaucggcgagugccccaaguacgugaagagcaccaagcugagaauggccaccggccugagaaacauccccagcauccagagcagaggccuguucggcgccaucgccggcuucaucgagggcggcuggaccggcaugaucgacggcugguacggcuaccaccaccagaacgagcagggcagcggcuacgccgccgaccugaagagcacccagaacgccaucgacggcaucaccaacaaggugaacagcgugaucgagaagaugaacacccaguucaccgccgugggcaaggaguucagccaccuggagagaagaaucgagaaccugaacaagaagguggacgacggcuuccuggacaucuggaccuacaacgccgagcugcuggugcugcuggagaacgagagaacccuggacuaccacgacagcaacgugaagaaccuguacgagaaggugagaagccagcugaagaacaacgccaaggagaucggcaacggcugcuucgaguucuaccacaagugcgacgacaugugcauggagagcgugaagaacggcaccuacgacuaccccaaguacagcgaggaggccaagcugaacagagaggagaucgacggcgugaagcuggagagcaccaagaucuaccagauccuggccaucuacagcaccguggccagcagccuggugcugguggugagccugggcgccaucagcuucuggaugugcagcaacggcagccugcagugcagaaucugcaucuga

SEQ ID NO: 173952 - RNA, 1701 nt, Artificial Sequence
  derived and/or modified CDS sequence (opt4) from hemagglutinin__InfluenzaA__ABI19015
augaaggccaucaucguggugcugcuguacaccuucgccaccgccgacgccgacacccugugcaucggcuaccacgccaacaacagcaccgacaccguggacaccgugcuggagaagaacgugaccgugacccacagcgugaaccugcuggagaacaagcacgacggcaagcugugcaagcugagaggcaucgccccccugcaccugggcaagugcaacaucgccggcuggauccugggcaaccccgagugcgagagccuguucaccaccagcagcuggagcuacaucguggagacccccaacagcgacaacggcaccugcuaccccggcgacuucaucaacuacgaggagcugagagagcaccugagcagcgugagcagcuucgagagauucgagaucuuccccaaggccaacagcuggcccuaccacgacaccaacaagggcgugaccgccgccugccccuacgccggcgccaacagcuucuacagaaaccugaucuggcuggugaagaagggcaacagcuaccccaagcugagcaagagcuacaucaacaacaagaagaaggaggugcuggugaucuggggcauccaccacccccccaccagcaccgaccagcagacccuguaccagaacgccgacgccuacguguucgugggcagcagcaaguacagcaagagauucaagcccgagaucgccgccagacccaaggugagagaccaggccggcagaauggacuacuacuggacccugaucgagcccggcgacaccaucaccuucgaggccaccggcaaccugguggugcccagauacgccuucaccaugaagagaggcagcggcagcggcaucaucgugagcgacgcccccgugcacgacugcaacaccaccugccagacccccaagggcgccaucaacaccagccugcccuuccagaacauccaccccgugaccaucggcgagugccccaaguacgugaagagcaccaagcugagaauggccaccggccugagaaacauccccagcauccagagcagaggccuguucggcgccaucgccggcuucaucgagggcggcuggaccggcaugaucgacggcugguacggcuaccaccaccagaacgagcagggcagcggcuacgccgccgaccagaagagcacccagaacgccaucgacggcaucaccaacaaggugaacagcaucaucgagaagaugaacacccaguucaccgccgugggcaaggaguucagccagcuggagaagagaaucgagagccugaacaacaagguggacgacggcuuccuggacaucuggaccuacaacgccgagcugcuggugcugcuggagaacgagagaacccuggacuaccacgacagcaacgugaagaaccuguacgagaaggugagaagccagcugaagaacaacgccaaggagaucggcaacggcugcuucgaguucuaccacaagugcgacgacaccugcauggagagcgugaagaacggcaccuacgacuaccccaaguacagcgaggaggccaagcugaacagacaggagaucgacggcgugaagcuggagagcgccagaaucuaccagauccuggccaucuacagcaccguggccagcagccuggugcugcuggugagccugggcgccgugagcuucuggaugugcagcaacggcagccugcagugcagaaucugcaucuga

SEQ ID NO: 173953 - RNA, 1701 nt, Artificial Sequence
  derived and/or modified CDS sequence (opt4) from hemagglutinin__InfluenzaA__EPI687790
augaaggccauccugguggugcugcuguacaccuucaccaccgccaacgccgacacccugugcaucggcuaccacgccaacaacagcaccgacaccguggacaccgugcuggagaagaacgugaccgugacccacagcgugaaccugcuggaggacaagcacaacggcaagcugugcaagcugggcggcguggccccccugcaccugggcaagugcaacaucgccggcuggauccugggcaaccccgagugcgagagccugagcaccgccagcagcuggagcuacaucguggagaccagcaacagcgacaacggcaccugcuaccccggcgacuucaucaacuacgaggagcugagagagcagcugagcagcgugagcagcuucgagagauucgagaucuuccccaagaccagcagcuggcccaaccacgacagcaacaagggcgugaccgccgccugcccccacgccggcgccaagagcuucuacaagaaccugaucuggcuggugaagaagggcaacagcuaccccaagcugaaccagagcuacaucaacgacaagggcaaggaggugcuggugcuguggggcauccaccaccccagcaccaccgccgaccagcagagccuguaccagaacgccgacgccuacguguucgugggcaccagcagauacagcaagaaguucaagcccgagaucgccaccagacccaaggugagagaccaggagggcagaaugaacuacuacuggacccugguggagcccggcgacaagaucaccuucgaggccaccggcaaccugguggugcccagauacgccuucaccauggagagaaacgccggcagcggcaucaucaucagcgacacccccgugcacgacugcaacaccaccugccagacccccgagggcgccaucaacaccagccugcccuuccagaacauccaccccaucaccaucggcaagugccccaaguacgugaagagcaccaagcugagacuggccaccggccugagaaacgugcccagcauccagagcagaggccuguucggcgccaucgccggcuucaucgagggcggcuggaccggcaugguggacggcugguacggcuaccaccaccagaacgagcagggcagcggcuacgccgccgaccugaagagcacccagaacgccaucgacaagaucaccaacaaggugaacagcgugaucgagaagaugaacacccaguucaccgccgugggcaaggaguucaaccaccuggagaagagaaucgagaaccugaacaagaagguggacgacggcuuccuggacaucuggaccuacaacgccgagcugcuggugcugcuggagaacgagagaacccuggacuaccacgacagcaacgugaagaaccuguacgagaaggugagaaaccagcugaagaacaacgccaaggagaucggcaacggcugcuucgaguucuaccacaagugcgacaacaccugcauggagagcgugaagaacggcaccuacgacuaccccaaguacagcgaggaggccaagcugaacagagagaagaucgacggcgugaagcuggagagcaccagaaucuaccagauccuggccaucuacagcaccguggccagcagccuggugcugguggugagccugggcgccaucagcuucuggaugugcagcaacggcagccugcagugcagaaucugcaucuga

SEQ ID NO: 173954 - RNA, 1701 nt, Artificial Sequence
  derived and/or modified CDS sequence (opt4) from hemagglutinin__InfluenzaA__EPI841265
augaaggccauccugguggugcugcuguacaccuucaccaccgccaacgccgacacccugugcaucggcuaccacgccaacaacagcaccgacaccguggacaccgugcuggagaagaacgugaccgugacccacagcgugaaccugcuggaggacaagcacaacggcaagcugugcaagcugggcggcguggccccccugcaccugggcaagugcaacaucgccggcuggauccugggcaaccccgagugcgagagccugagcaccgccagcagcuggagcuacaucguggagaccagcaacagcgacaacggcaccugcuaccccggcgacuucaucaacuacgaggagcugagagagcagcugagcagcgugagcagcuucgagagauucgagaucuuccccaagaccagcagcuggcccaaccacgacagcaacaagggcgugaccgccgccugcccccacgccggcgccaagagcuucuacaagaaccugaucuggcuggugaagaagggcaacagcuaccccaagcugaaccagagcuacaucaacgacaagggcaaggaggugcuggugcuguggggcauccaccaccccagcaccaccgccgaccagcagagcaucuaccagaacgccgacgccuacguguucgugggcaccagcagauacagcaagaaguucaagcccgagaucgccaccagacccaaggugagagaccaggagggcagaaucaacuacuacuggacccugguggagcccggcgacaagaucaccuucgaggccaccggcaaccugguggugcccagauacgccuucaccauggagagaaacgccggcagcggcaucaucaucagcaacacccccgugcacgacugcaacaccaccugccagacccccgagggcgccaucaacaccagccugcccuuccagaacauccaccccaucaccaucggcaagugccccaaguacgugaagagcaccaagcugagacuggccaccggccugagaaacgugcccagcauccagagcagaggccuguucggcgccaucgccggcuucaucgagggcggcuggaccggcaugguggacggcugguacggcuaccaccaccagaacgagcagggcagcggcuacgccgccgaccugaagagcacccagaacgccaucgacaagaucaccaacaaggugaacagcgugaucgagaagaugaacacccaguucaccgccgugggcaaggaguucaaccaccuggagaagagaaucgagaaccugaacaagaagguggacgacggcuuccuggacaucuggaccuacaacgccgagcugcuggugcugcuggagaacgagagaacccuggacuaccacgacagcaacgugaagaaccuguacgagaaggugagaaaccagcugaagaacaacgccaaggagaucggcaacggcugcuucgaguucuaccacaagugcgacaacaccugcauggagagcgugaagaacggcaccuacgacuaccccaaguacagcgaggaggccaagcugaacagagagaagaucgacggcgugaagcuggagagcaccagaaucuaccagauccuggccaucuacagcaccguggccagcagccuggugcugguggugagccugggcgccaucagcuucuggaugugcagcaacggcagccugcagugcagaaucugcaucuga

SEQ ID NO: 173955 - RNA, 1701 nt, Artificial Sequence
  derived and/or modified CDS sequence (opt4) from hemagglutinin__InfluenzaA__EPI291846
augaaggccaucaucguggugcugcuguacaccuucgccaccgccgacgccgacacccugugcaucggcuaccacgccaacaacagcaccgacaccguggacaccgugcuggagaagaacgugaccgugacccacagcgugaaccugcuggagaacaagcacgacggcaagcugugcaaccugaagggcguggccccccugcaccugggcaagugcaacaucgccggcuggcugcugggcaaccccgagugcgagagccuguucaccgccagcagcuggagcuacaucguggagacccccaacagcgacaacggcaccugcuaccccggcgacuucaucaacuacgaggagcugagagagcaccugagcagcgugagcagcuucgagagauucgagaucuuccccaaggugaacagcuggcccaaccacgacaccaacaagggcgugaccgccgccugccccuacgccggcgccaacagcuucuacagaaaccugaucuggcuggugaagaagggcaacagcuaccccaagcugagcaagagcuacaucaacaacaagaagaaggaggugcuggugaucuggggcauccaccacccccccaccagcaccgaccagcagacccuguaccagaacgccgacgccuacguguucgugggcagcagcaaguacagcaagagauucgagcccgagaucgccgccagacccaaggugagaaaccaggccggcagaaugaacuacuacuggacccugaucgagcccggcgacaccaucaccuucgaggccaccggcaaccugguggugcccagauacgccuucgccaugagaagaggcagcggcagcggcaucaucgugagcgacgcccccgugcacgacugcaacaccaccugccagacccccaagggcgccaucaacaccagccugcccuuccagaacauccaccccgugaccaucggcgagugccccaaguacgugaagagcaccaagcugagaauggccaccggccugagaaacauccccagcauccagagcagaggccuguucggcgccaucgccggcuuccuggagggcggcuggaccggcaugaucgacggcugguacggcuaccaccaccagaacgagcagggcagcggcuacgccgccgaccagaagagcacccagaacgccaucgacggcaucaccaacaaggugaacagcaucaucgagaagaugaacacccaguucaccgccgugggcaaggaguucagccagcuggagaagagaaucgagagccugaacaacaagguggacgacggcuuccuggacaucuggaccuacaacgccgagaugcuggugcugcuggagaacgagagaacccuggacuaccacgacagcaacgugaagaaccuguacgagaaggugagaagccagcugaagaacaacgccaaggagaucggcaacggcugcuucgaguucuaccacaagugcgacaacaccugcauggagagcgugagaaacggcaccuacgacuaccccaaguacagcgaggaggccaagcugaacagagaggagaucgacggcgugaagcuggagagcgccagaaucuaccagauccuggccaucuacagcaccguggccagcagccuggugcugcuggugagccugggcgccgugagcuucuggaugugcagcaacggcagccugcagugcagaaucugcaucuga

SEQ ID NO: 173956 - RNA, 1695 nt, Artificial Sequence
  derived and/or modified CDS sequence (opt4) from hemagglutinin__InfluenzaA__EPI558121
augaaggccauccugguggugcugcuguacaccuucaccaccgccaacgccgacacccugugcaucggcuaccacgccaacaacagcaccgacaccguggacaccgugcuggagaagaacgugaccgugacccacagcgugaaccugcuggagaacagacacaacggcaagcugugcaagcugagaggcguggccccccugcaccugggcaagugcaacaucgccggcuggcugcugggcaaccccgagugcgagagccugagcaccgccagcagcuggagcuacaucguggagaccagcaacagcgacaacggcaccugcuaccccggcgacuucaucaacuacgaggagcugagagagcagcugagcagcgugagcagcuucgagagauucgagaucuucccccagaccagcagcuggcccaaccacgacaccaacagaggcgugaccgccgccugcccccacgccggcaccaacagcuucuacagaaaccugguguggcuggugaagaagggcaacagcuacagcaagaucaacaagagcuacaucaacaacaaggagaaggaggugcuggugcugugggccauccaccaccccagcaccagcgccgaccagcagagccuguaccagaacgccgacgccuacguguucgugggcagcagcagauacagcagaaaguucgagcccgagaucgccaccagacccaaggugagagaccaggccggcagaaugaacuacuacuggacccugguggagcccggcgacaagaucaccuucgaggccaccggcaaccugguggcccccagauacgccuucgcccugaagagaaacagcggcagcggcaucaucaucagcgacaccagcgugcacgacugcgacaccaccugccagacccccaacggcgccaucaacaccagccugcccuuccagaacauccaccccgugaccaucggcgagugccccaaguacgugaagagcaccaagcugagaauggccaccggccugagaaacauccccagcauccagagcagaggccuguucggcgccaucgccggcuucaucgagggcggcuggaccggcaugaucgacggcugguacggcuaccaccaccagaacgagcagggcagcggcuacgccgccgaccugaagagcacccagaacgccaucgacggcaucaccaacaaggugaacagcgugaucgagaagaugaacacccaguucaccgccgugggcaaggaguucagccaccuggagagaagaaucgagaaccugaacaagaagguggacgacggcuuccuggacaucuggaccuacaacgccgagcugcuggugcugcuggagaacgagagaacccuggacuaccacgacagcaacgugaagaaccuguacgagaaggugagaagccagcugaagaacaacgccaaggagaucggcaacggcugcuucgaguucuaccacaagugcgacgacaugugcauggagagcgugaagaacggcaccuacgacuaccccaaguacagcgaggaggccaagcugaacagagaggagaucgacggcgugaagcuggagagcaccagaaucuaccagauccuggccaucuacagcaccguggccagcagccuggugcugguggugagccugggcgccaucagcuucuggaugugcagcaacggcagccugcagugcagaaucuga

SEQ ID NO: 173957 - RNA, 1701 nt, Artificial Sequence; identical to SEQ ID NO: 172501
  derived and/or modified CDS sequence (opt4) from hemagglutinin__InfluenzaA__EPI564139

SEQ ID NO: 173958 - RNA, 1701 nt, Artificial Sequence; identical to SEQ ID NO: 173746
  derived and/or modified CDS sequence (opt4) from hemagglutinin__InfluenzaA__EPI786706

SEQ ID NO: 173959 - RNA, 1701 nt, Artificial Sequence
  derived and/or modified CDS sequence (opt4) from hemagglutinin__InfluenzaA__EPI395313
augaaggccauccugaucgugcugcuguacaccuucaccaccgccaacgccgacacccugugcaucggcuaccacgccaacaacagcaccgacaccguggacaccgugcuggagaagaacgugaccgugacccacagcgugaaccugcuggagaacagacacaacggcaagcugugcaagcugagaggcguggccccccugcaccugggcaagugcaacaucgccggcuggcugcugggcaaccccgagugcgagagccugagcaccgccagcagcuggagcuacaucguggagaccagcaacagcgacaacggcaccugcuaccccggcgacuucaucaacuacgaggagcugagagagcagcugagcagcgugagcagcuucgagagauucgagaucuuccccaagaccagcagcuggcccaaccacgacaccaacagaggcgugaccgccgccugcccccacgccggcaccaagagcuucuacaagaaccugaucuggaucgccaagaagggcaacagcuaccccaagaucaacaagagcuacaucaacaacaaggagaaggaggugcuggugcugugggccauccaccaccccagcaccagcgccgaccagcagagccuguaccagaacgccgacgccuacguguucgugggcagcagcagauacagcagaaaguucgagcccgagaucgccaccagacccaaggugagagaccaggccggcagaaugaacuacuacuggacccugguggagcccggcgacaagaucaccuucgaggccaccggcaaccugguggcccccagauacgccuucgcccugaagagaaacagcggcagcggcaucaucaucagcgacaccagcgugcacgacugcgacaccaccugccagacccccaacggcgccaucaacaccagccugcccuuccagaacauccaccccgugaccaucggcgagugccccaaguacgugaagagcaccaagcugagaauggccaccggccugagaaacauccccagcauccagagcagaggccuguucggcgccaucgccggcuucaucgagggcggcuggaccggcaugaucgacggcugguacggcuaccaccaccagaacgagcagggcagcggcuacgccgccgaccugaagagcacccagaacgccaucgacggcaucaccaacaaggugaacagcgugaucgagaagaugaacacccaguucaccgccgugggcaaggaguucagccaccuggagagaagaaucgagaaccugaacaagaagguggacgacggcuuccuggacaucuggaccuacaacgccgagcugcuggugcugcuggagaacgagagaacccuggacuaccacgacagcaacgugaagaaccuguacgagaaggugagaagccagcugaagaacaacgccaaggagaucggcaacggcugcuucgaguucuaccacaagugcgacgacaugugcauggagagcgugaagaacggcaccuacgacuaccccaaguacagcgaggaggccaagcugaacagagaggugaucgacggcgugaagcuggagagcaccagaaucuaccagauccuggccaucuacgccaccguggccagcagccuggugcugguggugagccugggcgccaucagcuucuggaugugcagcaacggcagccugcagugcagaaucugcaucuga

SEQ ID NO: 173960 - RNA, 1701 nt, Artificial Sequence
  derived and/or modified CDS sequence (opt4) from hemagglutinin__InfluenzaA__EPI291696
augaaggccauccugcuggugcugcuguacaccuucaccgccgccaacgccgacacccugugcaucggcuaccacgccaacaacagcaccgacaccguggacaccgugcuggagaagaacgugaccgugacccacagcgugaaccugcuggagaacagacacaacggcaagcugugcaagcugagaggcgugcccccccugcaccugggcaagugcaacaucgccggcuggcugcugggcaaccccgagugcgagcugcuguucaccgccagcagcuggagcuacaucguggagaccagcaacagcgacaacggcaccugcuaccccggcgacuucaucaacuacgaggagcugagagagcagcugagcagcgugagcagcuucgagagauucgagaucuuccccaaggccagcagcuggcccgaccacgagaccaacagaggcgugaccgccgccugccccuacgccggcgccaacagcuucuacagaaaccugaucuggcuggugaagaagggcaacagcuaccccaagcugagcaagagcuacgugaacaacaaggagaaggaggugcuggugcuguggggcauccaccacccccccaccagcaccgaccagcagagccuguaccagaacgccgacgccuacguguucgugggcagcagcaaguacaacaagaaguucaagcccgagauggccgccagacccaaggugagaggccaggccggcagaaugaacuacuacuggacccugguggcccccggcgacaccaucaccuucgaggccaccggcaaccugguggugcccagauacgccuucgccaugaagagaggcagcggcagcggcaucaucaucagcgacacccccgugcacgacugcaacaccaccugccagacccccaagggcgccaucaacaccagccugcccuuccagaacauccaccccgugaccaucggcgagugccccaaguacgugaagagcaccaagcugagaauggccaccggccugagaaacauccccagcauccagagcagaggccuguucggcgccaucgccggcuucaucgagggcggcuggaccggcaugaucgacggcugguacggcuaccaccaccagaacgagcagggcagcggcuacgccgccgacagaaagagcacccagaacgccaucgacggcaucaccaacaaggugaacagcgugaucgagaagaugaacacccaguucaccgccgugggcaaggaguucaaccaccuggagaagagaaucgagaaccugaacaagaagguggacgacggcuuccuggacguguggaccuacaacgccgagcugcuggugcugcuggagaacgagagaacccuggacuaccacgacagcaacgugaagaaccuguacgagaaggugagaagccagcugaagaacaacgccaaggagaucggcaacggcugcuucgaguucuaccacaagugcgacgacaccugcauggagagcgugaagaacggcaccuacgacuaccccaaguacagcgaggagagcaagcugaacagagaggagaucgacggcgugaagcuggagagcaccagaaucuaccagauccuggccaucuacagcaccguggccagcagccuggugcugagcgugagccugggcgccaucagcuucuggaugugcagcaacggcagccugcagugcagaaucugcaucuga

SEQ ID NO: 173961 - RNA, 1701 nt, Artificial Sequence; identical to SEQ ID NO: 169891
  derived and/or modified CDS sequence (opt4) from hemagglutinin__InfluenzaA__ACU80014

SEQ ID NO: 173962 - RNA, 1701 nt, Artificial Sequence; identical to SEQ ID NO: 162729
  derived and/or modified CDS sequence (opt4) from hemagglutinin__InfluenzaA__EPI177400

SEQ ID NO: 173963 - RNA, 1701 nt, Artificial Sequence; identical to SEQ ID NO: 163172
  derived and/or modified CDS sequence (opt4) from hemagglutinin__InfluenzaA__ACT36512

SEQ ID NO: 173964 - RNA, 1704 nt, Artificial Sequence
  derived and/or modified CDS sequence (opt4) from hemagglutinin__InfluenzaA__AJE30344
auggagaagaucgugcugcugcuggccgugaucagccuggugaagagcgaccagaucugcaucggcuaccacgccaacaacagcaccaagcagguggacaccaucauggagaagaacgugaccgugacccacgcccaggacauccuggagaagacccacaacggcaagcugugcgaccugaacggcgugaagccccugauccugaaggacugcagcguggccggcuggcugcugggcaaccccaugugcgacgaguucaucagagugcccgaguggagcuacaucguggagagagccaaccccgccaacgaccugugcuaccccggcacccugaacgacuacgaggagcugaagcaccugcugagcagaaucaaccacuucgagaagaaccugaucauccccagaagcagcuggcccaaccacgagaccagccugggcgugagcgccgccugccccuaccagggcgccagcagcuucuucagaaacgugguguggcugaucaagaagaacgacgccuaccccaccaucaagaucagcuacaacaacaccaacagagaggaccugcugauccuguggggcauccaccacagcaacaacgccgccgagcagaccaaccuguacaagaaccccgacaccuacgugagcgugggcaccagcacccugaaccagagacuggugcccaagaucgccaccagaagccaggugaacggccagagcggcagaauggacuucuucuggaccauccugaagcccaacgacgccauccacuucgagagcaacggcaacuucaucgcccccgaguacgccuacaagaucgugaagaagggcgacagcaccaucaugaagagcgagauggaguacggccacugcaacaccaagugccagacccccaucggcgccaucaacagcagcaugcccuuccacaacauccacccccugaccaucggcgagugccccaaguacgugaagagcaacaagcuggugcuggccaccggccugagaaacagcccccugagagagagaagaagaaagagaggccuguucggcgccaucgccggcuucaucgagggcggcuggcagggcaugguggacggcugguacggcuaccaccacagcaacgagcagggcagcggcuacgccgccgacaaggagagcacccagaaggccaucgacggcgugaccaacaaggugaacagcaucaucgacaagaugaacacccaguucgaggccgugggcagagaguucaacaaccuggagagaagaaucgagaaccugaacaagaagauggaggacggcuuccuggacguguggaccuacaacgccgagcugcuggugcugauggagaacgagagaacccuggacuuccacgacagcaacgugaagaaccuguacgacaaggugagacugcagcugagagacaacgccaaggagcugggcaacggcugcuucgaguucuaccacaagugcgacaacgagugcauggagagcgugagaaacggcaccuacgacuaccccaaguacagcgaggaggccauccugaagagagaggagaucagcggcgugaagcuggagagcaucggcaccuaccagauccugagcaucuacagcaccguggccagcagccuggcccuggccaucaucguggccggccugagccuguggaugugcagcaacggcagccugcagugcagaaucugcaucuga

SEQ ID NO: 173965 - RNA, 1701 nt, Artificial Sequence; identical to SEQ ID NO: 173944
  derived and/or modified CDS sequence (opt4) from hemagglutinin__InfluenzaA__EPI178948

SEQ ID NO: 173966 - RNA, 1701 nt, Artificial Sequence; identical to SEQ ID NO: 173944
  derived and/or modified CDS sequence (opt4) from hemagglutinin__InfluenzaA__EPI178949

SEQ ID NO: 173967 - RNA, 1701 nt, Artificial Sequence
  derived and/or modified CDS sequence (opt4) from hemagglutinin__InfluenzaA__EPI590132
augaaggccauccugaucgugcugcuguacaccuucaccaccgccaacgccgacaagaucugcaucggcuaccacgccaacaacagcaccgacaccguggacaccgugcuggagaagaacgugaccgugacccacagcgugaaccugcuggagaacaagcacaacggcaagcugugcaagcugagaggcguggccccccugcaccugggcaagugcaacaucgccggcuggcugcugggcaaccccgagugcgagagccuggccaccgccagcagcuggagcuacaucguggagaccagcagcagcaacaacggcaccugcuaccccggcgacuucaucaacuacgaggagcugagagagcagcugagcagcgugagcagcuucgagaaguucgagaucuuccccaagaccagcagcuggcccaaccacgagaccaacaagggcgugaccgccgccugcccccacgccggcaccaacagcuucuacaagaaccugaucuggcuggugaagaaggagaacagcuaccccaagaucaacaucagcuacaccaacaacagaggcaaggaggugcuggugcugugggccauccaccacccccccaccagcaccgaccagcagagccuguaccagaacgccaacagcuacguguucgugggcagcagcagauacagcagaaaguucgagcccgagaucgccaccagacccaaggugagaggccaggccggcagaaugaacuacuacuggacccugguggagcccggcgacaagaucaccuucgaggccaccggcaaccugguggugcccagauacgccuucgcccugaagagaaacagcggcagcggcaucaucaucagcgagacccccgugcacgacugcgacaccaccugccagacccccaacggcgccaucaacaccagccugcccuuccagaacauccaccccgugaccaucggcgagugccccaaguacgugaagagcaccaagcugagaauggccaccggccugagaaacauccccagcauccagagcagaggccuguucggcgccaucgccggcuucaucgagggcggcuggaccggcaugaucgacggcugguacggcuaccaccaccagaacgagcagggcagcggcuacgccgccgaccugaagagcacccagaacgccaucgacggcaucaccaacaaggugaacagcgugaucgagaagaugaacacccaguucaccgccgugggcaaggaguucagccaccuggagagaagaaucgagaaccugaacaagaagguggacgacggcuucaucgacaucuggaccuacaacgccgagcugcuggugcugcuggagaacgagagaacccuggacuaccacgacagcaacgugaagacccuguacgagaaggugagaagccagcugaagaacaacgccaaggagaucggcaacggcugcuucgaguucuaccacaagugcgacgacaccugcauggagagcgugaagaacggcaccuacgacuaccccaaguacagcgaggaggccaagcugaacagagaggagaucgacggcaucaagcuggagagcaccagaaucuaccagauccuggccaucuacagcaccguggccagcagccuggugcugguggugagccugggcgccaucagcuucuggaugugcagcaacggcagccugcagugcagagugugcaucuga

SEQ ID NO: 173968 - RNA, 1701 nt, Artificial Sequence; identical to SEQ ID NO: 161796
  derived and/or modified CDS sequence (opt4) from hemagglutinin__InfluenzaA__ABU80400

SEQ ID NO: 173969 - RNA, 1698 nt, Artificial Sequence
  derived and/or modified CDS sequence (opt4) from hemagglutinin__InfluenzaA__ABO21709
augaaggccaaccugcuggugcugcugugcgcccuggccgccgccgacgccgacaccaucugcaucggcuaccacgccaacaacagcaccgacaccguggacaccgugcuggagaagaacgugaccgugacccacagcgugaaccugcuggaggacagccacaacggcaagcugugcagacugaagggcaucgccccccugcagcugggcaagugcaacaucgccggcuggcugcugggcaaccccgagugcgacccccugcugcccgugagaagcuggagcuacaucguggagacccccaacagcgagaacggcaucugcuaccccggcgacuucaucgacuacgaggagcugagagagcagcugagcagcgugagcagcuucgagagauucgagaucuuccccaaggagagcagcuggcccaaccacaacaccaacggcgugaccgccgccugcagccacgagggcaagagcagcuucuacagaaaccugcuguggcugaccgagaaggagggcagcuaccccaagcugaagaacagcuacgugaacaagaagggcaaggaggugcuggugcuguggggcauccaccacccccccaacagcaaggagcagcagaaccuguaccagaacgagaacgccuacgugagcguggugaccagcaacuacaacagaagauucacccccgagaucgccgagagacccaaggugagagaccaggccggcagaaugaacuacuacuggacccugcugaagcccggcgacaccaucaucuucgaggccaacggcaaccugaucgcccccauguacgccuucgcccugagcagaggcuucggcagcggcaucaucaccagcaacgccagcaugcacgagugcaacaccaagugccagaccccccugggcgccaucaacagcagccugcccuaccagaacauccaccccgugaccaucggcgagugccccaaguacgugagaagcgccaagcugagaauggugaccggccugagaaacaaccccagcauccagagcagaggccuguucggcgccaucgccggcuucaucgagggcggcuggaccggcaugaucgacggcugguacggcuaccaccaccagaacgagcagggcagcggcuacgccgccgaccagaagagcacccagaacgccaucaacggcaucaccaacaaggugaacaccgugaucgagaagaugaacauccaguucaccgccgugggcaaggaguucaacaagcuggagaagagaauggagaaccugaacaagaagguggacgacggcuuccuggacaucuggaccuacaacgccgagcugcuggugcugcuggagaacgagagaacccuggacuuccacgacagcaacgugaagaaccuguacgagaaggugaagagccagcugaagaacaacgccaaggagaucggcaacggcugcuucgaguucuaccacaagugcgacaacgagugcauggagagcgugagaaacggcaccuacgacuaccccaaguacagcgaggagagcaagcugaacagagagaagguggacggcgugaagcuggagagcaugggcaucuaccagauccuggccaucuacagcaccguggccagcagccuggugcugcuggugagccugggcgccaucagcuucuggaugugcagcaacggcagccugcagugcagaaucugcaucuga

SEQ ID NO: 173970 - RNA, 1701 nt, Artificial Sequence; identical to SEQ ID NO: 162716
  derived and/or modified CDS sequence (opt4) from hemagglutinin__InfluenzaA__CAZ65588

SEQ ID NO: 173971 - RNA, 1701 nt, Artificial Sequence; identical to SEQ ID NO: 173746
  derived and/or modified CDS sequence (opt4) from hemagglutinin__InfluenzaA__EPI697744

SEQ ID NO: 173972 - RNA, 1701 nt, Artificial Sequence; identical to SEQ ID NO: 173906
  derived and/or modified CDS sequence (opt4) from hemagglutinin__InfluenzaA__EPI768525

SEQ ID NO: 173973 - RNA, 1701 nt, Artificial Sequence
  derived and/or modified CDS sequence (opt4) from hemagglutinin__InfluenzaA__EPI726930
augaaggccauccugguggugcugcuguacaccuucaccaccgccaacgccgacacccugugcaucggcuaccacgccaacaacagcaccgacaccguggacaccgugcuggagaagaacgugaccgugacccacagcgugaaccugcuggaggacaagcacaacggcaagcugugcaagcugagaggcguggccccccugcaccugggcaagugcaacaucgccggcuggauccugggcaaccccgagugcgagagccugagcaccgccagcagcuggagcuacaucguggagaccagcaacagcgacaacggcaccugcuaccccggcgacuucaucaacuacgaggagcugagagagcagcugagcagcgugagcagcuucgagagauucgagaucuuccccaaggccagcagcuggcccaaccacgacagcaacaagggcgugaccgccgccugcccccacgccggcgccaagagcuucuacaagaaccugaucuggcuggugaagaagggcaacagcuaccccaagcugaaccagagcuacaucaacgacaagggcaaggaggugcuggugcuguggggcauccaccaccccagcaccaccgccgaccagcagagccuguaccagaacgccgacgccuacguguucgugggcaccagcagauacagcaagaaguucaagcccgagaucgccaccagacccaaggugagagaccaggagggcagaaugaacuacuacuggacccugguggagcccggcgacaagaucaccuucgaggccaccggcaaccugguggugcccagauacgccuucaccauggagagaaacgccggcagcggcaucaucaucagcgacacccccgugcacgacugcaacaccaccugccagacccccgagggcgccaucaacaccagccugcccuuccagaacauccaccccaucaccaucggcaagugccccaaguacgugaagagcaccaagcugagacuggccaccggccugagaaacgugcccagcauccagagcagaggccuguucggcgccaucgccggcuucaucgagggcggcuggaccggcaugguggacggcugguacggcuaccaccaccagaacgagcagggcagcggcuacgccgccgaccugaagagcacccagaacgccaucgacaagaucaccaacaaggugaacagcgugaucgagaagaugaacacccaguucaccgccgugggcaaggaguucaaccaccuggagaagagaaucgagaaccugaacaagaagguggacgacggcuuccuggacaucuggaccuacaacgccgagcugcuggugcugcuggagaacgagagaacccuggacuaccacgacagcaacgugaagaaccuguacgagaaggugagaaaccagcugaagaacaacgccaaggagaucggcaacggcugcuucgaguucuaccacaagugcgacaacaccugcauggagagcgugaagaacggcaccuacgacuaccccaaguacagcgaggaggccaagcugaacagagagaagaucgacggcgugaagcuggagagcaccagaaucuaccagauccuggccaucuacagcaccguggccagcagccuggugcugguggugagccugggcgccaucagcuucuggaugugcagcaacggcagccugcagugcagaaucugcaucuga

SEQ ID NO: 173974 - RNA, 1701 nt, Artificial Sequence
  derived and/or modified CDS sequence (opt4) from hemagglutinin__InfluenzaA__EPI813817
augaaggccauccugguggugcugcuguacaccuucaccaccgccaacgccgacacccugugcaucggcuaccacgccaacaacagcaccgacaccguggacaccgugcuggagaagaacgugaccgugacccacagcgugaaccugcuggaggacaagcacaacggcaagcugugcaagcugagaggcguggccccccugcaccugggcaagugcaacaucgccggcuggauccugggcaaccccgagugcgagagccugagcaccgccagcagcuggagcuacaucguggagaccagcaacagcgacaacggcaccugcuaccccggcgacuucaucaacuacgaggagcugagagagcagcugagcagcgugagcagcuucgagagauucgagaucuuccccaaggccagcagcuggcccaaccacgacagcaacaagggcgugaccgccgccugcccccacgccggcgccaagagcuucuacaagaaccugaucuggcuggugaagaagggcaacagcuaccccaagcugaaccagagcuacaucaacgacaagggcaaggaggugcuggugcuguggggcauccaccaccccagcaccaccgccgaccagcagagccuguaccagaacgccgacgccuacguguucgugggcaccagcagauacagcaagaaguucaagcccgagaucgccaccagacccaaggugagagaccaggaggccagaaugaacuacuacuggacccugguggagcccggcgacaagaucaccuucgaggccaccggcaaccugguggugcccagauacgccuucaccauggagagaaacgccggcagcggcaucaucaucagcgacacccccgugcacgacugcaacaccaccugccagacccccgagggcgccaucaacaccagccugcccuuccagaacauccaccccaucaccaucggcaagugccccaaguacgugaagagcaccaagcugagacuggccaccggccugagaaacgugcccagcauccagagcagaggccuguucggcgccaucgccggcuucaucgagggcggcuggaccggcaugguggacggcugguacggcuaccaccaccagaacgagcagggcagcggcuacgccgccgaccugaagagcacccagaacgccaucgacaagaucaccaacaaggugaacagcgugaucgagaagaugaacacccaguucaccgccgugggcaaggaguucaaccaccuggagaagagaaucgagaaccugaacaagaagguggacgacggcuuccuggacaucuggaccuacaacgccgagcugcuggugcugcuggagaacgagagaacccuggacuaccacgacagcaacgugaagaaccuguacgagaaggugagaaaccagcugaagaacaacgccaaggagaucggcaacggcugcuucgaguucuaccacaagugcgacaacaccugcauggagagcgugaagaacggcaccuacgacuaccccaaguacagcgaggaggccaagcugaacagagagaagaucgacggcgugaagcuggagagcaccagaaucuaccagauccuggccaucuacagcaccguggccagcagccuggugcugguggugagccugggcgccaucagcuucuggaugugcagcaacggcagccugcagugcagaaucugcaucuga

SEQ ID NO: 173975 - RNA, 1701 nt, Artificial Sequence
  derived and/or modified CDS sequence (opt4) from hemagglutinin__InfluenzaA__EPI466626
augaaggccauccugguggugcugcuguacaccuucgccaccgccaacgccgacacccugugcaucggcuaccacgccaacaacagcaccgacaccguggacaccgugcuggagaagaacgugaccgugacccacagcgugaaccugcuggaggacaagcacaacggcaagcugugcaagcugagaggcguggccccccugcaccugggcaagugcaacaucgccggcuggauccugggcaaccccgagugcgagagccugagcaccgccagcagcuggagcuacaucguggagaccagcagcagcgacaacggcaccugcuaccccggcgacuucaucaacuacgaggagcugagagagcagcugagcagcgugagcagcuucgagagauucgagaucuuccccaagaccagcagcuggcccaaccacgacagcaacaagggcgugaccgccgccugcccccacgccggcgccaagagcuucuacaagaaccugaucuggcuggugaagaagggcaacagcuaccccaagcugagccagagcuacaucaacgacaagggcaaggaggugcuggugcuguggggcauccaccaccccagcaccaccgccgaccagcagagccuguaccagaacgccgacgccuacguguucgugggcaccagcagauacagcaagaaguucaagcccgagaucgccaucagacccaaggugagagaccaggagggcagaaugaacuacuacuggacccugguggagcccggcgacaagaucaccuucgaggccaccggcaaccugguggugcccagauacgccuucaccauggagagaaacgccggcagcggcaucaucaucagcgacacccccgugcacgacugcaacaccaccugccagacccccgagggcgccaucaacaccagccugcccuuccagaacauccaccccaucaccaucggcaagugccccaaguacgugaagagcaccaagcugagacuggccaccggccugagaaacgugcccagcauccagagcagaggccuguucggcgccaucgccggcuucaucgagggcggcuggaccggcaugguggacggcugguacggcuaccaccaccagaacgagcagggcagcggcuacgccgccgaccugaagagcacccagaacgccaucgacaagaucaccaacaaggugaacagcgugaucgagaagaugaacacccaguucaccgccgugggcaaggaguucaaccaccuggagaagagaaucgagaaccugaacaagaagguggacgacggcuuccuggacaucuggaccuacaacgccgagcugcuggugcugcuggagaacgagagaacccuggacuaccacgacagcaacgugaagaaccuguacgagaaggugagaaaccagcugaagaacaacgccaaggagaucggcaacggcugcuucgaguucuaccacaagugcgacaacaccugcauggagagcgugaagaacggcaccuacgacuaccccaaguacagcgaggaggccaagcugaacagagagaagaucgacggcgugaagcuggagagcaccagaaucuaccagauccuggccaucuacagcaccguggccagcagcguggugcugguggugagccugggcgccaucagcuucuggaugugcagcaacggcagccugcagugcagaaucugcaucuga

SEQ ID NO: 173976 - RNA, 1701 nt, Artificial Sequence
  derived and/or modified CDS sequence (opt4) from hemagglutinin__InfluenzaA__EPI541966
augaaggccauccugguggugcugcuguacaccuucgccaccgccaacgccgacacccugugcaucggcuaccacgccaacaacagcaccgacaccguggacaccgugcuggagaagaacgugaccgugacccacagcgugaaccugcuggaggacaagcacaacggcaagcugugcaagcugagaggcguggccccccugcaccugggcaagugcaacaucgccggcuggauccugggcaaccccgagugcgagagccugagcaccgccagcagcuggagcuacaucguggagaccagcagcagcgacaacggcaccugcuaccccggcgacuucaucaacuacgaggagcugagagagcagcugagcagcgugagcagcuucgagagauucgagaucuuccccaagaccagcagcuggcccaaccacgagagcaacaagggcgugaccgccgccugcccccacgccggcgccaagagcuucuacaagaaccugaucuggcuggugaagaagggcaacagcuaccccaagcugagccagagcuacaucaacgacaagggcaaggaggugcuggugcuguggggcauccaccaccccagcaccaccgccgaccagcagagccuguaccagaacgccgacgccuacguguucgugggcaccagcagauacagcaagaaguucaagcccgagaucgccaucagacccaaggugagagaccaggagggcagaaugaacuacuacuggacccugguggagcccggcgacaagaucaccuucgaggccaccggcaaccugguggugcccagauacgccuucaccauggagagaaacgccggcagcggcaucaucaucagcgacacccccgugcacgacugcaacaccaccugccagacccccgagggcgccaucaacaccagccugcccuuccagaacauccaccccaucaccaucggcaagugccccaaguacgugaagagcaccaagcugagacuggccaccggccugagaaacgugcccagcauccagagcagaggccuguucggcgccaucgccggcuucaucgagggcggcuggaccggcaugguggacggcugguacggcuaccaccaccagaacgagcagggcagcggcuacgccgccgaccugaagagcacccagaacgccaucgacaagaucaccaacaaggugaacagcgugaucgagaagaugaacacccaguucaccgccgugggcaaggaguucaaccaccuggagaagagaaucgagaaccugaacaagaagguggacgacggcuuccuggacaucuggaccuacaacgccgagcugcuggugcugcuggagaacgagagaacccuggacuaccacgacagcaacgugaagaaccuguacgagaaggugagaaaccagcugaagaacaacgccaaggagaucggcaacggcugcuucgaguucuaccacaagugcgacaacaccugcauggagagcgugaagaacggcaccuacgacuaccccaaguacagcgaggaggccaagcugaacagagagaagaucgacggcgugaagcuggagagcaccagaaucuaccagauccuggccaucuacagcaccguggccagcagcguggugcugguggugagccugggcgccaucagcuucuggaugugcagcaacggcagccugcagugcagaaucugcaucuga

SEQ ID NO: 173977 - RNA, 1701 nt, Artificial Sequence
  derived and/or modified CDS sequence (opt4) from hemagglutinin__InfluenzaA__EPI652003
augaaggccauccugguggugcugcuguacaccuucgccaccgccaacgccgacacccugugcaucggcuaccacgccaacaacagcaccgacaccguggacaccgugcuggagaagaacgugaccgugacccacagcgugaaccugcuggaggacaagcacaacggcaagcugugcaagcugagaggcguggccccccugcaccugggcaagugcaacaucgccggcuggauccugggcaaccccgagugcgagagccugagcaccgccagcagcuggagcuacaucguggagaccagcagcagcgacaacggcaccugcuaccccggcgacuucaucaacuacgaggagcugagagagcagcugagcagcgugagcagcuucgagagauucgagaucuuccccaagaccagcagcuggcccaaccacgagagcaacaagggcgugaccgccgccugcccccacgccggcgccaagagcuucuacaagaaccugaucuggcuggugaagaagggcaacagcuaccccaagcugagccagagcuacaucaacgacaagggcaaggaggugcuggugcuguggggcauccaccacccccccaccaccgccgaccagcagagccuguaccagaacgccgacgccuacguguucgugggcaccagcagauacagcaagaaguucaagcccgagaucgccaucagacccaaggugagagaccaggagggcagaaugaacuacuacuggacccugguggagcccggcgacaagaucaccuucgaggccaccggcaaccugguggugcccagauacgccuucaccauggagagaaacgccggcagcggcaucaucaucagcgacacccccgugcacgacugcaacaccaccugccagacccccgagggcgccaucaacaccagccugcccuuccagaacauccaccccaucaccaucggcaagugccccaaguacgugaagagcaccaagcugagacuggccaccggccugagaaacgugcccagcauccagagcagaggccuguucggcgccaucgccggcuucaucgagggcggcuggaccggcaugguggacggcugguacggcuaccaccaccagaacgagcagggcagcggcuacgccgccgaccugaagagcacccagaacgccaucgacaagaucaccaacaaggugaacagcgugaucgagaagaugaacacccaguucaccgccgugggcaaggaguucaaccaccuggagaagagaaucgagaaccugaacaagaagguggacgacggcuuccuggacaucuggaccuacaacgccgagcugcuggugcugcuggagaacgagagaacccuggacuaccacgacagcaacgugaagaaccuguacgagaaggugagaaaccagcugaagaacaacgccaaggagaucggcaacggcugcuucgaguucuaccacaagugcgacaacaccugcauggagagcgugaagaacggcaccuacgacuaccccaaguacagcgaggaggccaagcugaacagagagaagaucgacggcgugaagcuggagagcaccagaaucuaccagauccuggccaucuacagcaccguggccagcagcguggugcugguggugagccugggcgccaucagcuucuggaugugcagcaacggcagccugcagugcagaaucugcaucuga

SEQ ID NO: 173978 - RNA, 1701 nt, Artificial Sequence
  derived and/or modified CDS sequence (opt4) from hemagglutinin__InfluenzaA__EPI291877
augaaggccaucaucguggugcugcuguacaccuucgccaccgccgacgccgacacccugugcaucggcuaccacgccaacaacagcaccgacaccguggacaccgugcuggagaagaacgugaccgugacccacagcgugaacauccuggagaacaagcacgacggcaagcugugcaagcugagaggcguggccccccugcaccugggcaagugcaacaucgccggcuggcugcugggcaaccccgagugcgagagccuguucgccgccagcagcuggagcuacaucguggagacccccaacagcgacaacggcaccugcuaccccggcgacuucaucaacuacgaggagcugagagagcaccugagcagcgugagcagcuucgagagauucgagaucuuccccaaggccaacagcuggcccaaccacgacaccaacaagggcgugaccgccgccugccccuacgccggcgccaacagcuucuacagaaaccugaucuggcuggugaagaagggcaacagcuaccccaagcugagcaagagcuacaucaacaacaagaagaaggaggugcuggugaucuggggcauccaccacccccccaccagcaucgaccagcagacccuguaccagaacgccgacgccuacguguucgugggcagcagcaaguacagcaagagauucaagcccgagaucgccgccagacccaaggugagagaccaggccggcagaauggacuacuacuggacccugaucgagcccggcgacaccaucaccuucgaggccaccggcaaccugguggugcccagauacgccuucgccaugaagagaggcagcggcagcggcaucaucgugagcgacgcccccgugcacgacugcaacaccaccugccagacccccaagggcgccaucaacaccagccugcccuuccagaacauccaccccgugaccaucggcgagugccccaaguacgugaagagcaccaagcugagaauggccaccggccugagaaacauccccagcauccagagcagaggccuguucggcgccaucgccggcuucaucgagggcggcuggaccggcaugaucgacggcugguacggcuaccaccaccagaacgagcagggcagcggcuacgccgccgaccagaagagcacccagaacgccaucgacggcaucaccaacaaggugaacagcaucaucgagaagaugaacacccaguucaccgccgugggcaaggaguucagccagcuggagaagagaaucgagagccugaacaacaagguggacgacggcuuccuggacaucuggaccuacaacgccgagcugcuggugcugcuggagaacgagagaacccuggacuaccacgacagcaacgugaagaaccuguacgagaaggugagaagccagcugaagaacaacgccaaggagaucggcaacggcugcuucgaguucuaccacaagugcgacaacaccugcauggagagcgugaagaacggcaccuacgacuaccccaaguacagcgaggaggccaagcugaacagagaggagaucgacggcaucaagcuggagagcgccagaaucuaccagauccuggccaucuacagcaccguggccagcagccuggugcugcuggugagccugggcgccgugagcuucuggaugugcagcaacggcagccugcagugcagaaucugcaucuga

SEQ ID NO: 173979 - RNA, 1701 nt, Artificial Sequence
  derived and/or modified CDS sequence (opt4) from hemagglutinin__InfluenzaA__ABR29595
augaaggccauccugcuggugcugcuguacaccuucaccgccgccaacgccgacacccugugcaucggcuaccacgccaacaacagcaccgacaccguggacaccgugcuggagaagaacgugaccgugacccacagcgugaaccugcuggaggacagacacaacggcaagcugugcaagcugagaggcguggccccccugcaccugggcaagugcaacaucgccggcuggcugcugggcaaccccgagugcgagcugcuguucaccgccagcagcuggagcuacaucguggagaccagcaacagcgacaacggcaccugcuaccccggcgacuucaucaacuacgaggagcugagagagcagcugagcagcgugagcagcuucgagagauucgagaucuuccccaaggccagcagcuggcccaaccacgagaccaacagaggcgugaccgccgccugccccuacgccggcgccaacagcuucuacagaaaccugaucuggcuggugaagaagggcaacagcuaccccaagcugagcaagagcuacgugaacaacaaggagaaggaggugcuggugcuguggggcauccaccacccccccaccagcaccgaccagcagagccuguaccagaacgccgacgccuacguguucgugggcagcagcaaguacaacaagaaguucaagcccgagaucgccaccagacccaaggugagaggccaggccggcagaaugaacuacuacuggacccugguggagcccggcgacaccaucaccuucgaggccaccggcaaccugguggugcccagauacgccuucgccaugaagagaggcagcggcagcggcaucaucaucagcgacacccccgugcacgacugcaacaccaccugccagacccccaagggcgccaucaacaccagccugcccuuccagaacauccaccccgugaccaucggcgagugccccaaguacgugaagagcaccaagcugagaauggccaccggccugagaaacauccccagcauccagagcagaggccuguucggcgccaucgccggcuucaucgagggcggcuggaccggcaugaucgacggcugguacggcuaccaccaccagaacgagcagggcagcggcuacgccgccgacagaaagagcacccagaacgccaucgacggcaucaccaacaaggugaacagcgugaucgagaagaugaacacccaguucaccgccgugggcaaggaguucaaccaccuggagaagagaaucgagaaccugaacaagaagguggacgacggcuuccuggacguguggaccuacaacgccgagcugcuggugcugcuggagaacgagagaacccuggacuaccacgacagcaacgugaagaaccuguacgagaaggugagaagccagcugaagaacaacgccaaggagaucggcaacggcugcuucgaguucuaccacaagugcgacgacaccugcauggagagcgugaagaacggcaccuacgacuaccccaaguacagcgaggagagcaagcugaacagagaggagaucgacggcgugaagcuggagagcaccagaaucuaccagauccuggccaucuacagcaccguggccagcagccuggugcugcuggugagccugggcgccaucagcuucuggaugugcagcaacggcagccugcagugcagaaucugcaucuga

SEQ ID NO: 173980 - RNA, 1701 nt, Artificial Sequence
  derived and/or modified CDS sequence (opt4) from hemagglutinin__InfluenzaA__EPI291885
augaaggccaucaucguggugcugcugcacaccuucgccaccgccgacgccgacacccugugcaucggcuaccacgccaacaacagcaccgacaccguggacaccgugcuggagaagaacgugaccgugacccacagcgugaaccugcuggagaccaagcacgacggcaagcugugcaaccugaagggcguggccccccugcaccugggcaagugcaacaucgccggcuggcugcugggcaaccccgagugcgagagccuguucaccgccagcagcuggagcuacaucguggagacccccaacagcgacaacggcaccugcuaccccggcaacuucaucaacuacgaggagcugagagagcaccugagcagcgugagcagcuucgagagauucgagaucuuccccaaggccaacagcuggcccaaccacgacaccaacaagggcgugaccgccgccugccccuacgccggcgccaacagcuucuacagaaaccugaucuggcuggugaagaagggcaacagcuaccccaagcugagcaagagcuacaucaacaacaagaagaaggaggugcuggugaucuggggcauccaccacccccccaccagcaccgaccagcagacccuguaccagaacgccgacgccuacguguucgugggcagcagcaaguacagcaagagauucgagcccgagaucgccgccagacccaaggugagaaaccaggccggcagaaugaacuacuacuggacccugaucgagcccggcgacaccaucaccuucgaggccaccggcaaccugguggugcccagauacgccuucgccaugagaagaggcagcggcagcggcaucaucgugagcgacgcccccgugcacgacugcaacaccaccugccagacccccaagggcgccaucaacaccagccugcccuuccagaacauccaccccgugaccaucggcgagugccccaaguacgugaagagcaccaagcugagaauggccaccggccugagaaacauccccagcauccagagcagaggccuguucggcgccaucgccggcuuccuggagggcggcuggaccggcaugaucgacggcugguacggcuaccaccaccagaacgagcagggcagcggcuacgccgccgaccagaagagcacccagaacgccaucgacggcaucaccaacaaggugaacagcaucaucgagaagaugaacacccaguucaccgccgugggcaaggaguucagccagcuggagaagagaaucgagagccugaacaacaagguggacgacggcuuccuggacaucuggaccuacaacgccgagaugcuggugcugcuggagaacgagagaacccuggacuaccacgacagcaacgugaagaaccuguacgagaaggugagaagccagcugaagaacaacgccaaggagaucggcaacggcugcuucgaguucuaccacaagugcgacaacaccugcauggagagcgugaagaacggcaccuacgacuaccccaaguacagcgaggaggccaagcugaacagagaggagaucgacggcgugaagcuggagagcgccagaaucuaccagauccuggccaucuacagcaccguggccagcagccuggugcugcuggugagccugggcgccgugagcuucuggaugugcagcaacggcagccugcagugcagaaucugcaucuga

SEQ ID NO: 173981 - RNA, 1701 nt, Artificial Sequence; identical to SEQ ID NO: 162716
  derived and/or modified CDS sequence (opt4) from hemagglutinin__InfluenzaA__EPI176515

SEQ ID NO: 173982 - RNA, 1701 nt, Artificial Sequence; identical to SEQ ID NO: 163172
  derived and/or modified CDS sequence (opt4) from hemagglutinin__InfluenzaA__EPI189182

SEQ ID NO: 173983 - RNA, 1701 nt, Artificial Sequence; identical to SEQ ID NO: 162964
  derived and/or modified CDS sequence (opt4) from hemagglutinin__InfluenzaA__EPI180574

SEQ ID NO: 173984 - RNA, 1701 nt, Artificial Sequence; identical to SEQ ID NO: 168769
  derived and/or modified CDS sequence (opt4) from hemagglutinin__InfluenzaA__EPI377499

SEQ ID NO: 173985 - RNA, 1701 nt, Artificial Sequence
  derived and/or modified CDS sequence (opt4) from hemagglutinin__InfluenzaA__EPI346916
augaaggccauccugguggugcugcuguacaccuucaccaccgccaccgccgacacccugugcaucggcuaccacgccaacaacagcaccgacaccguggacaccgugcuggagaagaacgugaccgugacccacagcgugaaccugcuggagaacagacacaacggcaagcugugcaagcugagaggcguggccccccugcaccugggcaagugcaacaucgccggcuggcugcugggcaaccccgagugcgagagccugagcaccgccagcagcuggagcuacaucguggagaccagcaacagcgacaacggcaccugcuaccccggcgacuucaucaacuacgaggagcugagagagcagcugagcagcgugagcagcuucgagagauucgagaucuuccccaagaccagcagcuggcccaaccacgacaccaacagaggcgugaccgccgccugcccccacgacggcaccaacagcuucuacagaaaccugaucuggcuggugaagaagggcaacagcuaccccaagaucaacaagagcuacaucaacaacaaggagaaggagauccuggugcugugggccauccaccaccccagcaccagcgccgaccagcagagccuguaccagaacgccgacgccuacguguucgugggcagcagcagauacagcagaaaguucgagcccgagguggccaccagacccaaggugagagaccaggccggcagaaugaacuacuacuggacccugguggagcccggcgacaagaucaccuucgaggccaccggcaaccugguggugcccagauacgccuucgcccugaagagaaacagcggcagcggcaucaucaucagcgacaccagcgugcacgacugcgacaccaacugccagacccccaacggcgccaucaacaccagccugcccuuccagaacauccaccccgugaccaucggcgagugccccaaguacgugaagagcaccaagcugagaauggccaccggccugagaaacauccccagcauccagagcagaggccuguucggcgccaucgccggcuucaucgagggcggcuggaccggcaugaucgacggcugguacggcuaccaccaccagaacgagcagggcagcggcuacgccgccgaccugaagagcacccagaacgccaucgacggcaucaccaacaaggugaacagcgugaucgagaagaugaacacccaguucaccgccgugggcaaggaguucagccaccuggagagaagaaucgagaaccugaacaagaagguggacgacggcuuccuggacaucuggaccuacaacgccgagcugcuggugcugcuggagaacgagagaacccuggacuaccacgacagcaacgugaagaaccuguacgagaaggugagaagccagcugaagaacaacgccaaggagaucggcaacggcugcuucgaguucuaccacaagugcgacgacaugugcauggagagcgugaagaacggcaccuacgacuaccccaaguacagcgaggaggccaagcugaacagagaggagaucgacggcgugaagcuggagagcaccagaaucuaccagauccuggccaucuacagcaccguggccagcagccuggugcugguggugagccugggcgccaucagcuucuggaugugcagcaacggcagccugcagugcagaaucugcaucuga

SEQ ID NO: 173986 - RNA, 1689 nt, Artificial Sequence; identical to SEQ ID NO: 163343
  derived and/or modified CDS sequence (opt4) from hemagglutinin__InfluenzaA__ACV49600

SEQ ID NO: 173987 - RNA, 1701 nt, Artificial Sequence; identical to SEQ ID NO: 162389
  derived and/or modified CDS sequence (opt4) from hemagglutinin__InfluenzaA__BAF48361

SEQ ID NO: 173988 - RNA, 1701 nt, Artificial Sequence
  derived and/or modified CDS sequence (opt4) from hemagglutinin__InfluenzaA__EPI507594
augaagaccaucaucgcccugagcuacauccugugccugguguucgcccagaagcugcccggcaacgacaacagcaccgccacccugugccugggccaccacgccgugcccaacggcaccaucgugaagaccaucaccaacgacagaaucgaggugaccaacgccaccgagcuggugcagaacagcagcaucggcgagaucugcgacagcccccaccagauccuggacggcgagaacugcacccugaucgacgcccugcugggcgacccccagugcgacggcuuccagaacaagaagugggaccuguucguggagagaagcaaggccuacagcaacugcuaccccuacgacgugcccgacuacgccagccugagaagccugguggccagcagcggcacccuggaguucaacaacgagagcuucaacugggccggcgugacccagaacggcaccagcagcgccugcaagagaggcagcaacagcagcuucuucagcagacugaacuggcugacccaccugaacuucaaguaccccgcccugaacgugaccaugcccaacaacgagcaguucgacaagcuguacaucuggggcgugcaccaccccgugaccgacaaggaccagaucuuccuguacgcccagagcagcggcagaaucaccgugagcaccaagagaagccagcaggccgugauccccaacaucggcuucagacccagaaucagaaacauccccagcagaaucagcaucuacuggaccaucgugaagcccggcgacauccugcugaucaacagcaccggcaaccugaucgcccccagaggcuacuucaagaucagaagcggcaagagcagcaucaugagaagcgacgcccccaucggcaagugcaagagcgagugcaucacccccaacggcagcauccccaacgacaagcccuuccagaacgugaacagaaucaccuacggcgccugccccagauacgugaagcagagcacccugaagcuggccaccggcaugagaaacgugcccgagaagcagaccagaggcaucuucggcgccaucgccggcuucaucgagaacggcugggagggcaugguggacggcugguacggcuucagacaccagaacuucgagggcagaggccaggccgccgaccugaagagcacccaggccgccaucgaccagaucaacggcaagcugaacagacugaucggcaagaccaacgagaaguuccaccagaucgagaaggaguucagcgagguggagggcagaauccaggaccuggagaaguacguggaggacaccaagaucgaccuguggagcuacaacgccgagcugcugguggcccuggagaaccagcacaccaucgaccugaccgacagcgagaugaacaagcuguucgagaagaccaagaagcagcugagagagaacgccgaggacaugggcaacggcugcuucaagaucuaccacaagugcgacaacgccugcaucggcagcaucagaaacggcaccuacgaccacgacguguacagagacgaggcccugaacaacagauuccagaucaagggcguggagcugaagagcggcuacaaggacuggauccuguggaucagcuucgccaucagcugcuuccugcugugcguggcccugcugggcuucaucaugugggccugccagaagggcaacaucagaugcaacaucugcaucuga

SEQ ID NO: 173989 - RNA, 1701 nt, Artificial Sequence
  derived and/or modified CDS sequence (opt4) from hemagglutinin__InfluenzaA__EPI461953
augaagaccaucaucgcccugagcuacauccugugccugguguucgcccagaagcugcccggcaacgacaacagcaccgccacccugugccugggccaccacgccgugcccaacggcaccaucgugaagaccaucaccaacgacagaaucgaggugaccaacgccaccgagcuggugcagaacagcagcaucggcgagaucugcgacagcccccaccagauccuggacggcgagaacugcacccugaucgacgcccugcugggcgacccccagugcgacggcuuccagaacaagaagugggaccuguucguggagagaagcaaggccuacagcaacugcuaccccuacgacgugcccgacuacgccagccugagaagccugguggccagcagcggcacccuggaguucaacaacgagagcuucaacugggccggcgugacccagaacggcaccagcagcgccugcaucagaggcagcaacagcagcuucuucagcagacugaacuggcugacccaccugaacuucaaguaccccgcccugaacgugaccaugcccaacaacgagcaguucgacaagcuguacaucuggggcgugcaccaccccggcaccgacaaggaccagaucuuccuguacgcccagagcagcggcagaaucaccgugagcaccaagagaagccagcaggccgugauccccaacaucggcagcagacccagaaucagaaacauccccagcagaaucagcaucuacuggaccaucgugaagcccggcgacauccugcugaucaacagcaccggcaaccugaucgcccccagaggcuacuucaagaucagaagcggcaagagcagcaucaugagaagcgacgcccccaucggcaagugcaagagcgagugcaucacccccaacggcagcauccccaacgacaagcccuuccagaacgugaacagaaucaccuacggcgccugccccagauacgugaagcagagcacccugaagcuggccaccggcaugagaaacgugcccgagaagcagaccagaggcaucuucggcgccaucgccggcuucaucgagaacggcugggagggcaugguggacggcugguacggcuucagacaccagaacuucgagggcagaggccaggccgccgaccugaagagcacccaggccgccaucgaccagaucaacggcaagcugaacagacugaucggcaagaccaacgagaaguuccaccagaucgagaaggaguucagcgagguggagggcagaauccaggaccuggagaaguacguggaggacaccaagaucgaccuguggagcuacaacgccgagcugcugguggcccuggagaaccagcacaccaucgaccugaccgacagcgagaugaacaagcuguucgagaagaccaagaagcagcugagagagaacgccgaggacaugggcaacggcugcuucaagaucuaccacaagugcgacaacgccugcaucggcagcaucagaaacggcaccuacgaccacgacguguacagagacgaggcccugaacaacagauuccagaucaagggcguggagcugaagagcggcuacaaggacuggauccuguggaucagcuucgccaucagcugcuuccugcugugcguggcccugcugggcuucaucaugugggccugccagaagggcaacaucagaugcaacaucugcaucuga

SEQ ID NO: 173990 - RNA, 1701 nt, Artificial Sequence
  derived and/or modified CDS sequence (opt4) from hemagglutinin__InfluenzaA__EPI461953/m1
augaagaccaucaucgcccugagcuacauccugugccugguguucgcccagaagcugcccggcaacgacaacagcaccgccacccugugccugggccaccacgccgugcccaacggcaccaucgugaagaccaucaccaacgacagaaucgaggugaccaacgccaccgagcuggugcagaacagcagcaucggcgagaucugcgacagcccccaccagauccuggacggcgagaacugcacccugaucgacgcccugcugggcgacccccagugcgacggcuuccagaacaagaagugggaccuguucguggagagaagcaaggccuacagcaacugcuaccccuacgacgugcccgacuacgccagccugagaagccugguggccagcagcggcacccuggaguucaacaacgagagcuucaacugggccggcgugacccagaacggcaccagcagcgccugcaagagaggcagcaacagcagcuucuucagcagacugaacuggcugacccaccugaacuucaaguaccccgcccugaacgugaccaugcccaacaacgagcaguucgacaagcuguacaucuggggcgugcaccaccccgugaccgacaaggaccagaucuuccuguacgcccagagcagcggcagaaucaccgugagcaccaagagaagccagcaggccgugauccccaacaucggcuacagacccagaaucagaaacauccccagcagaaucagcaucuacuggaccaucgugaagcccggcgacauccugcugaucaacagcaccggcaaccugaucgcccccagaggcuacuucaagaucagaagcggcaagagcagcaucaugagaagcgacgcccccaucggcaagugcaagagcgagugcaucacccccaacggcagcauccccaacgacaagcccuuccagaacgugaacagaaucaccuacggcgccugccccagauacgugaagcagagcacccugaagcuggccaccggcaugagaaacgugcccgagaagcagaccagaggcaucuucggcgccaucgccggcuucaucgagaacggcugggagggcaugguggacggcugguacggcuucagacaccagaacuucgagggcagaggccaggccgccgaccugaagagcacccaggccgccaucgaccagaucaacggcaagcugaacagacugaucggcaagaccaacgagaaguuccaccagaucgagaaggaguucagcgagguggagggcagaauccaggaccuggagaaguacguggaggacaccaagaucgaccuguggagcuacaacgccgagcugcugguggcccuggagaaccagcacaccaucgaccugaccgacagcgagaugaacaagcuguucgagaagaccaagaagcagcugagagagaacgccgaggacaugggcaacggcugcuucaagaucuaccacaagugcgacaacgccugcaucggcagcaucagaaacggcaccuacgaccacgacguguacagagacgaggcccugaacaacagauuccagaucaagggcguggagcugaagagcggcuacaaggacuggauccuguggaucagcuucgccaucagcugcuuccugcugugcguggcccugcugggcuucaucaugugggccugccagaagggcaacaucagaugcaacaucugcaucuga

SEQ ID NO: 173991 - RNA, 1701 nt, Artificial Sequence
  derived and/or modified CDS sequence (opt4) from hemagglutinin__InfluenzaA__EPI668105
augaagaccaucaucgcccugagcuacauccugugccugguguucgcccagaagauccccggcaacgacaacagcaccgccacccugugccugggccaccacgccgugcccaacggcaccaucgugaagaccaucaccaacgacagaaucgaggugaccaacgccaccgagcuggugcagaacagcagcaucggcgagaucugcgacagcccccaccagauccuggacggcgagaacugcacccugaucgacgcccugcugggcgacccccagugcgacggcuuccagaacaagaagugggaccuguucguggagagaagcaaggccuacagcaacugcuaccccuacgacgugcccgacuacgccagccugagaagccugguggccagcagcggcacccuggaguucaacaacgagagcuucaacuggaccggcgugacccagaacggcaccagcagcgccugcaucagaggcagcagcagcagcuucuucagcagacugaacuggcugacccaccugaacuacaaguaccccgcccugaacgugaccaugcccaacaacgagcaguucgacaagcuguacaucuggggcgugcaccaccccggcaccgacaaggaccagaucuuccccuacgcccagagcagcggcagaaucaccgugagcaccaagagaagccagcaggccgugauccccaacaucggcagcagacccagaaucagaggcauccccagcagaaucagcaucuacuggaccaucgugaagcccggcgacauccugcugaucaacagcaccggcaaccugaucgcccccagaggcuacuucaagaucagaagcggcaagagcagcaucaugagaagcgacgcccccaucggcaagugcaagagcgagugcaucacccccaacggcagcauccccaacgacaagcccuuccagaacgugaacagaaucaccuacggcgccugccccagauacgugaagcacagcacccugaagcuggccaccggcaugagaaacgugcccgagaagcagaccagaggcaucuucggcgccaucgccggcuucaucgagaacggcugggagggcaugguggacggcugguacggcuucagacaccagaacagcgagggcagaggccaggccgccgaccugaagagcacccaggccgccaucgaccagaucaacggcaagcugaacagacugaucggcaagaccaacgagaaguuccaccagaucgagaaggaguucagcgagguggagggcagaauccaggaccuggagaaguacguggaggacaccaagaucgaccuguggagcuacaacgccgagcugcugguggcccuggagaaccagcacaccaucgaccugaccgacagcgagaugaacaagcuguucgagaagaccaagaagcagcugagagagaacgccgaggacaugggcaacggcugcuucaagaucuaccacaagugcgacaacgccugcaucggcagcaucagaaacggcaccuacgaccacaacguguacagagacgaggcccugaacaacagauuccagaucaagggcguggagcugaagagcggcuacaaggacuggauccuguggaucagcuucgccaucagcugcuuccugcugugcguggcccugcugggcuucaucaugugggccugccagaagggcaacaucagaugcaacaucugcaucuga

SEQ ID NO: 173992 - RNA, 1701 nt, Artificial Sequence
  derived and/or modified CDS sequence (opt4) from hemagglutinin__InfluenzaA__EPI578446
augaagaccaucaucgcccugagcuacauccugugccugguguucgcccagaagauccccggcaacgacaacagcaccgccacccugugccugggccaccacgccgugcccaacggcaccaucgugaagaccaucaccaacgacagaaucgaggugaccaacgccaccgagcuggugcagaacagcagcaucggcgagaucugcgacagcccccaccagauccuggacggcgagaacugcacccugaucgacgcccugcugggcgacccccagugcgacggcuuccagaacaagaagugggaccuguucguggagagaagcaaggccuacagcaacugcuaccccuacgacgugcccgacuacgccagccugagaagccugguggccagcagcggcacccuggaguucaacaacgagagcuucaacuggaccggcgugacccagaacggcaccagcagcgccugcaucagaagaagcagcagcagcuucuucagcagacugaacuggcugacccaccugaacuacaaguaccccgcccugaacgugaccaugcccaacaacgagcaguucgacaagcuguacaucuggggcgugcaccaccccggcaccgacaaggaccagaucuuccccuacgcccagagcagcggcagaaucaccgugagcaccaagagaagccagcaggccgugauccccaacaucggcagcagacccagaaucagaggcauccccagcagaaucagcaucuacuggaccaucgugaagcccggcgacauccugcugaucaacagcaccggcaaccugaucgcccccagaggcuacuucaagaucagaagcggcaagagcagcaucaugagaagcgacgcccccaucggcaagugcaagagcgagugcaucacccccaacggcagcauccccaacgacaagcccuuccagaacgugaacagaaucaccuacggcgccugccccagauacgugaagcacagcacccugaagcuggccaccggcaugagaaacgugcccgagaagcagaccagaggcaucuucggcgccaucgccggcuucaucgagaacggcugggagggcaugguggacggcugguacggcuucagacaccagaacagcgagggcagaggccaggccgccgaccugaagagcacccaggccgccaucgaccagaucaacggcaagcugaacagacugaucggcaagaccaacgagaaguuccaccagaucgagaaggaguucagcgagguggagggcagaauccaggaccuggagaaguacguggaggacaccaagaucgaccuguggagcuacaacgccgagcugcugguggcccuggagaaccagcacaccaucgaccugaccgacagcgagaugaacaagcuguucgagaagaccaagaagcagcugagagagaacgccgaggacaugggcaacggcugcuucaagaucuaccacaagugcgacaacgccugcaucggcagcaucagaaacggcaccuacgaccacaacguguacagagacgaggcccugaacaacagauuccagaucaagggcguggagcugaagagcggcuacaaggacuggauccuguggaucagcuucgccaucagcugcuuccugcugugcguggcccugcugggcuucaucaugugggccugccagaagggcaacaucagaugcaacaucugcaucuga

SEQ ID NO: 173993 - RNA, 1701 nt, Artificial Sequence; identical to SEQ ID NO: 172501
  derived and/or modified CDS sequence (opt4) from hemagglutinin__InfluenzaA__EPI551882

SEQ ID NO: 173994 - RNA, 1701 nt, Artificial Sequence
  derived and/or modified CDS sequence (opt4) from hemagglutinin__InfluenzaA__EPI344389
augaagaccaucaucgccuucagcugcauccugugccugaucuucgcccagaagcugcccggcagcgacaacagcauggccacccugugccugggccaccacgccgugcccaacggcacccuggugaagaccaucaccgacgaccagaucgaggugaccaacgccaccgagcuggugcagagcagcagcaccggcagaaucugcaacagcccccaccagauccuggacggcaagaacugcacccugaucgacgcccugcugggcgacccccacugcgacgaccugcagaacaaggagugggaccuguucguggagagaagcaccgccuacagcaacugcuaccccuacuacgugcccgacuacgccacccugagaagccugguggccagcagcggcaaccuggaguucacccaggagagcuucaacuggaccggcguggcccaggacggcagcagcuacgccugcagaagaggcagcgugaacagcuucuucagcagacugaacuggcuguacaaccugaacuacaaguaccccgagcagaacgugaccaugcccaacaacgacaaguucgacaagcuguacaucuggggcgugcaccaccccggcaccgacaaggaccagaccaaccuguacgugcaggccagcggcagagugaucgugagcaccaagagaagccagcagaccgugauccccaacaucggcagcagacccugggugagaggcgugagcagcaucaucagcaucuacuggaccaucgugaagcccggcgacauccugcugaucaacagcaccggcaaccugaucgcccccagaggcuacuucaagauccagagcggcaagagcagcaucaugagaagcgacgcccacaucgacgagugcaacagcgagugcaucacccccaacggcagcauccccaacgacaagcccuuccagaacgugaacaagaucaccuacggcgccugccccagauacgugaagcagaacacccugaagcuggccaccggcaugagaaacgugcccgagaagcagaccagaggcaucuucggcgccaucgccggcuucaucgagaacggcugggagggcaugguggacggcugguacggcuucagacaccagaacagcgagggcaccggccaggccgccgaccugaagagcacccaggccgccaucaaccagaucaccggcaagcugaacagagugaucaagaagaccaacgagaaguuccaccagaucgagaaggaguucagcgagguggagggcagaauccaggaccuggagaaguacguggaggacaccaagaucgaccuguggagcuacaacgccgagcugcugguggcccuggagaaccagcacaccaucgaccugaccgacagcgagaugagcaagcuguucgagagaaccagaagacagcugagagagaacgccgaggacaugggcaacggcugcuucaagaucuaccacaagugcgacaacgccugcaucggcagcaucagaaacggcaccuacgaccacgacaucuacagaaacgaggcccugaacaacagauuccagaucaagggcgugcagcugaagagcggcuacaaggacuggauccuguggaucagcuucgccaucagcugcuuccugcugugcguggugcugcugggcuucaucaugugggccugccagaagggcaacaucagaugcaacaucugcaucuga

SEQ ID NO: 173995 - RNA, 1701 nt, Artificial Sequence
  derived and/or modified CDS sequence (opt4) from hemagglutinin__InfluenzaA__EPI348782
augaagaccaucaucgccuucagcugcauccugugccugaucuucgcccagaagcugcccggcagcgacaacagcauggccacccugugccugggccaccacgccgugcccaacggcacccuggugaagaccaucaccgacgaccagaucgaggugaccaacgccaccgagcuggugcagagcagcagcaccggcagaaucugcaacagcccccaccagauccuggacggcaagaacugcacccugaucgacgcccugcugggcgacccccacugcgacgaccugcagaacaaggagugggaccuguucguggagagaagcaccgccuacagcaacugcuaccccuacuacgugcccgacuacgccacccugagaagccugguggccagcagcggcaaccuggaguucacccaggagagcuucaacuggaccggcguggcccaggacggcagcagcuacgccugcagaagaggcagcgugaacagcuucuucagcagacugaacuggcuguacaagcugaacuacaaguaccccgagcagaacgugaccaugcccaacaacgacaaguucgacaagcuguacaucuggggcgugcaccaccccggcaccgacaaggaccagaccaacaucuacgugcaggccagcggcagagugaucgugagcaccaagagaagccagcagaccgugauccccaacaucggcagcagacccugggugagaggcgugagcagcaucaucagcaucuacuggaccaucgugaagcccggcgacauccugcugaucaacagcaccggcaaccugaucgcccccagaggcuacuucaagauccagagcggcaagagcagcaucaugagaagcgacgcccacaucgacgagugcaacagcgagugcaucacccccaacggcagcauccccaacgacaagcccuuccagaacgugaacaagaucaccuacggcgccugccccagauacgugaagcagaacacccugaagcuggccaccggcaugagaaacgugcccgagaagcagaccagaggcaucuucggcgccaucgccggcuucaucgagaacggcugggagggcaugguggacggcugguacggcuucagacaccagaacagcgagggcaccggccaggccgccgaccugaagagcacccaggccgccaucaaccagaucaccggcaagcugaacagagugaucaagaagaccaacgagaaguuccaccagaucgagaaggaguucagcgagguggagggcagaauccaggaccuggagaaguacguggaggacaccaagaucgaccuguggagcuacaacgccgagcugcugguggcccuggagaaccagcacaccaucgaccugaccgacagcgagaugagcaagcuguucgagagaaccagaagacagcugagagagaacgccgaggacaugggcaacggcugcuucaagaucuaccacaagugcgacaacgccugcaucggcagcaucagaaacggcaccuacgaccacgacaucuacagaaacgaggcccugaacaacagauuccagaucaagggcgugcagcugaagagcggcuacaaggacuggauccuguggaucagcuucgccaucagcugcuuccugcugugcguggugcugcugggcuucaucaugugggccugccagaagggcaacaucagaugcaacaucugcaucuga

SEQ ID NO: 173996 - RNA, 1701 nt, Artificial Sequence
  derived and/or modified CDS sequence (opt4) from hemagglutinin__InfluenzaA__EPI642513
augaagaccaucaucgccuucagcugcauccugugccugaucuucgcccagaagcugcccggcagcgacaagagcauggccacccugugccugggccaccacgccgugcccaacggcacccuggugaagaccaucaccgacgaccagaucgaggugaccaacgccaccgagcuggugcagagcagcagcaccagcagaaucugcaacagcccccaccagauccuggacggcaagaacugcacccugaucgacgcccugcugggcgacccccacugcgacgacuuccagaacaagaagugggaccuguucguggagagaagcaccgccuacagcaacugcuaccccuacuacgugcccgacuacgccacccugagaagccugaucgccagcagcggcaaccuggaguucacccaggagagcuucaacuggaccggcguggcccaggacggcagcagcuacgccugcagaagaggcagcgugaacagcuucuucagcagacugaacuggcuguacaaccugaacuacaaguaccccgagcagaacgugaccaugcccaacaacgacaaguucgacaagcuguacaucuggggcgugcaccaccccggcaccgacaaggaccagaccaaccuguacgugcaggccagcggcagagugaucgugagcaccaagagaagccagcagaccgugauccccaacaucggcagcagacccugggugagaggcgugagcagcaucaucagcaucuacuggaccaucgugaagcccggcgacauccugcugaucaacagcaccggcaaccugaucgcccccagaggcuacuucaagauccagagcggcaagagcagcaucaugagaagcgacgcccacaucgacgagugcaacagcgagugcaucacccccaacggcagcauccccaacgacaagcccuuccagaacgugaacaagaucaccuacggcgccugccccagauacgugaagcagaacacccugaagcuggccaccggcaugagaaacgugcccgagaagcagaccagaggcaucuucggcgccaucgccggcuucaucgagaacggcugggagggcaugguggacggcugguacggcuucagacaccagaacagcgagggcaccggccaggccgccgaccugaagagcacccaggccgccaucaaccagaucaccggcaagcugaacagagugaucaagaagaccaacgagaaguuccaccagaucgagaaggaguucagcgagguggagggcagaauccaggaccuggagaaguacguggaggacaccaagaucgaccuguggagcuacaacgccgagcugcugguggcccuggagaaccagcacaccaucgaccugaccgacagcgagaugagcaagcuguucgagagaaccagaagacagcugagagagaacgccgaggacaugggcaacggcugcuucaagaucuaccacaagugcgacaacgccugcaucggcagcaucagaaacggcaccuacgaccacgacaucuacagaaacgaggcccugaacaacagauuccagaucaagggcgugcagcugaagagcggcuacaaggacuggauccuguggaucagcuucgccaucagcugcuuccugcugugcguggugcugcugggcuucaucaugugggccugccagaagggcaacaucagaugcaacaucugcaucuga

SEQ ID NO: 173997 - RNA, 1701 nt, Artificial Sequence
  derived and/or modified CDS sequence (opt4) from hemagglutinin__InfluenzaA__EPI293965
augaagaccaucaucgccuucagcugcauccugugccugaucuucgcccagaagcugcccggcagcgacaacagcauggccacccugugccugggccaccacgccgugcccaacggcacccuggugaagaccaucaccgacgaccagaucgaggugaccaacgccaccgagcuggugcagagcagcagcaccggcagaaucugcaacagcccccaccagauccuggacggcaagaacugcacccugaucgacgcccugcugggcgacccccacugcgacgacuuccagaacaaggagugggaccuguucguggagagaagcaccgccuacagcaacugcuaccccuacuacgugcccgacuacgccacccugagaagccugguggccagcagcggcaaccuggaguucacccaggagagcuucaacuggaccggcguggcccaggacggcagcagcuacgccugcagaagaggcagcgugaacagcuucuucagcagacugaacuggcuguacaaccugaacuacaaguaccccgagcagaacgugaccaugcccaacaacgacaaguucgacaagcuguacaucuggggcgugcaccaccccggcaccgacaaggaccagaccaaccuguacgugcaggccagcggcagagugaucgugagcaccaagagaagccagcagaccgugauccccaacaucggcagcagacccugggugagaggcgugagcagcaucaucagcaucuacuggaccaucgugaagcccggcgacauccugcugaucaacagcaccggcaaccugaucgcccccagaggcuacuucaagauccagagcggcaagagcagcaucaugagaagcgacgcccacaucgacgagugcaacagcgagugcaucacccccaacggcagcauccccaacgacaagcccuuccagaacgugaacaagaucaccuacggcgccugccccagauacgugaagcagaacacccugaagcuggccaccggcaugagaaacgugcccgagaagcagaccagaggcaucuucggcgccaucgccggcuucaucgagaacggcugggagggcaugguggacggcugguacggcuucagacaccagaacagcgagggcaccggccaggccgccgaccugaagagcacccaggccgccaucaaccagaucaccggcaagcugaacagagugaucaagaagaccaacgagaaguuccaccagaucgagaaggaguucagcgagguggagggcagaauccaggaccuggagaaguacguggaggacaccaagaucgaccuguggagcuacaacgccgagcugcugguggcccuggagaaccagcacaccaucgaccugaccgacagcgagaugagcaagcuguucgagagaaccagaagacagcugagagagaacgccgaggacaugggcaacggcugcuucaagaucuaccacaagugcgacaacgccugcaucggcagcaucagaaacggcaccuacgaccacgacaucuacagaaacgaggcccugaacaacagauuccagaucaagggcgugcagcugaagagcggcuacaaggacuggauccuguggaucagcuucgccaucagcugcuuccugcugugcguggugcugcugggcuucaucaugugggccugccagaagggcaacaucagaugcaacaucugcaucuga

SEQ ID NO: 173998 - RNA, 1701 nt, Artificial Sequence
  derived and/or modified CDS sequence (opt4) from hemagglutinin__InfluenzaA__EPI465400
augaagaccaucaucgccuucagcugcauccugugccugaucuucgcccagaagcugcccggcagcgacaacagcauggccacccugugccugggccaccacgccgugcccaacggcacccuggugaagaccaucaccgacgaccagaucgaggugaccaacgccaccgagcuggugcagagcagcagcaccggcagaaucugcaacagcccccaccagauccuggacggcaagaacugcacccugaucgacgcccugcugggcgacccccacugcgacgacuuccagaacaaggagugggaccuguucguggagagaagcaccgccuacagcaacugcuaccccuacuacgugcccgacuacgccacccugagaagccugguggccagcagcggcaaccuggaguucacccaggagagcuucaacuggaccggcguggcccaggacggcagcagcuacgccugcagaagaggcagcgugaacagcuucuucagcagacugaacuggcuguacaaccugaacuacaaguaccccgagcagaacgugaccaugcccaacaacgacaaguucgacaagcuguacaucuggggcgugcaccaccccggcaccgacaaggaccagaccaagcuguacgugcaggccagcggcagagugaucgugagcaccaagagaagccagcagaccgugauccccaacaucggcagcagacccugggugagaggcgugagcagcaucaucagcaucuacuggaccaucgugaagcccggcgacauccugcugaucaacagcaccggcaaccugaucgcccccagaggcuacuucaagauccagagcggcaagagcagcaucaugagaagcgacgcccacaucgacgagugcaacagcgagugcaucacccccaacggcagcauccccaacgacaagcccuuccagaacgugaacaagaucaccuacggcgccugccccagauacgugaagcagaacacccugaagcuggccaccggcaugagaaacgugcccgagaagcagaccagaggcaucuucggcgccaucgccggcuucaucgagaacggcugggagggcaugguggacggcugguacggcuucagacaccagaacagcgagggcaccggccaggccgccgaccugaagagcacccaggccgccaucaaccagaucaccggcaagcugaacagagugaucaagaagaccaacgagaaguuccaccagaucgagaaggaguucagcgagguggagggcagaauccaggaccuggagaaguacguggaggacaccaagaucgaccuguggagcuacaacgccgagcugcugguggcccuggagaaccagcacaccaucgaccugaccgacagcgagaugagcaagcuguucgagagaaccagaagacagcugagagagaacgccgaggacaugggcaacggcugcuucaagaucuaccacaagugcgacaacgccugcaucggcagcaucagaaacggcaccuacgaccacgacaucuacagaaacgaggcccugaacaacagauuccagaucaagggcgugcagcugaagagcggcuacaaggacuggauccuguggaucagcuucgccaucagcugcuuccugcugugcguggugcugcugggcuucaucaugugggccugccagaagggcaacaucagaugcaacaucugcaucuga

SEQ ID NO: 173999 - RNA, 1701 nt, Artificial Sequence
  derived and/or modified CDS sequence (opt4) from hemagglutinin__InfluenzaA__EPI328898
augaagaccaucaucgccuucagcugcauccugugccugaucuucgcccagaagcugcccggcagcgacaacagcauggccacccugugccugggccaccacgccgugcccaacggcacccuggugaagaccaucaccgacgaccagaucgaggugaccaacgccaccgagcuggugcagagcagcagcaccggcagaaucugcaacagcccccaccagauccuggacggcaagaacugcacccugaucgacgcccugcugggcgacccccacugcgacgacuuccagaacaaggagugggaccuguucguggagagaagcaccgccuacagcaacugcuaccccuacuacgugcccgacuacgccacccugagaagccugguggccagcagcggcaaccuggaguucacccaggagagcuucaacuggaccggcguggcccaggacggcagcagcuacgccugcagaagaggcagcgugaacagcuucuucagcagacugaacuggcuguacaaccugaacuacaaguaccccgagcagaacgugaccaugcccaacaacgacaaguucgacaagcuguacaucuggggcgugcaccaccccggcaccgacaaggaccagaccaagaucuacgugcaggccagcggcagagugaucgugagcaccaagagaagccagcagaccgugauccccaacaucggcagcagacccugggugagaggcgugagcagcaucaucagcaucuacuggaccaucgugaagcccggcgacauccugcugaucaacagcaccggcaaccugaucgcccccagaggcuacuucaagauccagagcggcaagagcagcaucaugagaagcgacgcccacaucgacgagugcaacagcgagugcaucacccccaacggcagcauccccaacgacaagcccuuccagaacgugaacaagaucaccuacggcgccugccccagauacgugaagcagaacacccugaagcuggccaccggcaugagaaacgugcccgagaagcagaccagaggcaucuucggcgccaucgccggcuucaucgagaacggcugggagggcaugguggacggcugguacggcuucagacaccagaacagcgagggcaccggccaggccgccgaccugaagagcacccaggccgccaucaaccagaucaccggcaagcugaacagagugaucaagaagaccaacgagaaguuccaccagaucgagaaggaguucagcgagguggagggcagaauccaggaccuggagaaguacguggaggacaccaagaucgaccuguggagcuacaacgccgagcugcugguggcccuggagaaccagcacaccaucgaccugaccgacagcgagaugagcaagcuguucgagagaaccagaagacagcugagagagaacgccgaggacaugggcaacggcugcuucaagaucuaccacaagugcgacaacgccugcaucggcagcaucagaaacggcaccuacgaccacgacaucuacagaaacgaggcccugaacaacagauuccagaucaagggcgugcagcugaagagcggcuacaaggacuggauccuguggaucagcuucgccaucagcugcuuccugcugugcguggugcugcugggcuucaucaugugggccugccagaagggcaacaucagaugcaacaucugcaucuga

SEQ ID NO: 174000 - RNA, 1701 nt, Artificial Sequence; identical to SEQ ID NO: 173999
  derived and/or modified CDS sequence (opt4) from hemagglutinin__InfluenzaA__EPI328900

SEQ ID NO: 174001 - RNA, 1701 nt, Artificial Sequence
  derived and/or modified CDS sequence (opt4) from hemagglutinin__InfluenzaA__EPI574644
augaagaccaucaucgcccugagcuacauccugugccugguguucgcccagaagcugcccggcaacgacaacagcaccgccacccugugccugggccaccacgccgugcccaacggcaccaucgugaagaccaucaccaacgacagaaucgaggugaccaacgccaccgagcuggugcagaacagcagcaucggcgagaucugcgacagcccccaccagauccuggacggcaagaacugcacccugaucgacgcccugcugggcgacccccagugcgacggcuuccagaacaagagaugggaccuguucguggagagaagcaaggccuacagcaacugcuaccccuacgacgugcccgacuacgccagccugagaagccugguggccagcagcggcacccuggaguucaacgacgagagcuucaacugggccggcgugacccagaacggcaccagcagcgccugcaucagaggcagcaacagcagcuucuucagcagacugaacuggcugacccacagcaacuucaaguaccccgcccugaacgugaccaugcccaacaacgagcaguucgacaagcuguacaucuggggcgugcaccaccccggcaccgacaaggaccagaucuuccuguacgcccacagcagcggcagaaucaccgugagcaccaagagaagccagcaggccgugauccccaacaucggcagcagacccagaaucagaaacauccccagcagaaucagcaucuacuggaccaucgugaagcccggcgacauccugcugaucaacagcaccggcaaccugaucgcccccagaggcuacuucaagauccagagcggcaagagcagcaucaugagaagcgacgcccccaucggcaagugcaagagcgagugcaucacccccaacggcagcauccccaacgacaagcccuuccagaacgugaacagaaucaccuacggcgccugccccagauacgugaagcagagcacccugaagcuggccaccggcaugagaaacgugcccgagaagcagaccagaggcaucuucggcgccaucgccggcuucaucgagaacggcugggagggcaugaaggacggcugguacggcuucagacaccagaacagcgagggcagaggccaggccgccgaccugaagagcacccaggccgccaucgaccagaucaacggcaagcugaacagacugaucggcaagaccaacgagaaguuccaccagaucgagaaggaguucagcgagguggagggcagaauccaggaccuggagaaguacguggaggacaccaagaucgaccuguggagcuacaacgccgagcugcugguggcccuggagaaccagcacaccaucgaccugaccgacagcgagaugaacaagcuguucgagaagaccaagaagcagcugagagagaacgccgaggacaugggcaacggcugcuucaagaucuaccacaagugcgacaacgccugcaucggcagcaucagaaacggcaccuacgaccacgacguguacagagacgaggcccugaacaacagauuccagaucaagggcguggagcugaagagcggcuacaaggacuggauccuguggaucagcuucgccaucagcugcuuccugcugugcguggcccugcugggcuucaucaugugggccugccagaagggcaacaucagaugcaacaucugcaucuga

SEQ ID NO: 174002 - RNA, 1701 nt, Artificial Sequence
  derived and/or modified CDS sequence (opt4) from hemagglutinin__InfluenzaA__EPI563212
augaagaccaucaucgcccugagcuacauccugugccugguguucgcccagaagauccccggcaacgacaacaacaccgccacccugugccugggccaccacgccgugcccaacggcaccaucgugaagaccaucaccaacgacagaaucgaggugaccaacgccaccgagcuggugcagaacagcagcaucggcgagaucugcgacagcccccaccagauccuggacggcgagaacugcacccugaucgacgcccugcugggcgacccccagugcgacggcuuccagaacaagaagugggaccuguucguggagagaagcaaggccuacagcaacugcuaccccuacgacgugcccgacuacgccagccugagaagccugguggccagcagcggcacccuggaguucaacaacgagagcuucaacuggaccggcgugacccagaacggcaccagcagcgccugcaucagaagaagcagcagcagcuucuucagcagacugaacuggcugacccaccugaacuacaaguaccccgcccugaacgugaccaugcccaacaacgagcaguucgacaagcuguacaucuggggcgugcaccaccccggcaccgacaaggaccagaucuuccccuacgcccagagcagcggcagaaucaccgugagcaccaagagaagccagcaggccgugauccccaacaucggcagcagacccagaaucagaggcauccccagcagaaucagcaucuacuggaccaucgugaagcccggcgacauccugcugaucaacagcaccggcaaccugaucgcccccagaggcuacuucaagaucagaagcggcaagagcagcaucaugagaagcgacgcccccaucggcaagugcaagagcgagugcaucacccccaacggcagcauccccaacgacaagcccuuccagaacgugaacagaaucaccuacggcgccugccccagauacgugaagcacagcacccugaagcuggccaccggcaugagaaacgugcccgagaagcagaccagaggcaucuucggcgccaucgccggcuucaucgagaacggcugggagggcaugguggacggcugguacggcuucagacaccagaacagcgagggcagaggccaggccgccgaccugaagagcacccaggccgccaucgaccagaucaacggcaagcugaacagacugaucggcaagaccaacgagaaguuccaccagaucgagaaggaguucagcgagguggagggcagaauccaggaccuggagaaguacguggaggacaccaagaucgaccuguggagcuacaacgccgagcugcugguggcccuggagaaccagcacaccaucgaccugaccgacagcgagaugaacaagcuguucgagaagaccaagaagcagcugagagagaacgccgaggacaugggcaacggcugcuucaagaucuaccacaagugcgacaacgccugcaucggcagcaucagaaacggcaccuacgaccacaacguguacagagacgaggcccugaacaacagauuccagaucaagggcguggagcugaagagcggcuacaaggacuggauccuguggaucagcuucgccaucagcugcuuccugcugugcguggcccugcugggcuucaucaugugggccugccagaagggcaacaucagaugcaacaucugcaucuga

SEQ ID NO: 174003 - RNA, 1701 nt, Artificial Sequence; identical to SEQ ID NO: 174002
  derived and/or modified CDS sequence (opt4) from hemagglutinin__InfluenzaA__EPI553999

SEQ ID NO: 174004 - RNA, 1701 nt, Artificial Sequence
  derived and/or modified CDS sequence (opt4) from hemagglutinin__InfluenzaA__EPI551570
augaagaccaucaucgcccugagcuacauccugugccugguguucgcccagaagauccccggcaacgacaacaacaccgccacccugugccugggccaccacgccgugcccaacggcaccaucgugaagaccaucaccaacgacagaaucgaggugaccaacgccaccgagcuggugcagaacagcagcaucggcgagaucugcgacagcccccaccagauccuggacggcgagaacugcacccugaucgacgcccugcugggcgacccccagugcgacggcuuccagaacaagaagugggaccuguucguggagagaagcaaggccuacagcaacugcuaccccuacgacgugcccgacuacgccagccugagaagccugguggccagcagcggcacccuggaguucaacaacgagagcuucaacuggaccggcgugacccagaacggcaccagcagcgccugcaucagaagaagcagcagcagcuucuucagcagacugaacuggcugacccaccugaacuacaccuaccccgcccugaacgugaccaugcccaacaacgagcaguucgacaagcuguacaucuggggcgugcaccaccccggcaccgacaaggaccagaucuuccuguacgcccagagcagcggcagaaucaccgugagcaccaagagaagccagcaggccgugauccccaacaucggcagcagacccagaaucagagacauccccagcagaaucagcaucuacuggaccaucgugaagcccggcgacauccugcugaucaacagcaccggcaaccugaucgcccccagaggcuacuucaagaucagaagcggcaagagcagcaucaugagaagcgacgcccccaucggcaagugcaagagcgagugcaucacccccaacggcagcauccccaacgacaagcccuuccagaacgugaacagaaucaccuacggcgccugccccagauacgugaagcacagcacccugaagcuggccaccggcaugagaaacgugcccgagaagcagaccagaggcaucuucggcgccaucgccggcuucaucgagaacggcugggagggcaugguggacggcugguacggcuucagacaccagaacagcgagggcagaggccaggccgccgaccugaagagcacccaggccgccaucgaccagaucaacggcaagcugaacagacugaucggcaagaccaacgagaaguuccaccagaucgagaaggaguucagcgagguggagggcagaauccaggaccuggagaaguacguggaggacaccaagaucgaccuguggagcuacaacgccgagcugcugguggcccuggagaaccagcacaccaucgaccugaccgacagcgagaugaacaagcuguucgagaagaccaagaagcagcugagagagaacgccgaggacaugggcaacggcugcuucaagaucuaccacaagugcgacaacgccugcaucggcagcaucagaaacggcaccuacgaccacaacguguacagagacgaggcccugaacaacagauuccagaucaagggcguggagcugaagagcggcuacaaggacuggauccuguggaucagcuucgccaucagcugcuuccugcugugcguggcccugcugggcuucaucaugugggccugccagaagggcaacaucagaugcaacaucugcaucuga

SEQ ID NO: 174005 - RNA, 1701 nt, Artificial Sequence
  derived and/or modified CDS sequence (opt4) from hemagglutinin__InfluenzaA__EPI629738
augaagaccaucaucgcccugagcuacauccugugccugguguucgcccagaagauccccggcaacgacaacaacaccgccacccugugccugggccaccacgccgugcccaacggcaccaucgugaagaccaucaccaacgacagaaucgaggugaccaacgccaccgagcuggugcagaacagcagcaucggcgagaucugcgacagcccccaccagauccuggacggcgagaacugcacccugaucgacgcccugcugggcgacccccagugcgacggcuuccagaacaagaagugggaccuguucguggagagaagcaaggccuacagcaacugcuaccccuacgacgugcccgacuacgccagccugagaagccugguggccagcagcggcacccuggaguucaacaacgagagcuucaacuggaccggcgugacccagaacggcaccagcagcgccugcaucagaagaagcagcagcagcuucuucagcagacugaacuggcugacccaccugaacuacaaguaccccgcccugaacgugaccaugcccaacaacgagcaguucgacaagcuguacaucuggggcgugcaccaccccggcaccgacaaggaccagaucuuccccuacgcccagagcagcggcagaaucaucgugagcaccaagagaagccagcaggccgugauccccaacaucggcagcagacccagaaucagagacauccccagcagaaucagcaucuacuggaccaucgugaagcccggcgacauccugcugaucaacagcaccggcaaccugaucgcccccagaggcuacuucaagaucagaagcggcaagagcagcaucaugagaagcgacgcccccaucggcaagugcaagagcgagugcaucacccccaacggcagcauccccaacgacaagcccuuccagaacgugaacagaaucaccuacggcgccugccccagauacgugaagcacagcacccugaagcuggccaccggcaugagaaacgugcccgagaagcagaccagaggcaucuucggcgccaucgccggcuucaucgagaacggcugggagggcaugguggacggcugguacggcuucagacaccagaacagcgagggcagaggccaggccgccgaccugaagagcacccaggccgccaucgaccagaucaacggcaagcugaacagacugaucggcaagaccaacgagaaguuccaccagaucgagaaggaguucagcgagguggagggcagaauccaggaccuggagaaguacguggaggacaccaagaucgaccuguggagcuacaacgccgagcugcugguggcccuggagaaccagcacaccaucgaccugaccgacagcgagaugaacaagcuguucgagaagaccaagaagcagcugagagagaacgccgaggacaugggcaacggcugcuucaagaucuaccacaagugcgacaacgccugcaucggcagcaucagaaacggcaccuacgaccacaacguguacagagacgaggcccugaacaacagauuccagaucaagggcguggagcugaagagcggcuacaaggacuggauccuguggaucagcuucgccaucagcugcuuccugcugugcguggcccugcugggcuucaucaugugggccugccagaagggcaacaucagaugcaacaucugcaucuga

SEQ ID NO: 174006 - RNA, 1701 nt, Artificial Sequence
  derived and/or modified CDS sequence (opt4) from hemagglutinin__InfluenzaA__EPI631887
augaagaccaucaucgcccugagcuacauccugugccugguguucgcccagaagauccccggcaacgacaacaacaccgccacccugugccugggccaccacgccgugcccaacggcaccaucgugaagaccaucaccaacgacagaaucgaggugaccaacgccaccgagcuggugcagaacagcagcaucggcgagaucugcgacagcccccaccagauccuggacggcgagaacugcacccugaucgacgcccugcugggcgacccccagugcgacggcuuccagaacaagaagugggaccuguucguggagagaagcaaggccuacagcaacugcuaccccuacgacgugcccgacuacgccagccugagaagccugguggccagcagcggcacccuggaguucaacaacgagagcuucaacuggaccggcgugacccagaacggcaccagcagcgccugcaucagaagaagcagcagcagcuucuucagcagacugaacuggcugacccaccugaacuacaaguaccccgcccugaacgugaccaugcccaacaacgagcaguucgacaagcuguacaucuggggcgugcaccaccccggcaccgacaaggaccagaucuuccccuacgcccagagcagcggcagaaucaucgugagcaccaagagaagccagcaggccgugauccccaacaucggcagcagacccagaaucagagacagccccagcagaaucagcaucuacuggaccaucgugaagcccggcgacauccugcugaucaacagcaccggcaaccugaucgcccccagaggcuacuucaagaucagaagcggcaagagcagcaucaugagaagcgacgcccccaucggcaagugcaagagcgagugcaucacccccaacggcagcauccccaacgacaagcccuuccagaacgugaacagaaucaccuacggcgccugccccagauacgugaagcacagcacccugaagcuggccaccggcaugagaaacgugcccgagaagcagaccagaggcaucuucggcgccaucgccggcuucaucgagaacggcugggagggcaugguggacggcugguacggcuucagacaccagaacagcgagggcagaggccaggccgccgaccugaagagcacccaggccgccaucgaccagaucaacggcaagcugaacagacugaucggcaagaccaacgagaaguuccaccagaucgagaaggaguucagcgagguggagggcagaauccaggaccuggagaaguacguggaggacaccaagaucgaccuguggagcuacaacgccgagcugcugguggcccuggagaaccagcacaccaucgaccugaccgacagcgagaugaacaagcuguucgagaagaccaagaagcagcugagagagaacgccgaggacaugggcaacggcugcuucaagaucuaccacaagugcgacaacgccugcaucggcagcaucagaaacggcaccuacgaccacaacguguacagagacgaggcccugaacaacagauuccagaucaagggcguggagcugaagagcggcuacaaggacuggauccuguggaucagcuucgccaucagcugcuuccugcugugcguggcccugcugggcuucaucaugugggccugccagaagggcaacaucagaugcaacaucugcaucuga

SEQ ID NO: 174007 - RNA, 1701 nt, Artificial Sequence
  derived and/or modified CDS sequence (opt4) from hemagglutinin__InfluenzaA__EPI577026
augaagaccaucaucgcccugagcuacauccugugccugguguucgcccagaagauccccggcaacgacaacaacaccgccacccugugccugggccaccacgccgugcccaacggcaccaucgugaagaccaucaccaacgacagaaucgaggugaccaacgccaccgagcuggugcagaacagcagcaucggcgagaucugcgacagcccccaccagauccuggacggcgagaacugcacccugaucgacgcccugcugggcgacccccagugcgacggcuuccagaacaagaagugggaccuguucguggagagaagcaaggccuacagcaacugcuaccccuacgacgugcccgacuacgccagccugagaagccugguggccagcagcggcacccuggaguucaacaacgagagcuucaacuggaccggcgugacccagaacggcaccagcagcgccugcaucagaagaagcagcagcagcuucuucagcagacugaacuggcugacccaccugaacuacaaguaccccgcccugaacgugaccaugcccaacaacgagcaguucgacaagcuguacaucuggggcgugcaccaccccggcaccgacaaggaccagaucuuccccuacgcccagagcagcggcagaaucaccgugagcaccaagagaagccagcaggccgugauccccaacaucggcagcagacccagaaucagaggcauccccagcagaaucagcaucuacuggaccaucgugaagcccggcgacauccugcugaucaacagcaccggcaaccugaucgcccccagaggcuacuucaagaucagaagcggcaagagcagcaucaugagaagcgacgcccccaucggcaagugcaagagcgagugcaucacccccaacggcagcauccccaacgacaagcccuuccagaacgugaacagaaucaccuacggcgccugccccagauacgugaagcacagcacccugaagcuggccaccggcaugagaaacgugcccgagaagcagaccagaggcaucuucggcgccaucgccggcuucaucgagaacggcugggagggcaugguggacggcugguacggcuucagacaccagaacagcgagggcagaggccaggccgccgaccugaagagcacccaggccgccaucgaccagaucaacggcaagcugaacagacugaucggcaagaccaacgagaaguuccaccagaucgagaaggaguucagcgagguggagggcagaauccaggaccuggagaaguacguggaggacaccaagaucgaccuguggagcuacaacgccgagcugcugguggcccuggagaaccagcacaccaucgaccugaccgacagcgagaugaacaagcuguucgagaagaccaagaagcagcugagagagaacgccgaggacaugggcaacggcugcuucaagaucuaccacaagugcgacaacgccugcaucgagagcaucagaaacggcaccuacgaccacaacguguacagagacgaggcccugaacaacagauuccagaucaagggcguggagcugaagagcggcuacaaggacuggauccuguggaucagcuucgccaucagcugcuuccugcugugcguggcccugcugggcuucaucaugugggccugccagaagggcaacaucagaugcaacaucugcaucuga

SEQ ID NO: 174008 - RNA, 1701 nt, Artificial Sequence; identical to SEQ ID NO: 170054
  derived and/or modified CDS sequence (opt4) from hemagglutinin__InfluenzaA__EPI404927

SEQ ID NO: 174009 - RNA, 1701 nt, Artificial Sequence
  derived and/or modified CDS sequence (opt4) from hemagglutinin__InfluenzaA__EPI489319
augaagaccaucaucgcccugagcuacauccugugccugguguucgcccagaagcugcccggcaacgacaacagcaccgccacccugugccugggccaccacgccgugcccaacggcaccaucgugaagaccaucaccaacgacagaaucgaggugaccaacgccaccgagcuggugcagaacagcagcaucggcgagaucugcgacagcccccaccagauccuggacggcgagaacugcacccugaucgacgcccugcugggcgacccccagugcgacggcuuccagaacaagaagugggaccuguucguggagagaagcaaggccuacagcaacugcuaccccuacgacgugcccgacuacgccagccugagaagccugguggccagcagcggcacccuggaguucaacaacgagagcuucaacugggccggcgugacccagaacggcaccagcagcgccugcaagagaggcagcaacagcagcuucuucagcagacugaacuggcugacccaccugaacuucaaguaccccgcccugaacgugaccaugcccaacaacgagcaguucgacaagcuguacaucuggggcgugcaccaccccggcaccgacaaggaccagaucuuccccuacgcccagagcagcggcagaaucaccgugagcaccaagagaagccagcaggccgugauccccaacaucggcagcagacccagaaucagaaacauccccagcagaaucagcaucuacuggaccaucgugaagcccggcgacauccugcugaucaacagcaccggcaaccugaucgcccccagaggcuacuucaagaucagaagcggcaagagcagcaucaugagaagcgacgcccccaucggcaagugcaagagcgagugcaucacccccaacggcagcauccccaacgacaagcccuuccagaacgugaacagaaucaccuacggcgccugccccagauacgugaagcagagcacccugaagcuggccaccggcaugagaaacgugcccgagaagcagaccagaggcaucuucggcgccaucgccggcuucaucgagaacggcugggagggcaugguggacggcugguacggcuucagacaccagaacagcgagggcagaggccaggccgccgaccugaagagcacccaggccgccaucgaccagaucaacggcaagcugaacagacugaucggcaagaccaacgagaaguuccaccagaucgagaaggaguucagcgagguggagggcagaauccaggaccuggagaaguacguggaggacaccaagaucgaccuguggagcuacaacgccgagcugcugguggcccuggagaaccagcacaccaucgaccugaccgacagcgagaugaacaagcuguucgagaagaccaagaagcagcugagagagaacgccgaggacaugggcaacggcugcuucaagaucuaccacaagugcgacaacgccugcaucggcagcaucagaaacggcaccuacgaccacgacguguacagagacgaggcccugaacaacagauuccagaucaagggcguggagcugaagagcggcuacaaggacuggauccuguggaucagcuucgccaucagcugcuuccugcugugcguggcccugcugggcuucaucaugugggccugccagaagggcaacaucagaugcaacaucugcaucuga

SEQ ID NO: 174010 - RNA, 1701 nt, Artificial Sequence; identical to SEQ ID NO: 172487
  derived and/or modified CDS sequence (opt4) from hemagglutinin__InfluenzaA__EPI530647

SEQ ID NO: 174011 - RNA, 1701 nt, Artificial Sequence; identical to SEQ ID NO: 172501
  derived and/or modified CDS sequence (opt4) from hemagglutinin__InfluenzaA__EPI541083

SEQ ID NO: 174012 - RNA, 1701 nt, Artificial Sequence
  derived and/or modified CDS sequence (opt4) from hemagglutinin__InfluenzaA__EPI684315
augaagaccaucaucgcccugagcuacauccugugccugguguucgcccagaagauccccggcaacgacaacagcaccgccacccugugccugggccaccacgccgugcccaacggcaccaucgugaagaccaucaccaacgacagaaucgaggugaccaacgccaccgagcuggugcagaacagcagcaucggcgagaucugcgacagcccccaccagauccuggacggcgagaacugcacccugaucgacgcccugcugggcgacccccagugcgacggcuuccagaacaagaagugggaccuguucguggagagaagcaaggccuacagcaacugcuaccccuacgacgugcccgacuacgccagccugagaagccugguggccagcagcggcacccuggaguucaacaacgagagcuucaacuggaccggcgugacccagaacggcaccagcagcgccugcaucagaagaagcagcagcagcuucuucagcagacugaacuggcugacccaccugaacuacaaguaccccgcccugaacgugaccaugcccaacaacgagcaguucgacaagcuguacaucuggggcgugcaccaccccggcaccgacaaggaccagaucuuccccuacgcccagagcagcggcagaaucaucgugagcaccaagagaagccagcaggccgugauccccaacaucggcagcagacccagaaucagagacauccccagcagaaucagcaucuacuggaccaucgugaagcccggcgacauccugcugaucaacagcaccggcaaccugaucgcccccagaggcuacuucaagaucagaagcggcaagagcagcaucaugagaagcgacgcccccaucggcaagugcaagagcgagugcaucacccccaacggcagcauccccaacgacaagcccuuccagaacgugaacagaaucaccuacggcgccugccccagauacgugaagcacagcacccugaagcuggccaccggcaugagaaacgugcccgagaagcagaccagaggcaucuucggcgccaucgccggcuucaucgagaacggcugggagggcaugguggacggcugguacggcuucagacaccagaacagcgagggcagaggccaggccgccgaccugaagagcacccaggccgccaucgaccagaucaacggcaagcugaacagacugaucggcaagaccaacgagaaguuccaccagaucgagaaggaguucagcgagguggagggcagaauccaggaccuggagaaguacguggaggacaccaagaucgaccuguggagcuacaacgccgagcugcugguggcccuggagaaccagcacaccaucgaccugaccgacagcgagaugaacaagcuguucgagaagaccaagaagcagcugagagagaacgccgaggacaugggcaacggcugcuucaagaucuaccacaagugcgacaacgccugcaucggcagcaucagaaacggcaccuacgaccacaacguguacagagacgaggcccugaacaacagauuccagaucaagggcguggagcugaagagcggcuacaaggacuggauccuguggaucagcuucgccaucagcugcuuccugcugugcguggcccugcugggcuucaucaugugggccugccagaagggcaacaucagaugcaacaucugcaucuga

SEQ ID NO: 174013 - RNA, 1701 nt, Artificial Sequence
  derived and/or modified CDS sequence (opt4) from hemagglutinin__InfluenzaA__EPI614462
augaagaccaucaucgcccugagcuacauccugugccugguguucgcccagaagcugcccggcaacgacaacagcaccgccacccugugccugggccaccacgccgugcccaacggcaccaucgugaagaccaucaccaacgacagaaucgaggugaccaacgccaccgagcuggugcagaacagcagcaucggcgagaucugcgacagcccccaccagauccuggacggcgagaacugcacccugaucgacgcccugcugggcgacccccagugcgacggcuuccagaacaagaagugggaccuguucguggagagaagcaaggccuacagcaacugcuaccccuacgacgugcccgacuacgccagccugagaagccugguggccagcagcggcacccuggaguucaacaacgagagcuucaacugggccggcgugacccagaacggcaccagcagcagcugcaucagaggcagcaacagcagcuucuucagcagacugaacuggcugacccaccugaacagcaaguaccccgcccugaacgugaccaugcccaacaacgagcaguucgacaagcuguacaucuggggcgugcaccaccccggcaccgacaaggaccagaucuuccuguacgcccagagcagcggcagaaucaccgugagcaccagaagaagccagcaggccgugauccccaacaucggcagcagacccagaaucagagacauccccagcagaaucagcaucuacuggaccaucgugaagcccggcgacauccugcugaucaacagcaccggcaaccugaucgcccccagaggcuacuucaagaucagaagcggcaagagcagcaucaugagaagcgacgcccccaucggcaagugcaagagcgagugcaucacccccaacggcagcauccccaacgacaagcccuuccagaacgugaacagaaucaccuacggcgccugccccagauacgugaagcagagcacccugaagcuggccaccggcaugagaaacgugcccgagagacagaccagaggcaucuucggcgccaucgccggcuucaucgagaacggcugggagggcaugguggacggcugguacggcuucagacaccagaacagcgagggcagaggccaggccgccgaccugaagagcacccaggccgccaucgaccagaucaacggcaagcugaacagacugaucggcaagaccaacgagaaguuccaccagaucgagaaggaguucagcgagguggagggcagaauccaggaccuggagaaguacguggaggacaccaagaucgaccuguggagcuacaacgccgagcugcugguggcccuggagaaccagcacaccaucgaccugaccgacagcgagaugaacaagcuguucgagaagaccaagaagcagcugagagagaacgccgaggacaugggcaacggcugcuucaagaucuaccacaagugcgacaacgccugcaucggcagcaucagaaacggcaccuacgaccacgacguguacagagacgaggcccugaacaacagauuccagaucaagggcguggagcugaagagcggcuacaaggacuggauccuguggaucagcuucgccaucagcugcuuccugcugugcguggcccugcugggcuucaucaugugggccugccagaagggcaacaucagaugcaacaucugcaucuga

SEQ ID NO: 174014 - RNA, 1701 nt, Artificial Sequence
  derived and/or modified CDS sequence (opt4) from hemagglutinin__InfluenzaA__EPI541465
augaagaccaucaucgcccugagcuacauccugugccugguguucgcccagaagcugcccggcaacgacaacagcaccgccacccugugccugggccaccacgccgugcccaacggcaccaucgugaagaccaucaccaacgacagaaucgaggugaccaacgccaccgagcuggugcagaacagcagcaucggcgagaucugcgacagcccccaccagauccuggacggcgagaacugcacccugaucgacgcccugcugggcgacccccagugcgacggcuuccagaacaagaagugggaccuguucguggagagaagcaaggccuacagcaacugcuaccccuacgacgugcccgacuacgccagccugagaagccugguggccagcagcggcacccuggaguucaacaacgagagcuucaacugggccggcgugacccagaacggcaccagcagcagcugcaucagaggcagcaacaacagcuucuucagcagacugaacuggcugacccaccugaacagcaaguaccccgcccugaacgugaccaugcccaacaacgagcaguucgacaagcuguacaucuggggcgugcaccaccccggcaccgacaaggaccagaucuuccuguacgcccagagcagcggcagaaucaccgugagcaccagaagaagccagcaggccgugauccccaacaucggcagcagacccagaaucagaggcauccccagcagaaucagcaucuacuggaccaucgugaagcccggcgacauccugcugaucaacagcaccggcaaccugaucgcccccagaggcuacuucaagaucagaagcggcaagagcagcaucaugagaagcgacgcccccaucggcaagugcaagagcgagugcaucacccccaacggcagcauccccaacgacaagcccuuccagaacgugaacagaaucaccuacggcgccugccccagauacgugaagcagagcacccugaagcuggccaccggcaugagaaacgugcccgagagacagaccagaggcaucuucggcgccaucgccggcuucaucgagaacggcugggagggcaugguggacggcugguacggcuucagacaccagaacagcgagggcagaggccaggccgccgaccugaagagcacccaggccgccaucgaccagaucaacggcaagcugaacagacugaucggcaagaccaacgagaaguuccaccagaucgagaaggaguucagcgagguggagggcagaauccaggaccuggagaaguacguggaggacaccaagaucgaccuguggagcuacaacgccgagcugcugguggcccuggagaaccagcacaccaucgaccugaccgacagcgagaugaacaagcuguucgagaagaccaagaagcagcugagagagaacgccgaggacaugggcaacggcugcuucaagaucuaccacaagugcgacaacgccugcaucggcagcaucagaaacggcaccuacgaccacgacguguacagagacgaggcccugaacaacagauuccagaucaagggcguggagcugaagagcggcuacaaggacuggauccuguggaucagcuucgccaucagcugcuuccugcugugcguggcccugcugggcuucaucaugugggccugccagaagggcaacaucagaugcaacaucugcaucuga

SEQ ID NO: 174015 - RNA, 1701 nt, Artificial Sequence
  derived and/or modified CDS sequence (opt4) from hemagglutinin__InfluenzaA__EPI696967
augaagaccaucaucgcccugagcuacauccugugccugguguucgcccagaagcugcccggcaacgacaacagcaccgccacccugugccugggccaccacgccgugcccaacggcaccaucgugaagaccaucaccaacgacagaaucgaggugaccaacgccaccgagcuggugcagaacagcagcaucggcgagaucugcgacagcccccaccagauccuggacggcgagaacugcacccugaucgacgcccugcugggcgacccccagugcgacggcuuccagaacaagaagugggaccuguucguggagagaagcaaggccuacagcaacugcuaccccuacgacgugcccgacuacgccagccugagaagccugguggccagcagcggcacccuggaguucaacaacgagagcuucaacugggccggcgugacccagaacggcaccagcagcagcugcaucagaggcagcaacagcagcuucuucagcagacugaacuggcugaccagacugaacagcaaguaccccgcccugaacgugaccaugcccaacaacgagcaguucgacaagcuguacaucuggggcgugcaccaccccgagaccgacaaggaccagaucuuccuguacgcccagagcagcggcagaaucaccgugagcaccagaagaagccagcaggccgugauccccaacaucggcagcagacccagaaucagaggcauccccagcagaaucagcaucuacuggaccaucgugaagcccggcgacauccugcugaucaacagcaccggcaaccugaucgcccccagaggcuacuucaagaucagaagcggcaagagcagcaucaugagaagcgacgcccccaucggcaagugcaagagcgagugcaucacccccaacggcagcauccccaacgacaagcccuuccagaacgugaacagaaucaccuacggcgccugccccagauacgugaagcagagcacccugaagcuggccaccggcaugagaaacgugcccgagagacagaccagaggcaucuucggcgccaucgccggcuucaucgagaacggcugggagggcaugguggacggcugguacggcuucagacaccagaacagcgagggcagaggccaggccgccgaccugaagagcacccaggccgccaucgaccagaucaacggcaagcugaacagacugaucggcaagaccaacgagaaguuccaccagaucgagaaggaguucagcgagguggagggcagaauccaggaccuggagaaguacguggaggacaccaagaucgaccuguggagcuacaacgccgagcugcugguggcccuggagaaccagcacaccaucgaccugaccgacagcgagaugaacaagcuguucgagaagaccaagaagcagcugagagagaacgccgaggacaugggcaacggcugcuucaagaucuaccacaagugcgacaacgccugcaucggcagcaucagaaacggcaccuacgaccacgacguguacagagacgaggcccugaacaacagauuccagaucaagggcguggagcugaagagcggcuacaaggacuggauccuguggaucagcuucgccaucagcugcuuccugcugugcguggcccugcugggcuucaucaugugggccugccagaagggcaacaucagaugcaacaucugcaucuga

SEQ ID NO: 174016 - RNA, 1701 nt, Artificial Sequence
  derived and/or modified CDS sequence (opt4) from hemagglutinin__InfluenzaA__EPI674597
augaagaccaucaucgcccugagcuacauccugugccugguguucgcccagaagcugcccggcaacgacaacagcaccgccacccugugccugggccaccacgccgugcccaacggcaccaucgugaagaccaucaccaacgacagaaucgaggugaccaacgccaccgagcuggugcagaacagcagcaucggcgagaucugcgacagcccccaccagauccuggacggcgagaacugcacccugaucgacgcccugcugggcgacccccagugcgacggcuuccagaacaagaagugggaccuguucguggagagaagcaaggccuacagcaacugcuaccccuacgacgugcccgacuacgccagccugagaagccugguggccagcagcggcacccuggaguucaacaacgagagcuucaacugggccggcgugacccagaacggcaccagcagcagcugcaucagaggcagcaacaacagcuucuucagcagacugaacuggcugacccaccugaacagcaaguaccccgcccugaacgugaccaugcccaacaacgagcaguucgacaagcuguacaucuggggcgugcaccaccccgugaccgacaaggaccagaucuuccuguacgcccagagcagcggcagaaucaccgugagcaccagaagaagccagcaggccgugauccccaacaucggcagcagacccagaaucagaggcauccccagcagaaucagcaucuacuggaccaucgugaagcccggcgacauccugcugaucaacagcaccggcaaccugaucgcccccagaggcuacuucaagaucagaagcggcaagagcagcaucaugagaagcgacgcccccaucggcaagugcaagagcgagugcaucacccccaacggcagcauccccaacgacaagcccuuccagaacgugaacagaaucaccuacggcgccugccccagauacgugaagcagagcacccugaagcuggccaccggcaugagaaacgugcccgagagacagaccagaggcaucuucggcgccaucgccggcuucaucgagaacggcugggagggcaugguggacggcugguacggcuucagacaccagaacagcgagggcagaggccaggccgccgaccugaagagcacccaggccgccaucgaccagaucaacggcaagcugaacagacugaucggcaagaccaacgagaaguuccaccagaucgagaaggaguucagcgagguggagggcagaauccaggaccuggagaaguacguggaggacaccaagaucgaccuguggagcuacaacgccgagcugcugguggcccuggagaaccagcacaccaucgaccugaccgacagcgagaugaacaagcuguucgagaagaccaagaagcagcugagagagaacgccgaggacaugggcaacggcugcuucaagaucuaccacaagugcgacaacgccugcaucggcagcaucagaaacggcaccuacgaccacgacguguacagagacgaggcccugaacaacagauuccagaucaagggcguggagcugaagagcggcuacaaggacuggauccuguggaucagcuucgccaucagcugcuuccugcugugcguggcccugcugggcuucaucaugugggccugccagaagggcaacaucagaugcaacaucugcaucuga

SEQ ID NO: 174017 - RNA, 1701 nt, Artificial Sequence
  derived and/or modified CDS sequence (opt4) from hemagglutinin__InfluenzaA__EPI530677
augaagaccaucaucgcccugagcuacauccugugccugguguucgcccagaagcugcccggcaacgacaacagcaccgccacccugugccugggccaccacgccgugcccaacggcaccaucgugaagaccaucaccaacgacagaaucgaggugaccaacgccaccgagcuggugcagaacagcagcaucggcgagaucugcgacagcccccaccagauccuggacggcgagaacugcacccugaucgacgcccugcugggcgacccccagugcgacggcuuccagaacaagaagugggaccuguucguggagagaagcaaggccuacagcaacugcuaccccuacgacgugcccgacuacgccagccugagaagccugguggccagcagcggcacccuggaguucaacaacgagagcuucaacugggccggcgugacccagaacggcaccagcagcagcugcaucagaggcagcaacagcagcuucuucagcagacugaacuggcugacccaccugaacagcaaguaccccgcccugaacgugaccaugcccaacaacgagcaguucgacaagcuguacaucuggggcgugcaccaccccggcaccgacaaggaccagaucuuccuguacgcccagagcagcggcagaaucaccgugagcaccaagagaagccagcaggccgugauccccaacaucggcagcagacccagaaucagagacauccccagcagaaucagcaucuacuggaccaucgugaagcccggcgacauccugcugaucaacagcaccggcaaccugaucgcccccagaggcuacuucaagaucagaagcggcaagagcagcaucaugagaagcgacgcccccaucggcaagugcaagagcgagugcaucacccccaacggcagcauccccaacgacaagcccuuccagaacgugaacagaaucaccuacggcgccugccccagauacgugaagcagagcacccugaagcuggccaccggcaugagaaacgugcccgagaagcagaccagaggcaucuucggcgccaucgccggcuucaucgagaacggcugggagggcaugguggacggcugguacggcuucagacaccagaacagcgagggcagaggccaggccgccgaccugaagagcacccaggccgccaucgaccagaucaacggcaagcugaacagacugaucggcaagaccaacgagaaguuccaccagaucgagaaggaguucagcgagguggagggcagaauccaggaccuggagaaguacguggaggacaccaagaucgaccuguggagcuacaacgccgagcugcugguggcccuggagaaccagcacaccaucgaccugaccgacagcgagaugaacaagcuguucgagaagaccaagaagcagcugagagagaacgccgaggacaugggcaacggcugcuucaagaucuaccacaagugcgacaacgccugcaucggcagcaucagaaacggcaccuacgaccacgacguguacagagacgaggcccugaacaacagauuccagaucaagggcguggagcugaagagcggcuacaaggacuggauccuguggaucagcuucgccaucagcugcuuccugcugugcguggcccugcugggcuucaucaugugggccugccagaagggcaacaucagaugcaacaucugcaucuga

SEQ ID NO: 174018 - RNA, 1701 nt, Artificial Sequence
  derived and/or modified CDS sequence (opt4) from hemagglutinin__InfluenzaA__EPI530679
augaagaccaucaucgcccugagcuacauccugugccugguguucgcccagaagcugcccggcaacgacaacagcaccgccacccugugccugggccaccacgccgugcccaacggcaccaucgugaagaccaucaccaacgacagaaucgaggugaccaacgccaccgagcuggugcagaacagcagcaucggcgagaucugcgacagcccccaccagauccuggacggcgagaacugcacccugaucgacgcccugcugggcgacccccagugcgacggcuuccagaacaagaagugggaccuguucguggagagaagcaaggccuacagcaacugcuaccccuacgacgugcccgacuacgccagccugagaagccugguggccagcagcggcacccuggaguucaacaacgagagcuucaacugggccggcgugacccagaacggcaccagcagcagcugcaucagaggcagcaacagcagcuucuucagcagacugaacuggcugacccaccugaacuucaaguaccccgcccugaacgugaccaugcccaacaacgagcaguucgacaagcuguacaucuggggcgugcaccaccccggcaccgacaaggaccagaucuuccuguacgcccagagcagcggcagaaucaccgugagcaccaagagaagccagcaggccgugauccccaacaucggcagcagacccagaaucagagacauccccagcagaaucagcaucuacuggaccaucgugaagcccggcgacauccugcugaucaacagcaccggcaaccugaucgcccccagaggcuacuucaagaucagaagcggcaagagcagcaucaugagaagcgacgcccccaucggcaagugcaagagcgagugcaucacccccaacggcagcauccccaacgacaagcccuuccagaacgugaacagaaucaccuacggcgccugccccagauacgugaagcagagcacccugaagcuggccaccggcaugagaaacgugcccgagaagcagaccagaggcaucuucggcgccaucgccggcuucaucgagaacggcugggagggcaugguggacggcugguacggcuucagacaccagaacagcgagggcagaggccaggccgccgaccugaagagcacccaggccgccaucgaccagaucaacggcaagcugaacagacugaucggcaagaccaacgagaaguuccaccagaucgagaaggaguucagcgagguggagggcagaauccaggaccuggagaaguacguggaggacaccaagaucgaccuguggagcuacaacgccgagcugcugguggcccuggagaaccagcacaccaucgaccugaccgacagcgagaugaacaagcuguucgagaagaccaagaagcagcugagagagaacgccgaggacaugggcaacggcugcuucaagaucuaccacaagugcgacaacgccugcaucggcagcaucagaaacggcaccuacgaccacgacguguacagagacgaggcccugaacaacagauuccagaucaagggcguggagcugaagagcggcuacaaggacuggauccuguggaucagcuucgccaucagcugcuuccugcugugcguggcccugcugggcuucaucaugugggccugccagaagggcaacaucagaugcaacaucugcaucuga

SEQ ID NO: 174019 - RNA, 1701 nt, Artificial Sequence; identical to SEQ ID NO: 160082
  derived and/or modified CDS sequence (opt4) from hemagglutinin__InfluenzaA__AAG01785

SEQ ID NO: 174020 - RNA, 1701 nt, Artificial Sequence; identical to SEQ ID NO: 172487
  derived and/or modified CDS sequence (opt4) from hemagglutinin__InfluenzaA__EPI814528

SEQ ID NO: 174021 - RNA, 1701 nt, Artificial Sequence
  derived and/or modified CDS sequence (opt4) from hemagglutinin__InfluenzaA__EPI674736
augaagaccaucaucgcccugagcuacauccugugccugguguucgcccagaagcugcccggcaacgacaacagcaccgccacccugugccugggccaccacgccgugcccaacggcaccaucgugaagaccaucaccaacgacagaaucgaggugaccaacgccaccgagcuggugcagaacagcagcaucggcgagaucugcgacagcccccaccagauccuggacggcgagaacugcacccugaucgacgcccugcugggcgacccccagugcgacggcuuccagaacaagaagugggaccuguucguggagagaagcaaggccuacagcaacugcuaccccuacgacgugcccgacuacgccagccugagaagccugguggccagcagcggcacccuggaguucaacaacgagagcuucaacugggccggcgugacccagaacggcaccagcagcagcugcagaagaggcagcaacagcagcuucuucagcagacugaacuggcugacccaccugaacagcaaguaccccgcccugaacgugaccaugcccaacaacgagcaguucgacaagcuguacaucuggggcgugcaccaccccgugaccgacaaggaccagaucuuccuguacgcccagagcagcggcagaaucaccgugagcaccaagagaagccagcaggccgugauccccaacaucggcagcagacccagaaucagagacauccccagcagaaucagcaucuacuggaccaucgugaagcccggcgacauccugcugaucaacagcaccggcaaccugaucgcccccagaggcuacuucaagaucagaagcggcaagagcagcaucaugagaagcgacgcccccaucggcaagugcaagagcgagugcaucacccccaacggcagcauccccaacgacaagcccuuccagaacgugaacagaaucaccuacggcgccugccccagauacgugaagcagagcacccugaagcuggccaccggcaugagaaacgugcccgagagacagaccagaggcaucuucggcgccaucgccggcuucaucgagaacggcugggagggcaugguggacggcugguacggcuucagacaccagaacagcgagggcagaggccaggccgccgaccugaagagcacccaggccgccaucgaccagaucaacggcaagcugaacagacugaucggcaagaccaacgagaaguuccaccagaucgagaaggaguucagcgagguggagggcagaauccaggaccuggagaaguacguggaggacaccaagaucgaccuguggagcuacaacgccgagcugcugguggcccuggagaaccagcacaccaucgaccugaccgacagcgagaugaacaagcuguucgagaagaccaagaagcagcugagagagaacgccgaggacaugggcaacggcugcuucaagaucuaccacaagugcgacaacgccugcaucggcagcaucagaaacggcaccuacgaccacgacguguacagagacgaggcccugaacaacagauuccagaucaagggcguggagcugaagagcggcuacaaggacuggauccuguggaucagcuucgccaucagcugcuuccugcugugcguggcccugcugggcuucaucaugugggccugccagaagggcaacaucagaugcaacaucugcaucuga

SEQ ID NO: 174022 - RNA, 1701 nt, Artificial Sequence; identical to SEQ ID NO: 172487
  derived and/or modified CDS sequence (opt4) from hemagglutinin__InfluenzaA__EPI614444

SEQ ID NO: 174023 - RNA, 1701 nt, Artificial Sequence
  derived and/or modified CDS sequence (opt4) from hemagglutinin__InfluenzaA__EPI551814
augaagaccaucaucgcccugagcuacauccugugccugguguucgcccagaagcugcccggcaacgacaacagcaccgccacccugugccugggccaccacgccgugcccaacggcaccaucgugaagaccaucaccaacgacagaaucgaggugaccaacgccaccgagcuggugcagaacagcagcaucggcgagaucugcgacagcccccaccagauccuggacggcgagaacugcacccugaucgacgcccugcugggcgacccccagugcgacggcuuccagaacaagaagugggaccuguucguggagagaagcaaggccuacagcaacugcuaccccuacgacgugcccgacuacgccagccugagaagccugguggccagcagcggcacccuggaguucaacaacgagagcuucaacugggccggcgugacccagaacggcaccagcagcagcugcagaagaggcagcaacagcagcuucuucagcagacugaacuggcugaccagacugaacagcaaguaccccgcccugaacgugaccaugcccaacaacgagcaguucgacaagcuguacaucuggggcgugcaccaccccgugaccgacaaggaccagaucuuccuguacgcccagagcagcggcagaaucaccgugagcaccaagagaagccagcaggccgugauccccaacaucggcagcagacccagaaucagagacauccccagcagaaucagcaucuacuggaccaucgugaagcccggcgacauccugcugaucaacagcaccggcaaccugaucgcccccagaggcuacuucaagaucagaagcggcaagagcagcaucaugagaagcgacgcccccaucggcaagugcaagagcgagugcaucacccccaacggcagcauccccaacgacaagcccuuccagaacgugaacagaaucaccuacggcgccugccccagauacgugaagcagagcacccugaagcuggccaccggcaugagaaacgugcccgagagacagaccagaggcaucuucggcgccaucgccggcuucaucgagaacggcugggagggcaugguggacggcugguacggcuucagacaccagaacagcgagggcagaggccaggccgccgaccugaagagcacccaggccgccaucgaccagaucaacggcaagcugaacagacugaucggcaagaccaacgagaaguuccaccagaucgagaaggaguucagcgagguggagggcagaauccaggaccuggagaaguacguggaggacaccaagaucgaccuguggagcuacaacgccgagcugcugguggcccuggagaaccagcacaccaucgaccugaccgacagcgagaugaacaagcuguucgagaagaccaagaagcagcugagagagaacgccgaggacaugggcaacggcugcuucaagaucuaccacaagugcgacaacgccugcaucggcagcaucagaaacggcaccuacgaccacgacguguacagagacgaggcccugaacaacagauuccagaucaagggcguggagcugaagagcggcuacaaggacuggauccuguggaucagcuucgccaucagcugcuuccugcugugcguggcccugcugggcuucaucaugugggccugccagaagggcaacaucagaugcaacaucugcaucuga

SEQ ID NO: 174024 - RNA, 1701 nt, Artificial Sequence
  derived and/or modified CDS sequence (opt4) from hemagglutinin__InfluenzaA__EPI696955
augaagaccaucaucgcccugagcuacauccugugccugguguucgcccagaagcugcccggcaacgacaacagcaccgccacccugugccugggccaccacgccgugcccaacggcaccaucgugaagaccaucaccaacgacagaaucgaggugaccaacgccaccgagcuggugcagaacagcagcaucggcgagaucugcgacagcccccaccagauccuggacggcgagaacugcacccugaucgacgcccugcugggcgacccccagugcgacggcuuccagaacaagaagugggaccuguucguggagagaagcaaggccuacagcaacugcuaccccuacgacgugcccgacuacgccagccugagaagccugguggccagcagcggcacccuggaguucaacaacgagagcuucaacugggccggcgugacccagaacggcaccagcagcagcugcagaagaggcagcaacagcagcuucuucagcagacugaacuggcugacccaccugaacagcaaguaccccgcccugaacgugaccaugcccaacaacgagcaguucgacaagcuguacaucuggggcgugcaccaccccgugaccgacaaggaccagaucuuccuguacgcccagagcagcggcagaaucaccgugagcaccaagagaagccagcaggccgugauccccaacaucggcuacagacccagaaucagagacauccccagcagaaucagcaucuacuggaccaucgugaagcccggcgacauccugcugaucaacagcaccggcaaccugaucgcccccagaggcuacuucaagaucagaagcggcaagagcagcaucaugagaagcgacgcccccaucggcaagugcaagagcgagugcaucacccccaacggcagcauccccaacgacaagcccuuccagaacgugaacagaaucaccuacggcgccugccccagauacgugaagcagagcacccugaagcuggccaccggcaugagaaacgugcccgagagacagaccagaggcaucuucggcgccaucgccggcuucaucgagaacggcugggagggcaugguggacggcugguacggcuucagacaccagaacagcgagggcagaggccaggccgccgaccugaagagcacccaggccgccaucgaccagaucaacggcaagcugaacagacugaucggcaagaccaacgagaaguuccaccagaucgagaaggaguucagcgagguggagggcagaauccaggaccuggagaaguacguggaggacaccaagaucgaccuguggagcuacaacgccgagcugcugguggcccuggagaaccagcacaccaucgaccugaccgacagcgagaugaacaagcuguucgagaagaccaagaagcagcugagagagaacgccgaggacaugggcaacggcugcuucaagaucuaccacaagugcgacaacgccugcaucggcagcaucagaaacggcaccuacgaccacgacguguacagagacgaggcccugaacaacagauuccagaucaagggcguggagcugaagagcggcuacaaggacuggauccuguggaucagcuucgccaucagcugcuuccugcugugcguggcccugcugggcuucaucaugugggccugccagaagggcaacaucagaugcaacaucugcaucuga

SEQ ID NO: 174025 - RNA, 1701 nt, Artificial Sequence
  derived and/or modified CDS sequence (opt4) from hemagglutinin__InfluenzaA__EPI740790
augaagaccaucaucgcccugagcuacauccugugccugguguucgcccagaagcugcccggcaacgacaacagcaccgccacccugugccugggccaccacgccgugcccaacggcaccaucgugaagaccaucaccaacgacagaaucgaggugaccaacgccaccgagcuggugcagaacagcagcaucggcgagaucugcgacagcccccaccagauccuggacggcgagaacugcacccugaucgacgcccugcugggcgacccccagugcgacggcuuccagaacaagaagugggaccuguucguggagagaagcaaggccuacagcaacugcuaccccuacgacgugcccgacuacgccagccugagaagccugguggccagcagcggcacccuggaguucaacaacgagagcuucaacugggccggcgugacccagaacggcaccagcagcagcugcagaagaggcagcaacagcagcuucuucagcagacugaacuggcugacccaccugaacagcaaguaccccgcccugaacgugaccaugcccaacaacgagcaguucgacaagcuguacaucuggggcgugcaccaccccgugaccgacaaggaccagaucuuccuguacgcccagagcagcggcagaaucaccgugagcaccaagagaagccagcaggccgugauccccaacaucggcuucagacccagaaucagagacauccccagcagaaucagcaucuacuggaccaucgugaagcccggcgacauccugcugaucaacagcaccggcaaccugaucgcccccagaggcuacuucaagaucagaagcggcaagagcagcaucaugagaagcgacgcccccaucggcaagugcaagagcgagugcaucacccccaacggcagcauccccaacgacaagcccuuccagaacgugaacagaaucaccuacggcgccugccccagauacgugaagcagagcacccugaagcuggccaccggcaugagaaacgugcccgagagacagaccagaggcaucuucggcgccaucgccggcuucaucgagaacggcugggagggcaugguggacggcugguacggcuucagacaccagaacagcgagggcagaggccaggccgccgaccugaagagcacccaggccgccaucgaccagaucaacggcaagcugaacagacugaucggcaagaccaacgagaaguuccaccagaucgagaaggaguucagcgagguggagggcagaauccaggaccuggagaaguacguggaggacaccaagaucgaccuguggagcuacaacgccgagcugcugguggcccuggagaaccagcacaccaucgaccugaccgacagcgagaugaacaagcuguucgagaagaccaagaagcagcugagagagaacgccgaggacaugggcaacggcugcuucaagaucuaccacaagugcgacaacgccugcaucggcagcaucagaaacggcaccuacgaccacgacguguacagagacgaggcccugaacaacagauuccagaucaagggcguggagcugaagagcggcuacaaggacuggauccuguggaucagcuucgccaucagcugcuuccugcugugcguggcccugcugggcuucaucaugugggccugccagaagggcaacaucagaugcaacaucugcaucuga

SEQ ID NO: 174026 - RNA, 1701 nt, Artificial Sequence; identical to SEQ ID NO: 168769
  derived and/or modified CDS sequence (opt4) from hemagglutinin__InfluenzaA__EPI377499

SEQ ID NO: 174027 - RNA, 1701 nt, Artificial Sequence
  derived and/or modified CDS sequence (opt4) from hemagglutinin__InfluenzaA__EPI391247
augaagaccaucaucgcccugagcuacauccugugccugguguucgcccagaagcugcccggcaacgacaacagcaccgccacccugugccugggccaccacgccgugcccaacggcaccaucgugaagaccaucaccaacgacagaaucgaggugaccaacgccaccgagcuggugcagaacagcagcaucggcgagaucugcgacagcccccaccagauccuggacggcgagaacugcacccugaucgacgcccugcugggcgacccccagugcgacggcuuccagaacaagaagugggaccuguucguggagagaagcaaggccuacagcaacugcuaccccuacgacgugcccgacuacgccagccugagaagccugguggccagcagcggcacccuggaguucaacaacgagagcuucaacuggaacggcgugacccagaacggcaccagcagcgccugcaucagaagaagcaacaacagcuucuucagcagacugaacuggcugacccaccugaacuucaaguaccccgcccugaacgugaccaugcccaacaacgagcaguucgacaagcuguacaucuggggcgugcaccaccccgugaccgacaaggaccagaucuuccuguacgcccagcccagcggcagaaucaccgugagcaccaagagaagccagcaggccgugauccccaacaucggcuucagacccagaaucagaaacauccccagcagaaucagcaucuacuggaccaucgugaagcccggcgacauccugcugaucaacagcaccggcaaccugaucgcccccagaggcuacuucaagaucagaagcggcaagagcagcaucaugagaagcgacgcccccaucggcaagugcaagagcgagugcaucacccccaacggcagcauccccaacgacaagcccuuccagaacgugaacagaaucaccuacggcgccugccccagauacgugaagcagagcacccugaagcuggccaccggcaugagaaacgugcccgagaagcagaccagaggcaucuucggcgccaucgccggcuucaucgagaacggcugggagggcaugguggacggcugguacggcuucagacaccagaacagcgagggcagaggccaggccgccgaccugaagagcacccaggccgccaucgaccagaucaacggcaagcugaacagacugaucggcaagaccaacgagaaguuccaccagaucgagaaggaguucagcgagguggagggcagaauccaggaccuggagaaguacguggaggacaccaagaucgaccuguggagcuacaacgccgagcugcugguggcccuggagaaccagcacaccaucgaccugaccgacagcgagaugaacaagcuguucgagaagaccaagaagcagcugagagagaacgccgaggacaugggcaacggcugcuucaagaucuaccacaagugcgacaacgccugcaucggcagcaucagaaacggcaccuacgaccacgacguguacagagacgaggcccugaacaacagauuccagaucaagggcguggagcugaagagcggcuacaaggacuggauccuguggaucagcuucgccaucagcugcuuccugcugugcguggcccugcugggcuucaucaugugggccugccagaagggcaacaucagaugcaacaucugcaucuga

SEQ ID NO: 174028 - RNA, 1701 nt, Artificial Sequence
  derived and/or modified CDS sequence (opt4) from hemagglutinin__InfluenzaA__EPI407123
augaagaccaucaucgcccugagcuacauccugugccugguguucgcccagaagcugcccggcaacgacaacagcaccgccacccugugccugggccaccacgccgugcccaacggcaccaucgugaagaccaucaccaacgacagaaucgaggugaccaacgccaccgagcuggugcagaacagcagcaucggcgagaucugcgacagcccccaccagauccuggacggcgagaacugcacccugaucgacgcccugcugggcgacccccagugcgacggcuuccagaacaagaagugggaccuguucguggagagaagcaaggccuacagcaacugcuaccccuacgacgugcccgacuacgccagccugagaagccugguggccagcagcggcacccuggaguucaacaacgagagcuucaacuggaacggcgugacccagaacggcaccagcagcgccugcaucagaagaagcaacaacagcuucuucagcagacugaacuggcugacccaccugaacuucaaguaccccgcccugaacgugaccaugcccaacaacgagcaguucgacaagcuguacaucuggggcgugcaccaccccgugaccgacaaggaccagaucuuccuguacgcccagcccagcggcagaaucaccgugagcaccaagagaagccagcaggccgugauccccaacaucggcuucagacccagaaucagaaacaaccccagcagaaucagcaucuacuggaccaucgugaagcccggcgacauccugcugaucaacagcaccggcaaccugaucgcccccagaggcuacuucaagaucagaagcggcaagagcagcaucaugagaagcgacgcccccaucggcaagugcaagagcgagugcaucacccccaacggcagcauccccaacgacaagcccuuccagaacgugaacagaaucaccuacggcgccugccccagauacgugaagcagagcacccugaagcuggccaccggcaugagaaacgugcccgagaagcagaccagaggcaucuucggcgccaucgccggcuucaucgagaacggcugggagggcaugguggacggcugguacggcuucagacaccagaacagcgagggcagaggccaggccgccgaccugaagagcacccaggccgccaucgaccagaucaacggcaagcugaacagacugaucggcgagaccaacgagaaguuccaccagaucgagaaggaguucagcgagguggagggcagaauccaggaccuggagaaguacguggaggacaccaagaucgaccuguggagcuacaacgccgagcugcugguggcccuggagaaccagcacaccaucgaccugaccgacagcgagaugaacaagcuguucgagaagaccaagaagcagcugagagagaacgccgaggacaugggcaacggcugcuucaagaucuaccacaagugcgacaacgccugcaucggcagcaucagaaacggcaccuacgaccacgacguguacagagacgaggcccugaacaacagauuccagaucaagggcguggagcugaagagcggcuacaaggacuggauccuguggaucagcuucgccaucagcugcuuccugcugugcguggcccugcugggcuucaucaugugggccugccagaagggcaacaucagaugcaacaucugcaucuga

SEQ ID NO: 174029 - RNA, 1701 nt, Artificial Sequence
  derived and/or modified CDS sequence (opt4) from hemagglutinin__InfluenzaA__EPI407126
augaagaccaucaucgcccugagcuacauccugugccugguguucgcccagaagcugcccggcaacgacaacagcaccgccacccugugccugggccaccacgccgugcccaacggcaccaucgugaagaccaucaccaacgacagaaucgaggugaccaacgccaccgagcuggugcagaacagcagcaucggcgagaucugcgacagcccccaccagauccuggacggcgagaacugcacccugaucgacgcccugcugggcgacccccagugcgacggcuuccagaacaagaagugggaccuguucguggagagaagcaaggccuacagcaacugcuaccccuacgacgugcccgacuacgccagccugagaagccugguggccagcagcggcacccuggaguucaacaacgagagcuucaacuggaacggcgugacccagaacggcaccagcagcgccugcaucagaagaagcaacaacagcuucuucagcagacugaacuggcugacccaccugaacuucaaguaccccgcccugaacgugaccaugcccaacaacgagcaguucgacaagcuguacaucuggggcgugcaccaccccgugaccgacaaggaccagaucuuccuguacgcccagcccagcggcagaaucaccgugagcaccaagagaagccagcaggccgugauccccaacaucggcuucagacccagaaucagaaacaaccccagcagaaucagcaucuacuggaccaucgugaagcccggcgacauccugcugaucaacagcaccggcaaccugaucgcccccagaggcuacuucaagaucagaagcggcaagagcagcaucaugagaagcgacgcccccaucggcaagugcaagagcgagugcaucacccccaacggcagcauccccaacgacaagcccuuccagaacgugaacagaaucaccuacggcgccugccccagauacgugaagcagagcacccugaagcuggccaccggcaugagaaacgugcccgagaagcagaccagaggcaucuucggcgccaucgccggcuucaucgagaacggcugggagggcaugguggacggcugguacggcuucagacaccagaacagcgagggcagaggccaggccgccgaccugaagagcacccaggccgccaucgaccagaucaacggcaagcugaacagacugaucggcaagaccaacgagaaguuccaccagaucgagaaggaguucagcgagguggagggcagaauccaggaccuggagaaguacguggaggacaccaagaucgaccuguggagcuacaacgccgagcugcugguggcccuggagaaccagcacaccaucgaccugaccgacagcgagaugaacaagcuguucgagaagaccaagaagcagcugagagagaacgccgaggacaugggcaacggcugcuucaagaucuaccacaagugcgacaacgccugcaucggcagcaucagaaacggcaccuacgaccacgacguguacagagacgaggcccugaacaacagauuccagaucaagggcguggagcugaagagcggcuacaaggacuggauccuguggaucagcuucgccaucagcugcuuccugcugugcguggcccugcugggcuucaucaugugggccugccagaagggcaacaucagaugcaacaucugcaucuga

SEQ ID NO: 174030 - RNA, 1701 nt, Artificial Sequence; identical to SEQ ID NO: 173915
  derived and/or modified CDS sequence (opt4) from hemagglutinin__InfluenzaA__EPI562037

SEQ ID NO: 174031 - RNA, 1701 nt, Artificial Sequence; identical to SEQ ID NO: 172501
  derived and/or modified CDS sequence (opt4) from hemagglutinin__InfluenzaA__EPI562034

SEQ ID NO: 174032 - RNA, 1701 nt, Artificial Sequence
  derived and/or modified CDS sequence (opt4) from hemagglutinin__InfluenzaA__EPI653140
augaagaccaucaucgcccugagcuacauccugugccugguguucgcccagaagauccccggcaacgacaacagcaccgccacccugugccugggccaccacgccgugcccaacggcaccaucgugaagaccaucaccaacgacagaaucgaggugaccaacgccaccgagcuggugcagaacagcagcaucggcgagaucugcgacagcccccaccagauccuggacggcgagaacugcacccugaucgacgcccugcugggcgacccccagugcgacggcuuccagaacaagaagugggaccuguucguggagagaagcaaggccuacagcagcugcuaccccuacgacgugcccgacuacgccagccugagaagccugguggccagcagcggcacccuggaguucaacaacgagagcuucaacuggaccggcgugacccagaacggcaccagcagcgccugcaucagaagaagcagcagcagcuucuucagcagacugaacuggcugacccaccugaacuacaaguaccccgcccugaacgugaccaugcccaacaacgagcaguucgacaagcuguacaucuggggcgugcaccaccccggcaccgacaaggaccagaucuuccccuacgcccagagcagcggcagaaucaccgugagcaccaagagaagccagcaggccgugauccccaacaucggcagcagacccagaaucagaggcauccccagcagaaucagcaucuacuggaccaucgugaagcccggcgacauccugcugaucaacagcaccggcaaccugaucgcccccagaggcuacuucaagaucagaagcggcaagagcagcaucaugagaagcgacgcccccaucggcaagugcaagagcgagugcaucacccccaacggcagcauccccaacgacaagcccuuccagaacgugaacagaaucaccuacggcgccugccccagauacgugaagcacagcacccugaagcuggccaccggcaugagaaacgugcccgagaagcagaccagaggcaucuucggcgccaucgccggcuucaucgagaacggcugggagggcaugguggacggcugguacggcuucagacaccagaacagcgagggcagaggccaggccgccgaccugaagagcacccaggccgccaucgaccagaucaacggcaagcugaacagacugaucggcaagaccaacgagaaguuccaccagaucgagaaggaguucagcgagguggagggcagaauccaggaccuggagaaguacguggaggacaccaagaucgaccuguggagcuacaacgccgagcugcugguggcccuggagaaccagcacaccaucgaccugaccgacagcgagaugaacaagcuguucgagaagaccaagaagcagcugagagagaacgccgaggacaugggcaacggcugcuucaagaucuaccacaagugcgacaacgccugcaucggcagcaucagaaacggcaccuacgaccacaacguguacagagacgaggcccugaacaacagauuccagaucaagggcguggagcugaagagcggcuacaaggacuggauccuguggaucagcuucgccaucagcugcuuccugcugugcguggcccugcugggcuucaucaugugggccugccagaagggcaacaucagaugcaacaucugcaucuga

SEQ ID NO: 174033 - RNA, 1707 nt, Artificial Sequence
  derived and/or modified CDS sequence (opt4) from hemagglutinin__InfluenzaA__ACR48873/m
auggagaagaucgugcugcuguucgccaucgugagccuggugaagagcgaccagaucugcaucggcuaccacgccaacaacagcaccgagcagguggacaccaucauggagaagaacgugaccgugacccacgcccaggacauccuggagaagacccacaacggcaagcugugcgaccuggacggcgugaagccccugauccugagagacugcagcguggccggcuggcugcugggcaaccccaugugcgacgaguucaucaacgugcccgaguggagcuacaucguggagaaggccaaccccgugaacgaccugugcuaccccggcgacuucaacgacuacgaggagcugaagcaccugcugagcagaaucaaccacuucgagaagauccagaucauccccaagagcagcuggagcagccacgaggccagccugggcgugagcagcgccugccccuaccagggcaagagcagcuucuucagaaacgugguguggcugaucgagaagaacagcaccuaccccaccaucaagagaagcuacaacaacaccaaccaggaggaccugcuggugcuguggggcauccaccaccccaacgacgccgccgagcagaccaagcuguaccagaaccccaccaccuacaucagcgugggcaccagcacccugaaccagagacuggugcccagaaucgccaccagaagcaaggugaacggccagagcggcagaauggaguucuucuggaccauccugaagcccaacgacgccaucaacuucgagagcaacggcaacuucaucgcccccgaguacgccuacaagaucgugaagaagggcgacagcaccaucaugaagagcgagcuggaguacggcaacugcaacaccaagugccagacccccaugggcgccaucaacagcagcaugcccuuccacaacauccacccccugaccaucggcgagugccccaaguacgugaagagcaacagacuggugcuggccaccggccugagaaacagcccccagagagagagaagaagaaagaagagaggccuguucggcgccaucgccggcuucaucgagggcggcuggcagggcaugguggacggcugguacggcuaccaccacagcaacgagcagggcagcggcuacgccgccgacaaggagagcacccagaaggccaucgacggcgugaccaacaaggugaacagcaucaucgacaagaugaacacccaguucgaggccgugggcagagaguucaacaaccuggagagaagaaucgagaaccugaacaagaagauggaggacggcuuccuggacguguggaccuacaacgccgagcugcuggugcugauggagaacgagagaacccuggacuuccacgacagcaacgugaagaaccuguacgacaaggugagacugcagcugagagacaacgccaaggagcugggcaacggcugcuucgaguucuaccacaagugcgacaacgagugcauggagagcgugagaaacggcaccuacgacuacccccaguacagcgaggaggccagacugaagagagaggagaucagcggcgugaagcuggagagcaucggcaucuaccagauccugagcaucuacagcaccguggccagcagccuggcccuggccaucaugguggccggccugagccuguggaugugcagcaacggcagccugcagugcagaaucugcaucuga

SEQ ID NO: 174034 - RNA, 1707 nt, Artificial Sequence
  derived and/or modified CDS sequence (opt4) from hemagglutinin__InfluenzaA__ACR48874/m
auggagaagaucgugcugcuguucgccaucgugagccuggugaagagcgaccagaucugcaucggcuaccacgccaacaacagcaccgagcagguggacaccaucauggagaagaacgugaccgugacccacgcccaggacauccuggagaagacccacaacggcaagcugugcgaccuggacggcgugaagccccugauccugagagacugcagcguggccggcuggcugcugggcaaccccaugugcgacgaguucaucaacgugcccgaguggagcuacaucguggagaaggccaaccccgugaacgaccugugcuaccccggcgacuucaacgacuacgaggagcugaagcaccugcugagcagaaucaaccacuucgagaagauccagaucauccccaagagcagcuggagcagccacgaggccagccugggcgugagcagcgccugccccuaccagggcaagagcagcuucuucagaaacgugguguggcugaucaagaagaacagcaccuaccccaccaucaagagaagcuacaacaacaccaaccaggaggaccugcuggugcuguggggcauccaccaccccaaggacgccgccgagcagaccaagcuguaccagaaccccaccaccuacaucagcgugggcaccagcacccugaaccagagacuggugcccagaaucgccaccagaagcaaggugaacggccagagcggcagaauggaguucuucuggaccauccugaagcccaacgacgccaucaacuucgagagcaacggcaacuucaucgcccccgaguacgccuacaagaucgugaagaagggcgacagcaccaucaugaagagcgagcuggaguacggcaacugcaacaccaagugccagacccccaugggcgccaucaacagcagcaugcccuuccacaacauccacccccugaccaucggcgagugccccaaguacgugaagagcaacagacuggugcuggccaccggccugagaaacagcccccagagagagagaagaagaaagaagagaggccuguucggcgccaucgccggcuucaucgagggcggcuggcagggcaugguggacggcugguacggcuaccaccacagcaacgagcagggcagcggcuacgccgccgacaaggagagcacccagaaggccaucgacggcgugaccaacaaggugaacagcaucaucgacaagaugaacacccaguucgaggccgugggcagagaguucaacaaccuggagagaagaaucgagaaccugaacaagaagauggaggacggcuuccuggacguguggaccuacaacgccgagcugcuggugcugauggagaacgagagaacccuggacuuccacgacagcaacgugaagaaccuguacgacaaggugagacugcagcugagagacaacgccaaggagcugggcaacggcugcuucgaguucuaccacaagugcgacaacgagugcauggagagcgugagaaacggcaccuacgacuacccccaguacagcgaggaggccagacugaagagagaggagaucagcggcgugaagcuggagagcaucggcaucuaccagauccugagcaucuacagcaccguggccagcagccuggcccuggccaucaugguggccggccugagccuguggaugugcagcaacggcagccugcagugcagaaucugcaucuga

SEQ ID NO: 174035 - RNA, 1701 nt, Artificial Sequence; identical to SEQ ID NO: 169206
  derived and/or modified CDS sequence (opt4) from hemagglutinin__InfluenzaA__ACD47234

SEQ ID NO: 174036 - RNA, 1707 nt, Artificial Sequence
  derived and/or modified CDS sequence (opt4) from hemagglutinin__InfluenzaA__ACZ36881
auggagaagaucgugcugcugcuggccaucgugagccuggugaagagcgaccagaucugcaucggcuaccacgccaacaacagcaccgagcagguggacaccaucauggagaagaacgugaccgugacccacgcccaggacauccuggagaagacccacaacggcaagcugugcgaccuggacggcgugaagccccugauccugagagacugcagcguggccggcuggcugcugggcaaccccaugugcgacgaguuccugaacgugcccgaguggagcuacaucguggagaagaucaaccccgccaacgaccugugcuaccccggcaacuucaacgacuacgaggagcugaagcaccugcugagcagaaucaaccacuucgagaagauccagaucauccccaagagcagcuggagcgaccacgaggccagcagcggcgugagcagcgccugccccuaccagggcagaagcagcuucuucagaaacgugguguggcugaucaagaaggacaacgccuaccccaccaucaagagaagcuacaacaacaccaaccaggaggaccugcuggugcuguggggcauccaccaccccaacgacgccgccgagcagaccagacuguaccagaaccccaccaccuacaucagcgugggcaccagcacccugaaccagagacuggugcccaagaucgccaccagaagcaaggugaacggccagagcggcagaauggaguucuucuggaccauccugaagcccaacgacgccaucaacuucgagagcaacggcaacuucaucgcccccgagaacgccuacaagaucgugaagaagggcgacagcaccaucaugaagagcgagcuggaguacggcaacugcaacaccaagugccagacccccaucggcgccaucaacagcagcaugcccuuccacaacauccacccccugaccaucggcgagugccccaaguacgugaagagcaacagacuggugcuggccaccggccugagaaacagcccccagggcgagagaagaagaagaaagagaggccuguucggcgccaucgccggcuucaucgagggcggcuggcagggcaugguggacggcugguacggcuaccaccacagcaacgagcagggcagcggcuacgccgccgacaaggagagcacccagaaggccaucgacggcgugaccaacaaggugaacagcaucaucgacaagaugaacacccaguucgaggccgugggcagagaguucaacaaccuggagagaagaaucgagaaccugaacaagaagauggaggacggcuuccuggacguguggaccuacaacgccgagcugcuggugcugauggagaacgagagaacccuggacuuccacgacagcaacgugaagaaccuguacgacaaggugagacugcagcugagagacaacgccaaggagcugggcaacggcugcuucgaguucuaccacagaugcgacaacgagugcauggagagcgugagaaacggcaccuacgacuacccccaguacagcgaggaggccagacugaagagagaggagaucagcggcgugaagcuggagagcaucggcaccuaccagauccugagcaucuacagcaccguggccagcagccuggcccuggccaucaugguggccggccugagccuguggaugugcagcaacggcagccugcagugcagaaucugcaucuga

SEQ ID NO: 174037 - RNA, 1704 nt, Artificial Sequence
  derived and/or modified CDS sequence (opt4) from hemagglutinin__InfluenzaA__EPI500771
auggagaagaucgugcugcuguucgccaccaucagccuggugaagagcgaccacaucugcaucggcuaccacgccaacaacagcaccgagcagguggacaccaucauggagaagaacgugaccgugacccacgcccaggacauccuggagaagacccacaacggcaagcugugcgaccugaacggcgugaagccccugauccugaaggacugcagcguggccggcuggcugcugggcaacccccugugcgacgaguucaccaacgugcccgaguggagcuacaucguggagaaggccaaccccgccaacgaccugugcuaccccggcaacuucaacgacuacgaggagcugaagcaccugcugagcagaaucaaccacuucgagaagauccagaucauccccaaggacagcuggagcgaccacgaggccagccugggcgugagcgccgccugcagcuaccagggcaacagcagcuucuucagaaacgugguguggcugaucaagaaggacaacgccuaccccaccaucaagaagggcuacaacaacaccaacagagaggaccugcugauccuguggggcauccaccaccccaacgacgaggccgagcagaccaagcuguaccagaaccccaccaccuacaucagcaucggcaccagcacccugaaccagagacuggugcccaagaucgccaccagaagcaagaucaacagacagagcggcagaaucgacuucuucuggaccauccugaagcccaacgacgccauccacuucgagagcaacggcaacuucaucgcccccgaguacgccuacaagaucgugaagaagggcgacagcaccaucaugagaagcgagguggaguacggcaacugcaacaccagaugccagacccccaucggcgccaucaacagcagcaugcccuuccacaacauccacccccugaccaucggcgagugccccaaguacgugaagagcaacaagcuggugcuggccaccggccugagaaacagcccccagagagagagaagaagaaagagaggccuguucggcgccaucgccggcuucaucgagggcggcuggcagggcaugguggacggcugguacggcuaccaccacagcaacgagcagggcagcggcuacgccgccgacaaggagagcacccagaaggccaucgacggcgugaccaacaaggugaacagcaucaucgacaagaugaacacccaguucgaggccgugggcagagaguucaacaaccuggagagaagaaucgagaaccugaacaagaagauggaggacggcuuccuggacguguggaccuacaacgccgagcugcuggugcugauggagaacgagagaacccuggacuuccacgacagcaacgugaagaaccuguacgacaaggugagacugcagcugaaggacaacgccaaggagcugggcaacggcugcuucgaguucuaccacaagugcaacaacgagugcauggagagcgugagaaacggcaccuacgacuacccccaguacagcgaggaggccagacugaagagagaggagaucagcggcgugaagcuggagagcaucggcaucuaccagauccugagcaucuacagcaccguggccagcagccuggugcuggccaucaugauggccggccugagccuguggaugugcagcaacggcagccugcagugcagaaucugcaucuga

SEQ ID NO: 174038 - RNA, 1695 nt, Artificial Sequence
  derived and/or modified CDS sequence (opt4) from hemagglutinin__InfluenzaA__ABF93441
auggagaagaucgugcugcugcuggccaucgugagccuggugaagagcgaccagaucugcaucggcuaccacgccaacaacagcaccgagcagguggacaccaucauggagaagaacgugaccgugacccacgcccaggacauccuggagaagacccacaacggcaagcugugcgaccuggacggcgugaagccccugauccugagagacugcagcguggccggcuggcugcugggcaaccccaugugcgacgaguuccugaacgugcccgaguggagcuacaucguggagaagaucaaccccgccaacgaccugugcuaccccggcaacuucaacgacuacgaggagcugaagcaccugcugagcagaaucaaccacuucgagaagauccagaucauccccaagagcagcuggagcgaccacgaggccagcagcggcgugagcagcgccugccccuaccagggcagaagcagcuucuucagaaacgugguguggcugaucaagaagaacaacgccuaccccaccaucaagagaagcuacaacaacaccaaccaggaggaccugcuggugcuguggggcauccaccaccccaacgacgccgccgagcagaccagacuguaccagaaccccaccaccuacaucagcgugggcaccagcacccugaaccagagacuggugcccaagaucgccaccagaagcaaggugaacggccagagcggcagaauggaguucuucuggaccauccugaagcccaacgacgccaucaacuucgagagcaacggcaacuucaucgcccccgagaacgccuacaagaucgugaagaagggcgacagcaccaucaugaagagcgagcuggaguacggcaacugcaacaccaagugccagacccccaucggcgccaucaacagcagcaugcccuuccacaacauccacccccugaccaucggcgagugccccaaguacgugaagagcaacagacuggugcuggccaccggccugagaaacagcccccagaucgagaccagaggccuguucggcgccaucgccggcuucaucgagggcggcuggcagggcaugguggacggcugguacggcuaccaccacagcaacgagcagggcagcggcuacgccgccgacaaggagagcacccagaaggccaucgacggcgugaccaacaaggugaacagcaucaucgacaagaugaacacccaguucgaggccgugggcagagaguucaacaaccuggagagaagaaucgagaaccugaacaagaagauggaggacggcuuccuggacguguggaccuacaacgccgagcugcuggugcugauggagaacgagagaacccuggacuuccacgacagcaacgugaagaaccuguacgacaaggugagacugcagcugagagacaacgccaaggagcugggcaacggcugcuucgaguucuaccacagaugcgacaacgagugcauggagagcgugagaaacggcaccuacgacuacccccaguacagcgaggaggccagacugaagagagaggagaucagcggcgugaagcuggagagcaucggcaccuaccagauccugagcaucuacagcaccguggccagcagccuggcccuggccaucaugguggccggccugagccuguggaugugcagcaacggcagccugcagugcagaaucugcaucuga

SEQ ID NO: 174039 - RNA, 1707 nt, Artificial Sequence
  derived and/or modified CDS sequence (opt4) from hemagglutinin__InfluenzaA__AGG12577
auggagaagaucgugcugcuguucgccaucaucagccuggugaagagcgaccacaucugcaucggcuaccacgccaacaacagcaccgagcagguggacaccaucauggagaagaacgugaccgugacccacgcccaggacauccuggagaagacccacaacggcaagcugugcgaccugaacggcgugaagccccugauccugaaggacugcagcguggccggcuggcugcugggcaaccccaugugcgacgaguucaucgacgugcccgaguggagcuacaucguggagaaggccaaccccgccaacgaccugugcuaccccggcaacuucaacgacuacgaggagcugaagcaccugcugagcagaaucaaccacuucgagaagaucagaaucauccccaaggacagcuggcccgaccacgaggccagccugggcgugagcgccgccugcagcuaccagggcaacagcagcuucuucagaaacgugguguggcugcugaagaaggacaacgccuaccccaucaucaagaagagcuacaacaacaccaacaaggaggaccugcuggugcuguggggcauccaccaccccaacgacgaggccgagcagaccagacuguaccagaaccccaccaccuacgugagcaucggcaccagcacccugaaccagagacuggugcccagaaucgccaccagaagcaaggugaacggccagagcggcagaaucgacuucuucuggaccauccugaagcccaacgacgccaucaacuucgagagcaacggcaacuucaucgcccccgaguacgccuacaagaucgugaagaagggcgacagcaccaucaugagaagcgagguggaguacggcaacugcagcaccagaugccagacccccaugggcgccaucaacagcagcaugcccuuccacaacauccacccccugaccaucggcgagugccccaaguacgugaagagcaacaagcuggugcuggccaccggccugagaaacagcccccagaucgagagaagaagaagaaagagaggccuguucggcgccaucgccggcuucaucgagggcggcuggcagggcaugguggacggcugguacggcuaccaccacagcaacgagcagggcagcggcuacgccgccgacaaggagagcacccagaaggccaucgacggcgugaccaacaaggugaacagcaucaucgacaagaugaacacccaguucgaggccgugggcagagaguucaacaaccuggagagaagaaucgagaaccugaacaagaagauggaggacggcuuccuggacguguggaccuacaacgccgagcugcuggugcugauggagaacgagagaacccuggacuuccacgacagcaacgugaagaaccuguacgacaaggugagacugcagcugagagacaacgccaaggagcugggcaacggcugcuucgaguucuaccacaagugcgacaacgagugcauggagagcgugagaaacggcaccuacgacuacccccaguacagcgaggaggccagacugaagagagaggagaucagcggcgugaagcuggagagcaucggcaccuaccagauccugagcaucuacagcaccguggccagcagccuggugcuggccaucaugguggccggccugagccuguggaugugcagcaacggcagccugcagugcagaaucugcaucuga

SEQ ID NO: 174040 - RNA, 1707 nt, Artificial Sequence; identical to SEQ ID NO: 174039
  derived and/or modified CDS sequence (opt4) from hemagglutinin__InfluenzaA__AGC13463

SEQ ID NO: 174041 - RNA, 1707 nt, Artificial Sequence; identical to SEQ ID NO: 165903
  derived and/or modified CDS sequence (opt4) from hemagglutinin__InfluenzaA__ACI06178/m1

SEQ ID NO: 174042 - RNA, 1707 nt, Artificial Sequence
  derived and/or modified CDS sequence (opt4) from hemagglutinin__InfluenzaA__AHF20402
auggagaagaucgugcugcuguucgccaucgugagccuggugaagagcgaccagaucugcaucggcuaccacgccaacaacagcaccgagcagguggacaccaucauggagaagaacgugaccgugacccacgcccaggacauccuggagaagacccacaacggcaagcugugcgaccuggacggcgugagaccccugauccugagagacugcagcguggccggcuggcugcugggcaaccccaugugcgacgaguucaucaacgugcccgaguggagcuacaucguggagaaggccaaccccgugaacgaccugugcuaccccggcguguucaacgacuacgaggagcugaagcaccugcugagcagaaucaaccacuucgagaagauccagaucauccccaagaacagcuggcccagccacgaggccagccugggcgugagcgccgccugccccuaccagggccagagcagcuucuucagaaacgugguguggcugaucaagaagaacaacaccuaccccaccaucaagagaagcuacaacaacaccaaccaggaggaccugcuggugauguggggcauccaccaccccaacgacgccguggagcagaccaagcuguaccagaaccccaccaccuacaucagcgugggcaccagcacccugaaccagagacugacccccagaaucgccaccagaagcaaggugaagggccugagcggcagaauggaguucuucuggaccauccugaagcccaacgacgccaucaacuucgagagcaacggcaacuucaucgcccccgaguacgccuacaagaucgugaagaagggcgacagcaccaucaugagaagcgagcuggaguacggcaacugcaacaccaagugccagacccccaugggcgccaucaacagcagcaugcccuuccacaacauccacccccugaccaucggcgagugccccaaguacgugaagagcaccagacuggugcuggccaccggccugagaaacagcccccagagagaggagagaagaaagaagagaggccuguucggcgccaucgccggcuucaucgagggcggcuggcagggcaugguggacggcugguacggcuaccaccacagcaacgagcagggcagcggcuacgccgccgacaaggagagcacccagaaggccaucgacggcgugaccaacaaggugaacagcaucaucgacaagaugaacacccaguucgaggccgugggcagagaguucaacaaccuggagagaagaaucgagaaccugaacaagaagauggaggacggcuuccuggacguguggaccuacaacgccgagcugcuggugcugauggagaacgagagaacccuggacuuccacgacagcaacgugaagaaccuguacgacaaggugagacugcagcugagagacaacgccaaggagcugggcaacggcugcuucgaguucuaccacaagugcgacaacaagugcauggagagcgugagaaacggcaccuacgacuacccccaguacagcgaggaggccagacugaagagagaggagaucagcggcgugaagcuggagagcaucggcguguaccagauccugagcaucuacagcaccguggccagcagccuggcccuggccaucaugguggccggccugagccuguggaugugcagcaacggcagccugcagugcagaaucugcaucuga

SEQ ID NO: 174043 - RNA, 1707 nt, Artificial Sequence
  derived and/or modified CDS sequence (opt4) from hemagglutinin__InfluenzaA__ABQ45850
auggagaagaucgugcugcugcuggccaucgugagccuggugaagagcgaccagaucugcaucggcuaccacgccaacaacagcaccgagcagguggacaccaucauggagaagaacgugaccgugacccacgcccaggacauccuggagaagacccacaacggcaagcugugcgaccuggacggcgugaagccccugauccugagagacugcagcguggccggcuggcugcugggcaaccccaugugcgacgaguuccugaacgugcccgaguggagcuacaucguggagaagaucaaccccgccaacgaccugugcuaccccggcaacuucaacgacuacgaggagcugaagcaccugcugagcagaaucaaccacuucgagaagauccagaucauccccaagagcagcuggagcgaccacgaggccagcagcggcgugagcagcgccugccccuaccagggcagaagcagcuucuucagaaacgugguguggcugaucaagaagaacgacgccuaccccaccaucaagagaagcuacaacaacaccaaccaggaggaccugcuggugcuguggggcauccaccaccccaacgacgccgccgagcagaccagacuguaccagaaccccaccaccuacaucagcgugggcaccagcacccugaaccagagacuggugcccaagaucgccaccagaagcaaggugaacggccagagcggcagaauggaguucuucuggaccauccugaagcccaacgacgccaucaacuucgagagcaacggcaacuucaucgcccccgagaacgccuacaagaucgugaagaagggcgacagcaccaucaugaagagcgagcuggaguacggcaacugcaacaccaagugccagacccccaucggcgccaucaacagcagcaugcccuuccacaacauccacccccugaccaucggcgagugccccaaguacgugaagagcaacagacuggugcuggccaccggccugagaaacagcccccagggcgagagaagaagaaagaagagaggccuguucggcgccaucgccggcuucaucgagggcggcuggcagggcaugguggacggcugguacggcuaccaccacagcaacgagcagggcagcggcuacgccgccgacaaggagagcacccagaaggccaucgacggcgugaccaacaaggugaacagcaucaucgacaagaugaacacccaguucgaggccgugggcagagaguucaacaaccuggagagaagaaucgagaaccugaacaagaagauggaggacggcuuccuggacguguggaccuacaacgccgagcugcuggugcugauggagaacgagagaacccuggacuuccacgacagcaacgugaagaaccuguacgacaaggugagacugcagcugagagacaacgccaaggagcugggcaacggcugcuucgaguucuaccacagaugcgacaacgagugcauggagagcgugagaaacggcaccuacgacuacccccaguacagcgaggaggccagacugaagagagaggagaucagcggcgugaagcuggagagcaucggcaccuaccagauccugagcaucuacagcaccguggccagcagccuggcccuggccaucaugguggccggccugagccuguggaugugcagcaacggcagccugcagugcagaaucugcaucuga

SEQ ID NO: 174044 - RNA, 1713 nt, Artificial Sequence
  derived and/or modified CDS sequence (opt4) from hemagglutinin__InfluenzaA__AKI82373
auggagaagaucgugccccugcuggccaucaucggccuggugaagagcgaccagaucugcaucggcuaccacgccaacaacagcaccgagcagguggacaccaucauggagaagaacgugaccgugacccacgcccaggacauccuggagaagacccacaacggcaagcugugcaaccuggacggcgugaagccccugauccugaaggacugcagcguggccggcuggcugcugggcaaccccaugugcgacgaguuccugaacgugagcgaguggagcuacaucguggagaaggccagccccgccaacggccugugcuaccccggcgacuucaacgacuacgaggagcugaagcaccugcugaacagaaucacccaccugaagaagaucaagaucauccccaagagcuacuggagcaaccacgaggccagcagcggcgugagcgccgccugcagcuacaugggcgagcccagcuucuucagaaacgugguguggcugaucaagaagaacaacaccuacccccccaucaaggugaacuacaccaacaccaaccaggaggaccugcuggugcuguggggcauccaccaccccaacaacgaggccgagcagauccagaucuaccagaaccugaucacccacaucagcgugggcaccagcacccugaaccagagacugauccccaagaucgccaccagaagcaaggugaacggccagagcggcagaauggaguucuucuggaccauccugaagcccaacgacagcaucaacuucgacagcaacggcaacuucaucgcccccgaguacgccuacaucgugaagaagggcgacagcgccaucaugaagagcgagcuggaguacggcaacugcaacaccaagugccagacccccaugggcgccaucaacagcagcaugcccuuccacaacauccacccccugaccaucggcgagugccccaaguacgugaagagcaacagacuggugcuggccaccggccugagaaacgccccccagagagagagagagggcggcagaagaagaaagagaggccuguucggcgccaucgccggcuucaucgagggcggcuggcagggcaugguggacggcugguacggcuaccaccacagcaacgagcagggcagcggcuacgccgccgacaaggagagcacccagaaggccaucgacggcaucaccaacaaggugaacagcaucaucgacaagaugaacacccaguucgaggccgugggcagagaguucaacaaccuggagagaagaaucgagaaccugaacaagaagauggaggacggcuuccuggacguguggaccuacaacgccgagcugcuggugcugauggagaacgagagaacccuggacuuccacgacagcaacgugaagaaccuguacgagaaggugagacugcagcugagagacaacgccaaggagcugggcaacggcugcuucgaguucuaccacaagugcgacaacgagugcauggagagcgugagaaacggcaccuacgacuacagccaguacagcgaggaggccagacugagcagagaggagaucaacggcgugaagcuggagagcauggugaccuaccagauccugagcaucuacagcaccguggccagcagccuggcccuggccaucaugguggccggccugagccuguggaugugcagcaacggcagccugcagugcagaaucugcaucuga

SEQ ID NO: 174045 - RNA, 1713 nt, Artificial Sequence
  derived and/or modified CDS sequence (opt4) from hemagglutinin__InfluenzaA__EPI284473
auggagaagaucgugcugcugcuggccaucaucagccuggugaagagcgaccagaucugcaucggcuaccacgccaacaacagcaccgagcagguggacaccaucauggagaagaacgugaccgugacccacgcccaggacauccuggagaagacccacaacggcaagcugugcaaccuggacggcgugaagccccugauccugaaggacugcagcguggccggcuggcugcugggcaaccccaugugcgacgaguuccugaacgugagcgaguggagcuacaucguggagaaggccagccccgccaacggccugugcuaccccggcgacuucaacgacuacgaggagcugaagcaccugcugaacagaaucacccaccugaagaagaucaagaucauccccaagagcuacuggagcaaccacgaggccagcagcggcgugagcgccgccugcagcuacaugggcgagcccagcuucuucagaaacgugguguggcugaucaagaagaacaacaccuacccccccaucaaggugaacuacaccaacaccaaccaggaggaccugcuggugcuguggggcauccaccaccccaacaacgaggccgagcagauccagaucuaccagaaccugaucacccacaucagcgugggcaccagcacccugaaccagagacugauccccaagaucgccaccagaagcaaggugaacggccagagcggcagaauggaguucuucuggaccauccugaagcccaacgacagcaucaacuucgacagcaacggcaacuucaucgcccccgaguacgccuacaucgugaagaagggcgacagcgccaucaugaagagcgagcuggaguacggcaacugcaacaccaagugccagacccccaugggcgccaucaacagcagcaugcccuuccacaacauccacccccugaccaucggcgagugccccaaguacgugaagagcaacagacuggugcuggccaccggccugagaaacgccccccagagagagagagagggcggcagaagaagaaagagaggccuguucggcgccaucgccggcuucaucgagggcggcuggcagggcaugguggacggcugguacggcuaccaccacagcaacgagcagggcagcggcuacgccgccgacaaggagagcacccagaaggccaucgacggcaucaccaacaaggugaacagcaucaucgacaagaugaacacccaguucgaggccgugggcagagaguucaacaaccuggagagaagaaucgagaaccugaacaagaagauggaggacggcuuccuggacguguggaccuacaacgccgagcugcuggugcugauggagaacgagagaacccuggacuuccacgacagcaacgugaagaaccuguacgagaaggugagacugcagcugagagacaacgccaaggagcugggcaacggcugcuucgaguucuaccacaagugcgacaacgagugcauggagagcgugagaaacggcaccuacgacuacagccaguacagcgaggaggccagacugagcagagaggagaucaacggcgugaagcuggagagcauggugaccuaccagauccugagcaucuacagcaccguggccagcagccuggcccuggccaucaugguggccggccugagccuguggaugugcagcaacggcagccugcagugcagaaucugcaucuga

SEQ ID NO: 174046 - RNA, 1710 nt, Artificial Sequence
  derived and/or modified CDS sequence (opt4) from hemagglutinin__InfluenzaA__ACO07033
auggagaagaucgugcugcugcuggccaugaucggccuggugaagagcgaccagaucugcaucggcuaccacgccaacaacagcaccgagcagguggacaccaucauggagaagaacgugaccgugacccacgcccaggacauccuggagaagacccacaacggcaagcugugcaaccuggacggcgugaagccccugauccugaaggacugcagcguggccggcuggcugcugggcaaccccaugugcgacgaguuccugaacgugagcgaguggagcuacaucguggagaaggccagccccgccaacggccugugcuaccccggcgacuucaacgacuacgaggagcugaagcaccugcugagcagaaucaaccaccugaagaagaucaagaucauccccaagagcuacuggagcaaccacgaggccagcagcggcgugagcgccgccugcagcuaccugggcgagcccagcuucuucagaaacgugguguggcugaucaagaagaacaacaccuacccccccaucaaggugaacuacaccaacaccaaccaggaggaccugcuggugcuguggggcauccaccaccccaacgacgagaaggagcagaucagaaucuaccagaaccccaacaccagcaucagcgugggcaccagcacccugaaccagagacuggugcccaagaucgccaccagacccaaggugaacggccagagcggcagaauggaguucuucuggaccauccugaagcccaacgacagcaucaacuucgacagcaacggcaacuucaucgcccccgaguacgccuacaagaucgccaagaagggcgacagcgugaucaugaagagcgagcuggaguacggcaacugcaacaccaagugccagacccccaugggcgccaucaacagcagcaugcccuuccacaacauccacccccugaccaucggcgagugccccaaguacgugaagagcaacagacuggugcuggccaccggccugagaaacgccccccagagagagggcggcagaagaagaaagagaggccuguucggcgccaucgccggcuucaucgagggcggcuggcagggcaugguggacggcugguacggcuaccaccacagcaacgagcagggcagcggcuacgccgccgacaaggagagcacccagaaggccaucgacggcaucaccaacaaggugaacagcaucaucgacaagaugaacacccaguucgagaucgugggcagagaguucaacaaccuggagagaagaaucgagaaccugaacaagaagauggaggacggcuuccuggacguguggaccuacaacgccgagcugcuggugcugauggagaacgagagaacccuggacuuccacgacagcaacgugaagaaccuguacgagaaggugagacugcagcugagagacaacgccaaggagcugggcaacggcugcuucgaguucuaccacaagugcgacaacgagugcauggagagcgugagaaacggcaccuacgacuacccccaguacagcgaggaggccagacugagcagagaggagaucagcggcgugaagauggagagcauggugaccuaccagauccugagcaucuacagcaccguggccagcagccuggcccuggccaucaugguggccggccugagccuguggaugugcagcaacggcagccugcagugcagaaucugcaucuga

SEQ ID NO: 174047 - RNA, 1695 nt, Artificial Sequence
  derived and/or modified CDS sequence (opt4) from hemagglutinin__InfluenzaA__EPI174803
auggagaagaucgugcugcugcuggccaugaucggccuggugaagagcgaccagaucugcaucggcuaccacgccaacaacagcaccgagcagguggacaccaucauggagaagaacgugaccgugacccacgcccaggacauccuggagaagacccacaacggcaagcugugcaaccuggacggcgugaagccccugauccugaaggacugcagcguggccggcuggcugcugggcaaccccaugugcgacgaguuccugaacgugagcgaguggagcuacaucguggagaaggccagccccgccaacggccugugcuaccccggcgacuucaacgacuacgaggagcugaagcaccugcugagcagaaucaaccaccugaagaagaucaagaucauccccaagagcuacuggagcaaccacgaggccagcagcggcgugagcgccgccugcagcuaccugggcgagcccagcuucuucagaaacgugguguggcugaucaagaagaacaacaccuacccccccaucaaggugaacuacaccaacaccaaccaggaggaccugcuggugcuguggggcauccaccaccccaacgacgagaaggagcagaucagaaucuaccagaaccccaacaccagcaucagcgugggcaccagcacccugaaccagagacuggugcccaagaucgccaccagacccaaggugaacggccagagcggcagaauggaguucuucuggaccauccugaagcccaacgacagcaucaacuucgacagcaacggcaacuucaucgcccccgaguacgccuacaagaucgccaagaagggcgacagcgugaucaugaagagcgagcuggaguacggcaacugcaacaccaagugccagacccccaugggcgccaucaacagcagcaugcccuuccacaacauccacccccugaccaucggcgagugccccaaguacgugaagagcaacagacuggugcuggccaccggccugagaaacgccccccagaccgagaccagaggccuguucggcgccaucgccggcuucaucgagggcggcuggcagggcaugguggacggcugguacggcuaccaccacagcaacgagcagggcagcggcuacgccgccgacaaggagagcacccagaaggccaucgacggcaucaccaacaaggugaacagcaucaucgacaagaugaacacccaguucgagaucgugggcagagaguucaacaaccuggagagaagaaucgagaaccugaacaagaagauggaggacggcuuccuggacguguggaccuacaacgccgagcugcuggugcugauggagaacgagagaacccuggacuuccacgacagcaacgugaagaaccuguacgagaaggugagacugcagcugagagacaacgccaaggagcugggcaacggcugcuucgaguucuaccacaagugcgacaacgagugcauggagagcgugagaaacggcaccuacgacuacccccaguacagcgaggaggccagacugagcagagaggagaucagcggcgugaagauggagagcauggugaccuaccagauccugagcaucuacagcaccguggccagcagccuggcccuggccaucaugguggccggccugagccuguggaugugcagcaacggcagccugcagugcagaaucugcaucuga

SEQ ID NO: 174048 - RNA, 1704 nt, Artificial Sequence
  derived and/or modified CDS sequence (opt4) from hemagglutinin__InfluenzaA__AGZ62382
auggagaagaucgugcugcuguucgccgccaucagccuggugaagagcgaccacaucugcaucggcuaccacgccaacaacagcaccaagcagguggacaccaucauggagaagaacgugaccgugacccacgcccaggacauccuggagaagacccacaacggcaagcugugcgaccugaacggcgugaagccccugauccugaaggacugcagcguggccggcuggcugcugggcaaccccaugugcgacgaguucaucaacgugcccgaguggagcuacaucguggagaaggccaaccccgccaacggccugugcuaccccggcaacuucaacgacuacgaggagcugaagcaccugcugagcagaaucaaccacuucgagaagaucagaaucauccccaaggacagcuggagcgaccacgaggccagccugggcgugagcgccgccugccccuaccagggcaacagcagcuucuucagaaacgugguguggcugaucaagaaggacaacaccuaccccaccaucaagaagagcuacaacaacaccaaccaggaggaccugcugauccuguggggcauccaccaccccaacgacgaggccgagcagaccagacuguaccagaaccccaccaccuacaucagcaucggcaccagcacccugaaccagagacuggugcccaagaucgccaccagaagcaagaucaacggccagagcggcagaaucgacuucuucuggaccauccugaagcccaacgacgccauccacuucgagagcaacggcaacuucaucgcccccgaguacgccuacaagaucgugaagaagggcgacagcaccaucaugaagagcgagguggaguacggcaacugcaacaccagaugccagacccccaucggcgccaucaacagcagcaugcccuuccacaacauccacccccugaccaucggcgagugccccaaguacgugaagagcaacaagcuggugcuggccaccggccugagaaacagcccccagagagagagaagaagaaagagaggccuguucggcgccaucgccggcuucaucgagggcggcuggcagggcaugguggacggcugguacggcuaccaccacagcaacgagcagggcagcggcuacgccgccgacaaggagagcacccagaaggccaucgacggcgugaccaacaaggugaacagcaucaucgacaagaugaacacccaguucgaggccgugggcagagaguucaacaaccuggagagaagaaucgagaaccugaacaagaagauggaggacggcuuccuggacguguggaccuacaacgccgagcugcuggugcugauggagaacgagagaacccuggacuuccacgacagcaacgugagaaaccuguacgacaaggugagacugcagcugaaggacaacgccaaggagcugggcaacggcugcuucgaguucuaccacaagugcaacaacgagugcauggagagcgugagaaacggcaccuacgacuacccccaguacagcgaggaggccagacugagaagagaggagaucagcggcgugaagcuggagagcaucggcaucuaccagauccugagcaucuacagcaccguggccagcagccuggugcuggccaucaugauggccggccugagccuguggaugugcagcaacggcagccugcagugcagaaucugcaucuga

SEQ ID NO: 174049 - RNA, 1704 nt, Artificial Sequence
  derived and/or modified CDS sequence (opt4) from hemagglutinin__InfluenzaA__ABG67978/m
auggagaagaucgugcugcugcuggccaucgugagccuggugaagagcgaccagaucugcaucggcuaccacgccaacaacagcaccgagcagguggacaccaucauggagaagaacgugaccgugacccacgcccaggacauccuggagaagacccacaacggcaagcugugcgaccuggacggcgugaagccccugauccugagagacugcagcguggccggcuggcugcugggcaaccccaugugcgacgaguucaucaacgugcccgaguggagcuacaucguggagaaggccaaccccgccaacgaccugugcuaccccggcaacuucaacgacuacgaggagcugaagcaccugcugagcagaaucaaccacuucgagaagauccagaucauccccaagagcagcuggagcgaccacgaggccagcagcggcgugagcagcgccugccccuaccagggcacccccagcuucuucagaaacgugguguggcugaucaagaagaacaacaccuaccccaccaucaagagaagcuacaacaacaccaaccaggaggaccugcugauccuguggggcauccaccacagcaacgacgccgccgagcagaccaagcuguaccagaaccccaccaccuacaucagcgugggcaccagcacccugaaccagagacuggugcccaagaucgccaccagaagcaaggugaacggccagagcggcagaauggacuucuucuggaccauccugaagcccaacgacgccaucaacuucgagagcaacggcaacuucaucgcccccgaguacgccuacaagaucgugaagaagggcgacagcgccaucaucaagagcgagguggaguacggcaacugcaacaccaagugccagacccccaucggcgccaucaacagcagcaugcccuuccacaacauccacccccugaccaucggcgagugccccaaguacgugaagagcaacaagcuggugcuggccaccggccugagaaacagcccccugagagagagaagaagaaagagaggccuguucggcgccaucgccggcuucaucgagggcggcuggcagggcaugguggacggcugguacggcuaccaccacagcaacgagcagggcagcggcuacgccgccgacaaggagagcacccagaaggccaucgacggcgugaccaacaaggugaacagcaucaucgacaagaugaacacccaguucgaggccgugggcagagaguucaacaaccuggagagaagaaucgagaaccugaacaagaagauggaggacggcuuccuggacguguggaccuacaacgccgagcugcuggugcugauggagaacgagagaacccuggacuuccacgacagcaacgugaagaaccuguacgacaaggugagacugcagcugagagacaacgccaaggagcugggcaacggcugcuucgaguucuaccacaagugcgacaacgagugcauggagagcgugagaaacggcaccuacgacuacccccaguacagcgaggaggccagacugaagagagaggagaucagcggcgugaagcuggagagcaucggcaccuaccagauccugagcaucuacagcaccguggccagcagccuggcccuggccaucaugguggccggccugagccuguggaugugcagcaacggcagccugcagugcagaaucugcaucuga

SEQ ID NO: 174050 - RNA, 1695 nt, Artificial Sequence
  derived and/or modified CDS sequence (opt4) from hemagglutinin__InfluenzaA__EPI827075
auggagaagaucgugcugcuguucgccaccaucagccuggugaagagcgaccacaucugcaucggcuaccacgccaacaacagcaccgagcagguggacaccaucauggagaagaacgugaccgugacccacgcccaggacauccuggagaagacccacaacggcaagcugugcgaccugaacggcgugaagccccugauccugaaggacugcagcguggccggcuggcugcugggcaacccccugugcgacgaguucaccaacgugcccgaguggagcuacaucguggagaaggccaaccccgccaacgaccugugcuaccccggcaacuucaacgacuacgaggagcugaagcaccugcugagcagaaucaaccacuucgagaagauccagaucauccccaaggacagcuggagcgaccacgaggccagccugggcgugagcgccgccugcagcuaccagggcaacagcagcuucuucagaaacgugguguggcugaucaagaaggacaacgccuaccccaccaucaagaagggcuacaacaacaccaacagagaggaccugcugauccuguggggcauccaccaccccaacgacgaggccgagcagaccagacuguaccagaaccccaccaccuacaucagcaucggcaccagcacccugaaccagagacuggugcccaagaucgccaccagaagcaagaucaacggccagagcggcagaaucgacuucuucuggaccauccugaagcccaacgacgccauccacuucgagagcaacggcaacuucaucgcccccgaguacgccuacaagaucgugaagaagggcgacagcaccaucaugagaagcgagguggaguacggcaacugcaacaccagaugccagacccccaucggcgccaucaacagcagcaugcccuuccacaacauccacccccugaccaucggcgagugccccaaguacgugaagagcaacaagcuggugcuggccaccggccugagaaacagcccccagagagagaccagaggccuguucggcgccaucgccggcuucaucgagggcggcuggcagggcaugguggacggcugguacggcuaccaccacagcaacgagcagggcagcggcuacgccgccgacaaggagagcacccagaaggccaucgacggcgugaccaacaaggugaacagcaucaucgacaagaugaacacccaguucgaggccgugggcagagaguucaacaaccuggagagaagaaucgagaaccugaacaagaagauggaggacggcuuccuggacguguggaccuacaacgccgagcugcuggugcugauggagaacgagagaacccuggacuuccacgacagcaacgugaagaaccuguacgacaaggugagacugcagcugaaggacaacgccaaggagcugggcaacggcugcuucgaguucuaccacaagugcaacaacgagugcauggagagcgugagaaacggcaccuacgacuacccccaguacagcgaggaggccagacugaagagagaggagaucagcggcgugaagcuggagagcaucggcaucuaccagauccugagcaucuacagcaccguggccagcagccuggugcuggccaucaugauggccggccugagccuguggaugugcagcaacggcagccugcagugcagaaucugcaucuga

SEQ ID NO: 174051 - RNA, 1707 nt, Artificial Sequence
  derived and/or modified CDS sequence (opt4) from hemagglutinin__InfluenzaA__ABP96850
auggagaagaucgugcugcugcuggccaucgugagccuggugaagagcgaccagaucugcaucggcuaccacgccaacaacagcaccgagcagguggacaccaucauggagaagaacgugaccgugacccacgcccaggacauccuggagaagacccacaacggcaagcugugcgaccuggacggcgugaagccccugauccugagagacugcagcguggccggcuggcugcugggcaaccccaugugcgacgaguuccugaacgugcccgaguggagcuacaucguggagaagaucaaccccgccaacgaccugugcuaccccggcgacuucaacgacuacgaggagcugaagcaccugcugagcagaaucaaccacuucgagaagauccagaucauccccaagagcagcuggagcgacuacgaggccagcagcggcgugagcagcgccugccccuaccagggcagaagcagcuucuucagaaacgugguguggcugaucaagaagaacaacgccuaccccaccaucaagagaagcuacaacaacaccaaccaggaggaccugcuggugcuguggggcauccaccaccccaacgacgccgccgagcagaucagacuguaccagaaccccaccaccuacaucagcgugggcaccagcacccugaaccagagacuggugcccaagaucgccaccagaagcaaggugaacggccagagcggcagaauggaguucuucuggaccauccugaagagcaacgacgccaucaacuucgagagcaacggcaacuucaucgcccccgaguacgccuacaagaucgugaagaagggcgacagcaccaucaugaagagcgagcuggaguacggcaacugcaacaccaagugccagacccccaucggcgccaucaacagcagcaugcccuuccacaacauccacccccugaccaucggcgagugccccaaguacgugaagagcaacagacuggugcuggccaccggccugagaaacagcccccagggcgagagaagaagaagaaagagaggccuguucggcgccaucgccggcuucaucgagggcggcuggcagggcaugguggacggcugguacggcuaccaccacagcaacgagcagggcagcggcuacgccgccgacaaggagagcacccagaaggccaucgacggcgugaccaacaaggugaacagcaucaucaacaagaugaacacccaguucgaggccgugggcagagaguucaacaaccuggagagaagaaucgagaaccugaacaagaagauggaggacggcuuccuggacguguggaccuacaacgccgagcugcuggugcugauggagaacgagagaacccuggacuuccacgacagcaacgugaagaaccuguacgacaaggugagacugcagcugagagacaacgccaaggagcugggcaacggcugcuucgaguucuaccacagaugcgacaacgagugcauggagagcgugagaaacggcaccuacgacuacccccaguacagcgaggaggccagacugaagagagaggagaucagcggcgugaagcuggagagcaucggcaucuaccagauccugagcaucuacagcaccguggccagcagccuggcccuggccaucaugguggccggccuguuccuguggaugugcagcaacggcagccugcagugcagaaucugcaucuga

SEQ ID NO: 174052 - RNA, 1692 nt, Artificial Sequence
  derived and/or modified CDS sequence (opt4) from hemagglutinin__InfluenzaA__EPI827077
auggagaagaucgugcugcugcuggccaucgugagcaucgugaagagcgaccagaucugcaucggcuaccacgccaacaacagcaccgagcagguggacaccaucauggagaagaacgugaccgugacccacgcccaggacauccuggagaagacccacaacggcaagcugugcaaccuggacggcgugaagccccugauccugagagacugcagcguggccggcuggcugcugggcaaccccaugugcgacgaguuccugaacgugcccgaguggagcuacaucguggagaagaucaaccccgccaacgaccugugcuaccccggcaacuucaacgacuacgaggagcugaagcaccugcugagcagaaucaaccacuucgagaagauccagaucauccccaaggacagcuggagcgaccacgaggccagcggcgugagcagcgccugccccuaccagggcagaagcagcuucuucagaaacgugguguggcugaccaagaagaacgacgccuaccccaccaucaagaagagcuacaacaacaccaaccaggaggaccugcuggugcuguggggcauccaccaccccaacgacgccgccgagcagaccagacuguaccagaaccccaccaccuacaucagcgugggcaccagcacccugaaccagagacuggugcccaagaucgccaccagaagcaaggugaacggccagagcggcagaauggaguucuucuggaccauccugaagagcaacgacgccaucaacuucgagagcaacggcaacuucaucgcccccgagaacgccuacaagaucgugaagaagggcgacagcaccaucaugaagagcgagcuggaguacagcaacugcaacaccaagugccagacccccaucggcgccaucaacagcagcaugcccuuccacaacauccacccccugaccaucggcgagugccccaaguacgugaagagcaacagacuggugcuggccaccggccugagaaacagcccccagagagagaccagaggccuguucggcgccaucgccggcuucaucgagggcggcuggcagggcaugguggacggcugguacggcuaccaccacagcaacgagcagggcagcggcuacgccgccgacaaggagagcacccagagagccaucgacggcgugaccaacaaggugaacagcaucaucgacaagaugaacacccaguucgaggccgugggcagagaguucaacaaccuggagagaagaaucgagaaccugaacaagaagauggaggacggcuuccuggacguguggaccuacaacgccgagcugcuggugcugauggagaacgagagaacccuggacuuccacgacagcaacgugaagaaccuguacgacaaggugagacugcagcugagagacaacgccaaggagcugggcaacggcugcuucgaguucuaccacagaugcgacaacgagugcauggagagcgugagaaacggcaccuacgacuacccccaguacagcgaggaggccagacugaagagagaggagaucagcggcgugaagcuggagagcaucggcaccuaccagauccugagcaucuacagcaccguggccagcagccuggcccuggccaucaugguggccggccugagccuguggaugugcagcaacggcagccugcagugcagaaucugcaucuga

SEQ ID NO: 174053 - RNA, 1704 nt, Artificial Sequence
  derived and/or modified CDS sequence (opt4) from hemagglutinin__InfluenzaA__EPI594523
auggagaagaucauccugcugcuggccaucaucggccuggugaagagcgaccagaucugcgugggcuaccacgccaacaacagcaccgagagaguggacaccaucauggagaagaacgugaccgugacccacgcccaggacauccuggagaagacccacaacggcaagcugugcaaccugaacggcgugaagccccugauccuggaggacugcagcguggccggcuggcugcugggcaaccccaugugcgacaaguuccugaacgugagcgaguggagcuacaucguggagaaggccggccccgccaacggccugugcuaccccggcgacuucaacgacuacgaggagcugaagcaccugcugagcagaaucaaccacuucgagaagaucgagaucauccccaagaaccacuggagcaaccacaacaccagcggcgugagcagcgccugcagcuaccuggagaaccccagcuucuucagaaacgugguguggcugaccaagaagaacaacaccuaccccaccaucaaggugaacuacaccaacgccaaccagaaggaccugcuggugcuguggggcauccaccaccccaacaacgaggccgagcagaagaugaucuaccagaacagcaacaccuacgugagcgugggcaccagcacccugaaccagagacuggugcccaagaucgccaccagaagcaaggugaacggccagagcggcagaaucgacuucuucuggaccauccugaagcccaacgacaccaucaacuucgacagcaacggcaacuucaucgcccccaaguacgccuacaagaucgugaagaagggcgacagcgccaucaugaagagcgagcugaaguacgacaacugcaacaccaagugccagacccccaucggcgccaucaacagcagcaugcccuuccacaacauccacccccugaccaucggcgagugccccaaguacgugaagagcaacagacuggugcuggccaccggccugagaaacgccccccagaucgagggcagaagaagaaagagaggccuguucggcgccaucgccggcuucaucgagggcggcuggcagggcaugguggacggcugguacggcuaccaccacagcaacgagcagggcagcggcuacgccgccgacaaggagagcacccagaaggccguggacggcaucaccaacaagaucaacagcaucaucgacaagaugaacaaccaguucgaggccgugggcagagaguucaacaaccuggagagaagaaucgagaaccugaacaagaagauggaggacggcuuccuggacguguggaccuacaacgccgagcugcuggugcugauggagaacgagagaacccuggacuuccacgacagcaacgugaagaaccuguacgagaaggugagacugcagcugagagacaacgccaaggagcugggcaacggcugcuucgaguucuaccacaagugcgacaacgagugcauggagagcgugaagaacggcaccuacgacuacccccaguacagcgaggaggccagacugaacagagaggagaucagcggcgugaagcuggagagcaccgugaccuaccagauccugagcaucuacagcaccguggccagcagccuggugcuggccaucaugguggccggccugagccuguggaugugcagcaacggcagccugcagugcagaaucugcaucuga

SEQ ID NO: 174054 - RNA, 1707 nt, Artificial Sequence
  derived and/or modified CDS sequence (opt4) from hemagglutinin__InfluenzaA__AAD37782
auggagagaaucgugcugcugcuggccaucgugagccuggugaagagcgaccagaucugcaucggcuaccacgccaacaacagcaccgagcagguggacaccaucauggagaagaacgugaccgugacccacgcccaggacauccuggagaagacccacaacggcaagcugugcgaccugaacggcgugaagccccugauccugagagacugcagcguggccggcuggcugcugggcaaccccaugugcgacgaguucaucaacgugcccgaguggagcuacaucguggagaaggccagccccgccaacgaccugugcuaccccggcgacuucaacgacuacgaggagcugaagcaccugcugagcagaaccaaccacuucgagaagauccagaucaucccccccagcagcuggagcaaccacgacgccagcagcggcgugagcagcgccugccccuaccacggcagaagcagcuucuucagaaacgugguguggcugaucaagaagaacagcgccuaccccaccaucaagagaagcuacaacaacaccaaccaggaggaccugcuggugcuguggggcauccaccaccccaacgacgccgccgagcagaccaagcuguaccagaaccccaccaccuacaucagcgugggcaccagcacccugaaccagagacuggugcccgagaucgccaccagacccaaggugaacggccagagcggcagaauggaguucuucuggaccauccugaagcccaacgacgccaucaacuucgagagcaacggcaacuucaucgcccccgaguacgccuacaagaucgugaagaagggcgacagcgccaucaugaagagcgagcuggaguacggcaacugcaacaccaagugccagacccccaugggcgccaucaacagcagcaugcccuuccacaacauccacccccugaccaucggcgagugccccaaguacgugaagagcaacagacuggugcuggccaccggccugagaaacaccccccagagagagagaagaagaaagaagagaggccuguucggcgccaucgccggcuucaucgagggcggcuggcagggcauggugaacggcugguacggcuaccaccacagcaacgagcagggcagcggcuacgccgccgacaaggagagcacccagaaggccaucgacggcgugaccaacaaggugaacagcaucaucgacaagaugaacacccaguucgaggccgugggcagagaguucaacaaccuggagagaagaaucgagaaccugaacaagcagauggaggacggcuuccuggacguguggaccuacaacgccgagcugcuggugcugauggagaacgagagaacccuggacuuccacgacagcaacgugaagcaccuguacgacaaggugagacugcagcugagagacaacgccaaggagcugggcaacggcugcuucgaguucuaccacaagugcgacaacgagugcauggagagcgugaagaacggcaccuacgacuacccccaguacagcgaggaggccagacugaacagagaggagaucagcggcgugaagcuggagagcaugggcaccuaccagauccugagcaucuacagcaccguggccagcagccuggcccuggccaucaugguggccggccugagccuguggaugugcagcaacggcagccugcagugcagaaucugcaucuga

SEQ ID NO: 174055 - RNA, 1707 nt, Artificial Sequence
  derived and/or modified CDS sequence (opt4) from hemagglutinin__InfluenzaA__AAD51927
auggagaagaucgugcugcugcuggccaucgugagccuggugaagagcgaccagaucugcaucggcuaccacgccaacaacagcaccgagcagguggacaccaucauggagaagaacgugaccgugacccacgcccaggacauccuggagaagacccacaacggcaagcugugcgaccugaacggcgugaagccccugauccugagagacugcagcguggccggcuggcugcugggcaaccccaugugcgacgaguucaucaacgugcccgaguggagcuacaucguggagaaggccagccccgccaacgaccugugcuaccccggcgacuucaacgacuacgaggagcugaagcaccugcugagcagaaccaaccacuucgagaagauccagaucauccccaagagcagcuggagcaaccacgacgccagcagcggcgugagcagcgccugccccuaccacggcagaagcagcuucuucagaaacgugguguggcugaucaagaagaacagcgccuaccccaccaucaagagaagcuacaacaacaccaaccaggaggaccugcuggugcuguggggcauccaccaccccaacgacgccgccgagcagaccaagcuguaccagaaccccaccaccuacaucagcgugggcaccagcacccugaaccagagacuggugcccgagaucgccaccagacccaaggugaacggccagagcggcagaauggaguucuucuggaccauccugaagcccaacgacgccaucaacuucgagagcaacggcaacuucaucgcccccgaguacgccuacaagaucgugaagaagggcgacagcgccaucaugaagagcgagcuggaguacggcaacugcaacaccaagugccagacccccaugggcgccaucaacagcagcaugcccuuccacaacauccacccccugaccaucggcgagugccccaaguacgugaagagcaacagacuggugcuggccaccggccugagaaacaccccccagagagagagaagaagaaagaagagaggccuguucggcgccaucgccggcuucaucgagggcggcuggcagggcaugguggacggcugguacggcuaccaccacagcaacgagcagggcagcggcuacgccgccgacaaggagagcacccagaaggccaucgacggcgugaccaacaaggugaacagcaucaucgacaagaugaacacccaguucgaggccgugggcagagaguucaacaaccuggagagaagaaucgagaaccugaacaagcagauggaggacggcuuccuggacguguggaccuacaacgccgagcugcuggugcugauggagaacgagagaacccuggacuuccacgacagcaacgugaagaaccuguacgacaaggugagacugcagcugagagacaacgccaaggagcugggcaacggcugcuucgaguucuaccacaagugcgacaacgagugcauggagagcgugaagaacggcaccuacgacuacccccaguacagcgaggaggccagacugaacagagaggagaucagcggcgugaagcuggagagcaugggcaccuaccagauccugagcaucuacagcaccguggccagcagccuggcccuggccaucaugguggccggccugagccuguggaugugcagcaacggcagccugcagugcagaaucugcaucuga

SEQ ID NO: 174056 - RNA, 1704 nt, Artificial Sequence; identical to SEQ ID NO: 167777
  derived and/or modified CDS sequence (opt4) from hemagglutinin__InfluenzaA__AEO89181

SEQ ID NO: 174057 - RNA, 1707 nt, Artificial Sequence; identical to SEQ ID NO: 169231
  derived and/or modified CDS sequence (opt4) from hemagglutinin__InfluenzaA__AFM78567

SEQ ID NO: 174058 - RNA, 1707 nt, Artificial Sequence
  derived and/or modified CDS sequence (opt4) from hemagglutinin__InfluenzaA__ACR48872
auggagaagaucgugcugcugcuggccaucgugagccuggugaagagcgaccagaucugcaucggcuaccacgccaacaacagcaccgagcagguggacaccaucauggagaagaacgugaccgugacccacgcccaggacauccuggagaagacccacaacggcaagcugugcgaccuggacggcgugaagccccugauccugagagacugcagcguggccggcuggcugcugggcaaccccaugugcgacgaguucaucaacgugcccgaguggagcuacaucguggagaaggccaaccccaccaacgaccugugcuaccccggcagcuucaacgacuacgaggagcugaagcaccugcugagcagaaucaaccacuucgagaagauccagaucauccccaagagcagcuggagcgaccacgaggccagcagcggcgugagcagcgccugccccuaccugggcagccccagcuucuucagaaacgugguguggcugaucaagaagaacagcaccuaccccaccaucaagaagagcuacaacaacaccaaccaggaggaccugcuggugcuguggggcauccaccaccccaacgacgccgccgagcagaccaugcuguaccagaaccccaccaccuacaucagcaucggcaccagcacccugaaccagagacuggugcccaagaucgccaccagaagcaaggugaacggccagagcggcagaauggaguucuucuggaccauccugaagcccaacgacgccaucaacuucgagagcaacggcaacuucaucgcccccgaguacgccuacaagaucgugaagaagggcgacagcgccaucaugaagagcgagcuggaguacggcaacugcaacaccaagugccagacccccaugggcgccaucaacagcagcaugcccuuccacaacauccacccccugaccaucggcgagugccccaaguacgugaagagcaacagacuggugcuggccaccggccugagaaacagcccccagagagagagcagaagaaagaagagaggccuguucggcgccaucgccggcuucaucgagggcggcuggcagggcaugguggacggcugguacggcuaccaccacagcaacgagcagggcagcggcuacgccgccgacaaggagagcacccagaaggccaucgacggcgugaccaacaaggugaacagcaucaucgacaagaugaacacccaguucgaggccgugggcagagaguucaacaaccuggagagaagaaucgagaaccugaacaagaagauggaggacggcuuccuggacguguggaccuacaacgccgagcugcuggugcugauggagaacgagagaacccuggacuuccacgacagcaacgugaagaaccuguacgacaaggugagacugcagcugagagacaacgccaaggagcugggcaacggcugcuucgaguucuaccacaagugcgacaacgagugcauggagagcaucagaaacggcaccuacaacuacccccaguacagcgaggaggccagacugaagagagaggagaucagcggcgugaagcuggagagcaucggcaccuaccagauccugagcaucuacagcaccguggccagcagccuggcccuggccaucaugauggccggccugagccuguggaugugcagcaacggcagccugcagugcagaaucugcaucuga

SEQ ID NO: 174059 - RNA, 1707 nt, Artificial Sequence; identical to SEQ ID NO: 169231
  derived and/or modified CDS sequence (opt4) from hemagglutinin__InfluenzaA__ABW06108

SEQ ID NO: 174060 - RNA, 1707 nt, Artificial Sequence
  derived and/or modified CDS sequence (opt4) from hemagglutinin__InfluenzaA__EPI341633
auggagaagaucacccugcugcugagcaucgugagccuggugaagagcgaccagaucugcaucggcuaccacgccaacaacagcaccgagcagguggacaccaucauggagaagaacgugaccgugacccacgcccaggacauccuggagaagacccacaacggcaagcugugcgaccuggacggcgugaagccccugauccugaaggacugcagcguggccggcuggcugcugggcaaccccaugugcgacgaguucaucaacgugcccgaguggagcuacaucguggagaaggccaaccccaccaacgaccugugcuaccccggcagcuucaacgacuacgaggagcugaagcaccugcugagcagaaucaaccacuucgagaagauccagaucauccccaagagcagcuggagcgaccacgaggccagcagcggcgugagcagcgccugccccuaccugggcagccccagcuucuucagaaacgugguguggcugaucaagaagaacagcaccuaccccaccaucaagaagaccuacaacaacaccaaccaggaggaccugcugauccuguggggcauccaccaccccaacaacggcgccgagcagaccaugcuguaccagaaccccaccaccuacaucagcaucggcaccagcacccugaaccagagacuggugcccaagaucgccaccagaagcaaggugaacggccagagcggcagaauggaguucuucuggaccauccugaagcccaacgacgccaucaacuucgagagcaacggcaacuucaucgcccccgaguacgccuacaagaucgugaagaagggcgacagcgccaucaugaagagcgagcuggaguacggcaacugcaacaccaagugccagacccccaugggcgccaucaacagcagcaugcccuuccacaacauccaccccaucaccaucggcgagugccccaaguacgugaagagcaacagacuggugcuggccaccggccugagaaacagcccccagagagagagcagaagaaagaagagaggccuguucggcgccaucgccggcuucaucgagggcggcuggcagggcaugguggacggcugguacggcuaccaccacagcaacgagcagggcagcggcuacgccgccgacaaggagagcacccagaaggccaucgacggcgugaccaacaaggugaacagcaucaucgacaagaugaacacccaguucgaggccgugggcagagaguucagcaaccuggagagaagaaucgagaaccugaacaagaagauggaggacggcuuccuggacguguggaccuacaacgccgagcugcuggugcugauggagaacgagagaacccuggacuuccacgacagcaacgugaagaaccuguacgacaaggugagacugcagcugagagacaacgccaaggagcugggcaacggcugcuucgaguucuaccacaagugcgacaacgagugcauggagagcaucagaaacggcaccuacaacuacccccaguacagcgaggaggccagacugaagagagaggagaucagcggcgugaagcuggagagcaucggcaccuaccagauccugagcaucuacagcaccguggccagcagccuggcccuggccaucaugaucgccggccugagccuguggaugugcagcaacggcagccugcagugcagaaucugcaucuga

SEQ ID NO: 174061 - RNA, 1707 nt, Artificial Sequence
  derived and/or modified CDS sequence (opt4) from hemagglutinin__InfluenzaA__ABD95991
auggagaagaucaugcugcugcuggccaucgugagccuggugaagagcgaccagaucugcaucggcuaccacgccaacaacagcaccgagcagguggacaccaucauggagaagaacgugaccgugacccacgcccaggacauccuggagaagacccacaacggcaagcugugcgaccuggacggcgugaagccccugauccugagagacugcagcguggccggcuggcugcugggcaaccccaugugcgacgaguuccugaacgugcccgaguggagcuacaucguggagaagaucaaccccgccaacgaccugugcuaccccggcaacuucaacgacuacgaggagcugaagcaccugcugagcagaaucaaccacuucgagaagauccagaucauccccaagagcagcuggagcgaccacgaggccagcagcggcgugagcagcgccugccccuaccagggcagaagcagcuucuucagaaacgugguguggcugaucaagaaggacaacgccuaccccaccaucaagagaagcuacaacaacaccaaccaggaggaccugcuggugcuguggggcauccaccaccccaacgacgccgccgagcagaccagacuguaccagaaccccaccaccuacaucagcgugggcaccagcacccugaaccagagacuggugcccaagaucgccaccagaagcaaggugaacggccagagcggcagaauggaguucuucuggaccauccugaagcccaacgacgccaucaacuucgagagcaacggcaacuucaucgcccccgagaacgccuacaagaucgugaagaagggcgacagcaccaucaugaagagcgagcuggaguacggcaacugcaacaccaagugccagacccccaucggcgccaucaacagcagcaugcccuuccacaacauccacccccugaccaucggcgagugccccaaguacgugaagagcaacagacuggugcuggccaccggccugagaaacagcccccagggcgagagaagaagaaagaagagaggccuguucggcgccaucgccggcuucaucgagggcggcuggcagggcaugguggacggcugguacggcuaccaccacagcaacgagcagggcagcggcuacgccgccgacaaggagagcacccagaaggccaucgacggcgugaccaacaaggugaacagcaucaucgacaagaugaacacccaguucgaggccgugggcagagaguucaacaaccuggagagaagaaucgagaaccugaacaagaagauggaggacggcuuccuggacguguggaccuacaacgccgagcugcuggugcugauggagaacgagagaacccuggacuuccacgacagcaacgugaagaaccuguacgacaaggugagacugcagcugagagacaacgccaaggagcugggcaacggcugcuucgaguucuaccacagaugcgacaacgagugcauggagagcgugagaaacggcaccuacgacuacccccaguacagcgaggaggccagacugaagagagaggagaucagcggcgugaagcuggagagcaucggcaccuaccagauccugagcaucuacagcaccguggccagcagccuggcccuggccaucaugguggccggccugagccuguggaugugcagcaacggcagccugcagugcagaaucugcaucuga

SEQ ID NO: 174062 - RNA, 1707 nt, Artificial Sequence
  derived and/or modified CDS sequence (opt4) from hemagglutinin__InfluenzaA__AGN69453
auggagaagaucgugcugcugcuggccaucgugagccuggugaagagcgaccagaucugcaucggcuaccacgccaacaacagcaccgagcagguggacaccaucauggagaagaacgugaccgugacccacgcccaggacauccuggagaagacccacaacggcaagcugugcgaccuggacggcgugaagccccugauccugagagacugcagcguggccggcuggcugcugggcaaccccaugugcgacgaguuccugaacgugcccgaguggagcuacaucguggagaagaucaaccccgccaacgaccugugcuaccccggcaacuucaacgacuacgaggagcugaagcaccugcugagcagaaucaaccacuucgagaagauccagaucauccccaagagcagcuggagcgaccacgaggccagcgccggcgugagcagcgccugccccuaccagggcaugagcagcuucuucagaaacgugguguggcugaucaagaaggacaacgccuaccccaccaucaagagaagcuacaacaacaccaaccaggaggaccugcuggugcuguggggcauccaccaccccaacgacgccgccgagcagaccaagcuguaccagaacagcaccaccuacaucagcgugggcaccagcacccugaaccagagacuggugcccaagaucgccaccagaagcaaggugaacggccagagcggcagaaucgaguucuucuggaccauccugaagcccaacgacaccaucaacuucgagagcaacggcaacuucaucgcccccgagaacgccuacaagaucgugaagaagggcgacagcaccaucaugaagagcgagcuggaguacggcaacugcaacaccaagugccagacccccaucggcgccaucaacagcagcaugcccuuccacaacauccacccccugaccaucggcgagugccccaaguacgugaagagcagcagacuggugcuggccaccggccugagaaacagcccccagggcgagagaagaagaaagaagagaggccuguucggcgccaucgccggcuucaucgagggcggcuggcagggcaugguggacggcugguacggcuaccaccacagcaacgagcagggcagcggcuacgccgccgacaaggagagcacccagaaggccaucgacggcgugaccaacaaggugaacagcaucaucgacaagaugaacacccaguucgaggccgugggcagagaguucaacaaccuggagagaagaaucgagaaccugaacaagaagauggaggacggcuuccuggacguguggaccuacaacgccgagcugcuggugcugauggagaacgagagaacccuggacuuccacgacagcaacgugaagaaccuguacgacaaggugagacugcagcugagagacaacgccaaggagcugggcaacggcugcuucgaguucuaccacagaugcgacaacgagugcauggagagcgugagaaacggcaccuacgacuacccccaguacagcgaggaggccagacugaagagagaggagaucagcggcgugaagcuggagagcaucggcaccuaccagauccugagcaucuacagcaccguggccagcagccuggcccuggccaucaugguggccggccugagccuguggaugugcagcaacggcagccugcagugcagaaucugcaucuga

SEQ ID NO: 174063 - RNA, 1707 nt, Artificial Sequence
  derived and/or modified CDS sequence (opt4) from hemagglutinin__InfluenzaA__AGN69452
auggagaagaucgugcugcugcuggccaucgugagccuggugaagagcgaccagaucugcaucggcuaccacgccaacaacagcaccgagcagguggacaccaucauggagaagaacgugaccgugacccacgcccaggacauccuggagaagacccacaacggcaagcugugcgaccuggacggcgugaagccccugauccugagagacugcagcguggccggcuggcugcugggcaaccccaugugcgacgaguuccugaacgugcccgaguggagcuacaucguggagaagaucaaccccgccaacgaccugugcuaccccggcaacuucaacgacuacgaggagcugaagcaccugcugagcagaaucaaccacuucgagaagauccagaucauccccaagagcagcuggagcgaccacgaggccagcgccggcgugagcagcgccugccccuaccagggcagaagcagcuucuucagaaacgugguguggcugaucaagaaggacaacgccuaccccaccaucaagagaagcuacaacaacaccaaccaggaggaccugcuggugcuguggggcauccaccaccccaacgacgccgccgagcagaccagacuguaccagaacagcaccaccuacaucagcgugggcaccagcacccugaaccagagacuggugcccaagaucgccaccagaagcaaggugaacggccagagcggcagaaucgaguucuucuggaccauccugaagcccaacgacaccaucaacuucgagagcaacggcaacuucaucgcccccgagaacgccuacaagaucgugaagaagggcgacagcaccaucaugaagagcgagcuggaguacggcaacugcaacaccaagugccagacccccaucggcgccaucaacagcagcaugcccuuccacaacauccacccccugaccaucggcgagugccccaaguacgugaagagcagcagacuggugcuggccaccggccugagaaacagcccccagggcgagagaagaagaaagaagagaggccuguucggcgccaucgccggcuucaucgagggcggcuggcagggcaugguggacggcugguacggcuaccaccacagcaacgagcagggcagcggcuacgccgccgacaaggagagcacccagaaggccaucgacggcgugaccaacaaggugaacagcaucaucgacaagaugaacacccaguucgaggccgugggcagagaguucaacaaccuggagagaagaaucgagaaccugaacaagaagauggaggacggcuuccuggacguguggaccuacaacgccgagcugcuggugcugauggagaacgagagaacccuggacuuccacgacagcaacgugaagaaccuguacgacaaggugagacugcagcugagagacaacgccaaggagcugggcaacggcugcuucgaguucuaccacagaugcgacaacgagugcauggagagcgugagaaacggcaccuacgacuacccccaguacagcgaggaggccagacugaagagagaggagaucagcggcgugaagcuggagagcaucggcaccuaccagauccugagcaucuacagcaccguggccagcagccuggcccuggccaucaugguggccggccugagccuguggaugugcagcaacggcagccugcagugcagaaucugcaucuga

SEQ ID NO: 174064 - RNA, 1707 nt, Artificial Sequence
  derived and/or modified CDS sequence (opt4) from hemagglutinin__InfluenzaA__ABD73284
auggagaagaucgugcugcugcuggccaucgugagccuggugaagagcgaccagaucugcaucggcuaccacgccaacaacagcaccgagcagguggacaccaucauggagaagaacgugaccgugacccacgcccaggacauccuggagaagacccacaacggcaagcugugcgaccuggacggcgugaagccccugauccugagagacugcagcguggccggcuggcugcugggcaaccccaugugcgacgaguuccugaacgugcccgaguggagcuacaucguggagaagaucaaccccgccaacgaccugugcuaccccggcaacuucaacgacuacgaggagcugaagcaccugcugagcagaaucaaccacuucgagaagauccagaucauccccaagagcagcuggagcgaccacgaggccagcgccggcgugagcagcgccugccccuaccagggcagaagcagcuucuucagaaacgugguguggcugaucaagaaggacaacgccuaccccaccaucaagagaagcuacaacaacaccaaccaggaggaccugcuggugcuguggggcauccaccaccccaacgacgccgccgagcagaccagacuguaccagaaccccaccaccuacaucagcgugggcaccagcacccugaaccagagacuggugcccaagaucgccaccagaagcaaggugaacggccagagcggcagaauggaguucuucuggaccauccugaagcccaacgacgccaucaacuucgagagcaacggcaacuucaucgcccccgagaacgccuacaagaucgugaagaagggcgacagcaccaucaugaagagcgagcuggaguacggcaacugcaacaccaagugccagacccccaucggcgccaucaacagcagcaugcccuuccacaacauccacccccugaccaucggcgagugccccaaguacgugaagagcagcagacuggugcuggccaccggccugagaaacagcccccagggcgagagaagaagaaagaagagaggccuguucggcgccaucgccggcuucaucgagggcggcuggcagggcaugguggacggcugguacggcuaccaccacagcaacgagcagggcagcggcuacgccgccgacaaggagagcacccagaaggccaucgacggcgugaccaacaaggugaacagcaucaucgacaagaugaacacccaguucgaggccgugggcagagaguucaacaaccuggagagaagaaucgagaaccugaacaagaagauggaggacggcuuccuggacguguggaccuacaacgccgagcugcuggugcugauggagaacgagagaacccuggacuuccacgacagcaacgugaagaaccuguacgacaaggugagacugcagcugagagacaacgccaaggagcugggcaacggcugcuucgaguucuaccacagaugcgacaacgagugcauggagagcgugagaaacggcaccuacgacuacccccaguacagcgaggaggccagacugaagagagaggagaucagcggcgugaagcuggagagcaucggcaccuaccagauccugagcaucuacagcaccguggccagcagccuggcccuggccaucaugguggccggccugagccuguggaugugcagcaacggcagccugcagugcagaaucugcaucuga

SEQ ID NO: 174065 - RNA, 1695 nt, Artificial Sequence
  derived and/or modified CDS sequence (opt4) from hemagglutinin__InfluenzaA__ABF93440
auggagaagaucgugcugcugcuggccaucgugagccuggugaagagcgaccagaucugcaucggcuaccacgccaacaacagcaccgagcagguggacaccaucauggagaagaacgugaccgugacccacgcccaggacauccuggagaagacccacaacggcaagcugugcgaccuggacggcgugaagccccugauccugagagacugcagcguggccggcuggcugcugggcaaccccaugugcgacgaguuccugaacgugcccgaguggagcuacaucguggagaagaucaaccccgccaacgaccugugcuaccccggcaacuucaacgacuacgaggagcugaagcaccugcugagcagaaucaaccacuucgagaagauccagaucauccccaagagcagcuggagcgaccacgaggccagcagcggcgugagcagcgccugccccuaccagggcagaagcagcuucuucagaaacgugguguggcugaucaagaaggacaacgccuaccccaccaucaagagaagcuacaacaacaccaaccaggaggaccugcuggugcuguggggcauccaccaccccaacgacgccgccgagcagaccagacuguaccagaaccccaccaccuacaucagcgugggcaccagcacccugaaccagagacuggugcccaagaucgccaccagaagcaaggugaacggccagagcggcagaauggaguucuucuggaccauccugaagcccaacgacgccaucaacuucgagagcaacggcaacuucaucgcccccgagaacgccuacaagaucgugaagaagggcgacagcaccaucaugaagagcgagcuggaguacggcaacugcaacaccaagugccagacccccaucggcgccaucaacagcagcaugcccuuccacaacauccacccccugaccaucggcgagugccccaaguacgugaagagcaacagacuggugcuggccaccggccugagaaacagcccccagaucgagaccagaggccuguucggcgccaucgccggcuucaucgagggcggcuggcagggcaugguggacggcugguacggcuaccaccacagcaacgagcagggcagcggcuacgccgccgacaaggagagcacccagaaggccaucgacggcgugaccaacaaggugaacagcaucaucgacaagaugaacacccaguucgaggccgugggcagagaguucaacaaccuggagagaagaaucgagaaccugaacaagaagauggaggacggcuuccuggacguguggaccuacaacgccgagcugcuggugcugauggagaacgagagaacccuggacuuccacgacagcaacgugaagaaccuguacgacaaggugagacugcagcugagagacaacgccaaggagcugggcaacggcugcuucgaguucuaccacagaugcgacaacgagugcauggagagcgugagaaacggcaccuacgacuacccccaguacagcgaggaggccagacugaagagagaggagaucagcggcgugaagcuggagagcaucggcaccuaccagauccugagcaucuacagcaccguggccagcagccuggcccuggccaucaugguggccggccugagccuguggaugugcagcaacggcagccugcagugcagaaucugcaucuga

SEQ ID NO: 174066 - RNA, 1701 nt, Artificial Sequence
  derived and/or modified CDS sequence (opt4) from hemagglutinin__InfluenzaA__AKC45369
auggagaagaucgugcugcugcuggccguggugagccuggugaagagcgaccagaucugcaucggcuaccacgccaacaacagcaccgagcagguggacaccaucauggagaagaacgugaccgugacccacgcccaggacauccuggagaagacccacaacggcagacugugcgaccugaacggcgugaagccccugauccugaaggacugcagcguggccggcuggcugcugggcaaccccaugugcgacgaguucaucagagugcccgaguggagcuacaucguggagagagccaaccccgccaacgaccugugcuaccccggcaaccugaacgacuacgaggagcugaagcaccugcugagcagaaucaaccacuucgagaagacccugaucauccccaagagcagcuggcccaaccacaccagcagcggcgugagcgccgccugccccuaccagggcacccccagcuucuucagaaacgugguguggcugaccaagaagaacgacgccuaccccaccaucaagaugagcuacaacaacaccaacagagaggaccugcugauccuguggggcauccaccacagcaacaacgccgccgagcagaccaaccuguacaagaaccccaccaccuacgugagcgugggcaccagcacccugaaccagagacuggugcccaagaucgccaccagaagccaggugaacggccagagaggcagaauggacuucuucuggaccauccugaagcccaacgacgccauccacuucgagagcaacggcaacuucaucgcccccgaguacgccuacaagaucgugaagaagggcgacagcaccaucaugaagagcgagauggaguacggccacugcaacaccaagugccagacccccaucggcgccaucaacagcagcaugcccuuccacaacauccacccccugaccaucggcgagugccccaaguacgugaagagcaacaagcuggugcuggccaccggccugagaaacagcccccugagagagagaagaagaaagagaggccuguucggcgccaucgccggcuucaucgagggcggcuggcagggcaugguggacggcugguacggcuaccaccacagcaacgagcagggcagcggcuacgccgccgacagagagagcacccagaaggccaucgacggcgugaccaacaaggugaacagcaucaucgacaagaugaacacccaguucgaggccgugggcagagaguucaacaaccuggagagaagaaucgagaaccugaacaagaagauggaggacggcuuccuggacguguggaccuacaacgccgagcugcuggugcugauggagaacgagagaacccuggacuuccacgacagcaacgugaagaaccuguacgacaaggugagacugcagcugagagacaacgccaaggagcugggcaacggcugcuucgaguucuaccacaagugcgacaacgagugcauggagagcgugagaaacggcaccuacgacuacccccaguacagcgaggaggccagacugaagagagaggagaucagcggcgugaagcuggagagcaucggcaccuaccagauccugagcaucuacagcaccguggccagcagccuggcccuggccaucaucguggccggccugagccuguggaugugcagcaacggcagccugcagugcagaaucugcaucuga

SEQ ID NO: 174067 - RNA, 1704 nt, Artificial Sequence; identical to SEQ ID NO: 173018
  derived and/or modified CDS sequence (opt4) from hemagglutinin__InfluenzaA__AJS18479

SEQ ID NO: 174068 - RNA, 1704 nt, Artificial Sequence
  derived and/or modified CDS sequence (opt4) from hemagglutinin__InfluenzaA__EPI691378
auggagaagaucgugcugcugcuggccguggugagccuggugaagagcgaccagaucugcaucggcuaccacgccaacaacagcaccgagcagguggacaccaucauggagaagaacgugaccgugacccacgcccaggacauccuggagaagacccacaacggcagacugugcgaccugaacggcgugaagccccugauccugaaggacugcagcguggccggcuggcugcugggcaaccccaugugcgacgaguucaucagagugcccgaguggagcuacaucguggagagagccaaccccgccaacgaccugugcuaccccggcaaccugaacgacuacgaggagcugaagcaccugcugagcagaaucaaccacuucgagaagacccugaucauccccaagagcagcuggcccaaccacgagaccagccugggcgugagcgccgccugccccuaccagggcgugcccagcuucuucagaaacgugguguggcugaccaagaagaacgacgccuaccccaccaucaagaugagcuacaacaacaccaacagagaggaccugcugauccuguggggcauccaccacagcaacaacgccgccgagcagaccaaccuguacaagaaccccaccaccuacgugagcgugggcaccagcacccugaaccagagacuggugcccaagaucgccaccagaagccaggugaacggccagagaggcagaauggacuucuucuggaccauccugaagcccaacgacgccauccacuucgagagcaacggcaacuucaucgcccccgaguacgccuacaagaucgugaagaagggcgacagcaccaucaugaagagcgagauggaguacggccacugcaacaccaagugccagacccccaucggcgccaucaacagcagcaugcccuuccacaacauccacccccugaccaucggcgagugccccaaguacgugaagagcaacaagcuggugcuggccaccggccugagaaacagcccccugagagagagaagaagaaagagaggccuguucggcgccaucgccggcuucaucgagggcggcuggcagggcaugguggacggcugguacggcuaccaccacagcaacgagcagggcagcggcuacgccgccgacagagagagcacccagaaggccaucgacggcgugaccaacaaggugaacagcaucaucgacaagaugaacacccaguucgaggccgugggcagagaguucaacaaccuggagagaagaaucgagaaccugaacaagaagauggaggacggcuuccuggacguguggaccuacaacgccgagcugcuggugcugauggagaacgagagaacccuggacuuccacgacagcaacgugaagaaccuguacgacaaggugagacugcagcugagagacaacgccaaggagcugggcaacggcugcuucgaguucuaccacaagugcgacaacgagugcauggagagcgugagaaacggcaccuacgacuacccccaguacagcgaggaggccagacugaagagagaggagaucagcggcgugaagcuggagagcaucggcaccuaccagauccugagcaucuacagcaccguggccagcagccuggcccuggccaucaucguggccggccugagccuguggaugugcagcaacggcagccugcagugcagaaucugcaucuga

SEQ ID NO: 174069 - RNA, 1704 nt, Artificial Sequence
  derived and/or modified CDS sequence (opt4) from hemagglutinin__InfluenzaA__EPI533583
auggagaagaucgugcugcugcuggccaucgugagccuggugaagggcgaccagaucugcaucggcuaccacgccaacaacagcaccgagcagguggacaccaucauggagaagaacgugaccgugacccacgcccaggacauccuggagaagacccacaacggcaagcugugcgaccugaacggcgugaagccccugauccugaaggacugcagcguggccggcuggcugcugggcaaccccaugugcgacgaguucaucagagugcccgaguggagcuacaucguggagagagccaaccccgccaacgaccugugcuaccccggcaaccugaacgacuacgaggagcugaagcaccugcugagcagaaucaaccacuucgagaagauccugaucauccccaagagcagcuggaccaaccacgagaccagccugggcgugagcgccgccugccccuaccagggcacccccagcuucuucagaaacgugguguggcugaucaagaagaacgacgccuaccccaccaucaagaucagcuacaacaacaccaaccaggaggaccugcugauccuguggggcgugcaccacagcaacaacgccgccgagcagaccaaccuguacaagaaccccaccaccuacaucagcgugggcaccagcacccugaaccagagacuggugcccaagaucgccaccagaagccaggugaacggccagagaggcagaauggacuucuucuggaccauccugaagcccaacgacgccauccacuucgagagcaacggcaacuucaucgcccccgaguacgccuacaagaucgugaagaagggcgacagcaccaucaugaagagcgagauggaguacggccacugcaacaccaagugccagacccccaucggcgccaucaacagcagcaugcccuuccacaacauccacccccugaccaucggcgagugccccaaguacgugaagagcaacaagcuggugcuggccaccggccugagaaacagcccccugagagagaagagaagaaagagaggccuguucggcgccaucgccggcuucaucgagggcggcuggcagggcaugguggacggcugguacggcuaccaccacagcaacgagcagggcagcggcuacgccgccgacaaggagagcacccagaaggccaucgacggcgugaccaacaaggugaacagcaucaucgacaagaugaacacccaguucgaggccgugggcagagaguucaacaaccuggagagaagaaucgagaaccugaacaagaagauggaggacggcuuccuggacguguggaccuacaacgccgagcugcuggugcugauggagaacgagagaacccuggacuuccacgacagcaacgugaagaaccuguacgacaaggugagacugcagcugagagacaacgccaaggagcugggcaacggcugcuucgaguucuaccacaagugcgacaacaagugcauggagagcgugagaaacggcaccuacgacuacccccaguacagcgaggaggccagacugaagagagaggagaucagcggcgugaagcuggagagcaucggcaccuaccagauccugagcaucuacagcaccguggccagcagccuggcccuggccaucaucguggccggccugagccuguggaugugcagcaacggcagccugcagugcagaaucugcaucuga

SEQ ID NO: 174070 - RNA, 1701 nt, Artificial Sequence; identical to SEQ ID NO: 173031
  derived and/or modified CDS sequence (opt4) from hemagglutinin__InfluenzaA__AKS48023

SEQ ID NO: 174071 - RNA, 1701 nt, Artificial Sequence
  derived and/or modified CDS sequence (opt4) from hemagglutinin__InfluenzaA__EPI587621
auggagaagauggugcugcugcuggccgccgugagccuggugaagagcgaccagaucugcaucggcuaccacgccaacaacagcaccgagcagguggacaccaucauggagaagaacgugaccgugacccacgcccaggacauccuggagaagacccacaacggcagacugugcgaccugaacggcgugaagccccugauccugaaggacugcagcguggccggcuggcugcugggcaaccccaugugcgacgaguucaucagagugcccgaguggagcuacaucguggagagagccaaccccgccaacgaccugugcuaccccggcaaccugaacgacuacgaggagcugaagcaccugcugagcagaaucaaccacuucgagaagacccugaucauccccaagagcagcuggcccaaccacaccagcagcggcgugagcgccgccugccccuaccagggcaugcccagcuucuucagaaacgugguguggcugaccaagaagaacgacgccuaccccaccaucaagaugagcuacaacaacaccuacagagaggaccugcugauccuguggggcauccaccacagcaacaacgccgccgagcagaccaaccuguacaagaaccccaccaccuacgugagcgugggcaccagcacccugaaccagagacuggagcccaagaucgccaccagaagccaggugaacggccagagaggcagaauggacuucuucuggaccauccugaagcccaacgacgccauccacuucgagagcaacggcaacuucaucgcccccgaguacgccuacaagaucgugaagaagggcgacagcaccaucaugaagagcgagauggaguacggccacugcaacaccaagugccagacccccaucggcgccaucaacagcagcaugcccuuccacaacauccacccccugaccaucggcgagugccccaaguacgugaagagcaacaagcuggugcuggccaccggccugagaaacagcccccugagagagagaagaagaaagagaggccuguucggcgccaucgccggcuucaucgagggcggcuggcagggcaugguggacggcugguacggcuaccaccacagcaacgagcagggcagcggcuacgccgccgacagagagagcacccagaaggccaucgacggcgugaccaacaaggugaacagcaucaucgacaagaugaacacccaguucgaggccgugggcagagaguucaacaaccuggagagaagaaucgagaaccugaacaagaagauggaggacggcuuccuggacguguggaccuacaacgccgagcugcuggugcugauggagaacgagagaacccuggacuuccacgacagcaacgugaagaaccuguacgacaaggugagacugcagcugagagacaacgccaaggagcugggcaacggcugcuucgaguucuaccacaagugcgacaacgagugcauggagagcgugagaaacggcaccuacgacuacccccaguacagcgaggaggccagacugaagagagaggagaucagcggcgugaagcuggagagcaucggcaccuaccagauccugagcaucuacagcaccguggccagcagccuggcccuggccaucaucguggccggccugagccuguggaugugcagcaacggcagccugcagugcagaaucugcaucuga

SEQ ID NO: 174072 - RNA, 1704 nt, Artificial Sequence
  derived and/or modified CDS sequence (opt4) from hemagglutinin__InfluenzaA__AJE30333
auggagaagaucgugcugcugcuggccgugaucagccuggugaagagcgaccagaucugcaucggcuaccacgccaacaacagcaccaagcagguggacaccaucauggagaagaacgugaccgugacccacgcccaggacauccuggagaagacccacaacggcaagcugugcgaccugaacggcgugaagccccugauccugaaggacugcagcguggccggcuggcugcugggcaaccccaugugcgacgaguucaucagagugcccgaguggagcuacaucguggagagagccaaccccgccaacgaccugugcuaccccggcacccugaacgacuacgaggagcugaagcaccugcugagcagaaucaaccacuucgagaagacccugaucauccccagaagcagcuggcccaaccacgagaccagccugggcgugagcgccgccugccccuaccagggcgccagcagcuucuucagaaacgugguguggcugaucaagaagaacgacgccuaccccaccaucaagaucagcuacaacaacaccaacagagaggaccugcugauccuguggggcauccaccacagcaacaacgccgccgagcagaccaaccuguacaagaaccccgacaccuacgugagcgugggcaccagcacccugaaccagagacuggugcccaagaucgccaccagaagccaggugaacggccagagcggcagaauggacuucuucuggaccauccugaagcccaacgacgccauccacuucgagagcaacggcaacuucaucgcccccgaguacgccuacaagaucgugaagaagggcgacagcaccaucaugaagagcgagauggaguacggccacugcaacaccaagugccagacccccaucggcgccaucaacagcagcaugcccuuccacaacauccacccccugaccaucggcgagugccccaaguacgugaagagcaacaagcuggugcuggccaccggccugagaaacagcccccugagagagagaagaagaaagagaggccuguucggcgccaucgccggcuucaucgagggcggcuggcagggcaugguggacggcugguacggcuaccaccacagcaacgagcagggcagcggcuacgccgccgacaaggagagcacccagaaggccaucgacggcgugaccaacaaggugaacagcaucaucgacaagaugaacacccaguucgaggccgugggcagagaguucaacaaccuggagagaagaaucgagaaccugaacaagaagauggaggacggcuuccuggacguguggaccuacaacgccgagcugcuggugcugauggagaacgagagaacccuggacuuccacgacagcaacgugaagaaccuguacgacaaggugagacugcagcugagagacaacgccaaggagcugggcaacggcugcuucgaguucuaccacaagugcgacaacgagugcauggagagcgugagaaacggcaccuacgacuaccccaaguacagcgaggaggccauccugaagagagaggagaucagcggcgugaagcuggagagcaucggcaccuaccagauccugagcaucuacagcaccguggccagcagccuggcccuggccaucaucguggccggccugagccuguggaugugcagcaacggcagccugcagugcagaaucugcaucuga

SEQ ID NO: 174073 - RNA, 1704 nt, Artificial Sequence
  derived and/or modified CDS sequence (opt4) from hemagglutinin__InfluenzaA__EPI459855
augaucgccaucguggugaucgccauccuggccagcgccggcaagagcgacaagaucugcaucggcuaccacgccaacaacagcaccacccagguggacacccugcuggagaagaacgugaccgugacccacagcguggagcugcuggagaaccagaaggagaagagauucugcaagaucaugaacaaggccccccuggaccugaaggacugcaccaucgagggcuggauccugggcaaccccaagugcgaccugcugcugggcgaccagagcuggagcuacaucguggagagacccaacgcccagaacggcaucugcuaccccggcgugcugaacgagcuggaggagcugaaggccuucaucggcagcggcgagagaguggagagauucgagauguuccccaagagcaccugggccggcguggacaccagcagaggcgugaccaacgccugccccagcuacaccaucgacagcagcuucuacagaaaccugguguggaucgugaagaccgacagcgccaccuaccccgugaucaagggcaccuacaacaacaccggcacccagcccauccuguacuucuggggcgugcaccacccccuggacaccaccgugcaggacaaccuguacggcagcggcgacaaguacgugagaaugggcaccgagagcaugaacuucgccaagagccccgagaucgccgccagacccgccgugaacggccagagaagcagaaucgacuacuacuggagcgugcugagacccggcgagacccugaacguggagagcaacggcaaccugaucgcccccugguacgccuacaaguucgugagcaccaacaagaagggcgccguguucaagagcgaccugcccaucgagaacugcgacgccaccugccagaccaucaccggcgugcugagaaccaacaagaccuuccagaacgugagcccccuguggaucggcgagugccccaaguacgugaagagcgagagccugagacuggccaccggccugagaaacgugccccagaucgccaccagaggcaucuucggcgccaucgccggcuucaucgagggcggcuggaccggcaugaucgacggcugguacggcuaccaccacgagaacagccagggcagcggcuacgccgccgacagagagagcacccagaaggccaucgacggcaucaccaacaaggugaacagcaucaucaacaagaugaacacccaguucgaggccguggaccacgaguucagcaaccuggagagaagaaucggcaaccugaacaagagaauggaggacggcuuccuggacguguggaccuacaacgccgagcugcuggugcugcuggagaacgagagaacccuggaccugcacgacgccaacgugaagaaccuguacgagaaggugaagagccagcugagagacaacgccaacgaccugggcaacggcugcuucgaguucuggcacaagugcgacaacgagugcauggagagcgugaagaacggcaccuacgacuaccccaaguaccagaaggagagcaagcugaacagacagggcaucgagagcgugaagcuggagaaccugggcguguaccagauccuggccaucuacagcaccgugagcagcagccuggugcuggugggccugaucauggccaucggccuguggaugugcagcaacggcagcaugcagugcagaaucugcaucuga

SEQ ID NO: 174074 - RNA, 1704 nt, Artificial Sequence; identical to SEQ ID NO: 174073
  derived and/or modified CDS sequence (opt4) from hemagglutinin__InfluenzaA__EPI459855/m1

SEQ ID NO: 174075 - RNA, 1692 nt, Artificial Sequence
  derived and/or modified CDS sequence (opt4) from hemagglutinin__InfluenzaA__ACZ36872
augaacacccagauccugguguucgcccugguggccgugauccacaccaacgccgacaagaucugccugggccaccacgccgugagcaacggcaccaaggugaacacccugaccgagagaggcguggagguggugaacgccaccgagaccguggagagaaccaacauccccaagaucugcagcaagggcaagagaaccguggaccugggccagugcggccugcugggcaccaucaccggccccccccagugcgaccaguuccuggaguucagcgccgaccugaucaucgagagaagagacggcaacgacgugugcuaccccggcaaguucgugaacggcgaggcccugagacagauccugagaaagagcggcggcaucaacaaggagaccaugggcuucaccuacagcggcaucagaaccaacggcaccaccagcgccugcagaagaagcggcagcagcuucuacgccgagaugaaguggcugcugagcgacaccgacaacgccgccuucccccagaugaccaagagcuacaagaacaccagaagagagcccgcccugaucguguggggcauccaccacagcggcagcaccaccgagcagaccaagcuguacggcagcggcaacaagcuggugaccgugggcagcagcaaguaccagcagagcuucgugcccagccccggcaccagaccccaggugaacggccagagcggcagaaucgacuuccacuggcugauccuggacagcaacgacaccgugaccuucagcuucaacggcgccuucaucgcccccgacagagccagcuuccugaagggcaagagcaugggcauccagagcgacgugcagguggacgccaacugcgagggcgagugcuaccacagcggcggcaccaucaccagcagccugcccuuccagaacaucaacagcagagccgugggcaagugccccagauacgugaagcaggagagccugcugcuggccaccggcaugaagaacgugcccgagcugcccaagaagagaagaaagagaggccuguucggcgccaucgccggcuucaucgagaacggcugggagggccugguggacggcugguacggcuucagacaccagaacgcccagggcgagggcaccgccgccgacuacaagagcacccagagcgccaucgaccagaucaccggcaagcugaacagacugaucgagaagaccaaccagcaguucgagcugaucgacaacgaguucaccgagguggagaagcagaucggcaacgugaucaacuggaccagagacagcaucaccgagguguggagcuacaacgccgagcugcugguggccauggagaaccagcacaccaucgaccuggccgacagcgagaugaacaagcuguacgagagagugagaaagcagcugagagagaacgccgaggaggacggcaccggcugcuucgagaucuuccacaagugcgacgacgacugcauggccagcaucagaaacaacaccuacgaccacagcaaguacagagaggaggccaugcagaacagaauccagaucgaccccgugaagcugagcggcggcuacaaggacgugauccugugguucagcuucggcgccagcugcuuccugcugcuggccaucgccaugggccugguguucaucugcgugaagaacggcaacaugagaugcaccaucugcaucuga

SEQ ID NO: 174076 - RNA, 1692 nt, Artificial Sequence
  derived and/or modified CDS sequence (opt4) from hemagglutinin__InfluenzaA__AGB51388
augaacacccagauccugguguucgcccugguggccgugauccacaccaacgccgacaagaucugccugggccaccacgccgugagcaacggcaccaaggugaacacccugaccgagagaggcguggagguggugaacgccaccgagaccguggagagaaccaacauccccaagaucugcagcaagggcaagagaaccguggaccugggccagugcggccugcugggcaccaucaccggccccccccagugcgaccaguuccuggaguucagcgccgaccugaucaucgagagaagagacggcaacgacgugugcuaccccggcaaguucgugaacggcgaggcccugagacagauccugagaaagagcggcggcaucaacaaggagaccaugggcuucaccuacagcggcaucagaaccaacggcaccaccagcgccugcagaagaagcggcagcagcuucuacgccgagaugaaguggcugcugagcgacaccgacaacgccgccuucccccagaugaccaagagcuacaagaacaccagaagagagcccgcccugaucguguggggcauccaccacagcggcagcaccaccgagcagaccaagcuguacggcagcggcaacaagcuggugaccgugggcagcagcaaguaccagcagagcuucgugcccaaccccgagaccagaccccaggugaacggccagagcggcagaaucgacuuccacuggcugauccuggacagcaacgacaccgugaccuucagcuucaacggcgccuucaucgcccccgacagagccagcuuccugaagggcaagagcaugggcauccagagcgacgugcagguggacgccaacugcgagggcgagugcuaccacagcggcggcaccaucaccagcagccugcccuuccagaacaucaacagcagagccgugggcaagugccccagauacgugaagcaggagagccugcugcuggccaccggcaugaagaacgugcccgagcugcccaagaagagaagaaagagaggccuguucggcgccaucgccggcuucaucgagaacggcugggagggccugguggacggcugguacggcuucagacaccagaacgcccagggcgagggcaccgccgccgacuacaagagcacccagagcgccaucgaccagaucaccggcaagcugaacagacugaucgagaagaccaaccagcaguucgagcugaucgacaacgaguucaccgagguggagaagcagaccggcaacgugaucaacuggaccagagacagcaucaccgagguguggagcuacaacgccgagcugcugguggccauggagaaccagcacaccaucgaccuggccgacagcgagaugaacaagcuguacgagagagugagaaagcagcugagagagaacgccgaggaggacggcaccggcugcuucgagaucuuccacaagugcgacgacgacugcauggccagcaucagaaacaacaccuacgaccacagcaaguacagagaggaggccaugcagaacagaauccagaucgaccccgugaagcugagcggcggcuacaaggacgugauccugugguucagcuucggcgccagcugcuuccugcugcuggccaucgccaugggccugguguucaucugcgugaagaacggcaacaugagaugcaccaucugcaucuga

SEQ ID NO: 174077 - RNA, 1683 nt, Artificial Sequence; identical to SEQ ID NO: 170048
  derived and/or modified CDS sequence (opt4) from hemagglutinin__InfluenzaA__EPI439507

SEQ ID NO: 174078 - RNA, 1704 nt, Artificial Sequence
  derived and/or modified CDS sequence (opt4) from hemagglutinin__InfluenzaA__EPI164216
auggagaagaucgugcugcugcuggccaucgugagccuggugaagagcgaccagaucugcaucggcuaccacgccaacaacagcaccgagcagguggacaccaucauggagaagaacgugaccgugacccacgcccaggacauccuggagaagacccacaacggcaagcugugcgaccuggacggcgugaagccccugauccugagagacugcagcguggccggcuggcugcugggcaaccccaugugcgacgaguucaucaacgugcccgaguggagcuacaucguggagaaggccaaccccgccaacgaccugugcuaccccggcaacuucaacgacuacgaggagcugaagcaccugcugagcagaaucaaccacuucgagaagauccagaucauccccaagagcagcuggagcgaccacgaggccagcagcggcgugagcagcgccugccccuaccagggcacccccagcuucuucagaaacgugguguggcugaucaagaagaacaacaccuaccccaccaucaagagaagcuacaacaacaccaaccaggaggaccugcugauccuguggggcauccaccacagcaacgacgccgccgagcagaccaagcuguaccagaaccccaccaccuacaucagcgugggcaccagcacccugaaccagagacuggugcccaagaucgccaccagaagcaaggugaacggccagagcggcagaauggacuucuucuggaccauccugaagcccaacgacgccaucaacuucgagagcaacggcaacuucaucgcccccgaguacgccuacaagaucgugaagaagggcgacagcgccaucgugaagagcgagguggaguacggcaacugcaacaccaagugccagacccccaucggcgccaucaacagcagcaugcccuuccacaacauccacccccugaccaucggcgagugccccaaguacgugaagagcaacaagcuggugcuggccaccggccugagaaacagcccccugagagagagaagaagaaagagaggccuguucggcgccaucgccggcuucaucgagggcggcuggcagggcaugguggacggcugguacggcuaccaccacagcaacgagcagggcagcggcuacgccgccgacaaggagagcacccagaaggccaucgacggcgugaccaacaaggugaacagcaucaucgacaagaugaacacccaguucgaggccgugggcagagaguucaacaaccuggagagaagaaucgagaaccugaacaagaagauggaggacggcuuccuggacguguggaccuacaacgccgagcugcuggugcugauggagaacgagagaacccuggacuuccacgacagcaacgugaagaaccuguacgacaaggugagacugcagcugagagacaacgccaaggagcugggcaacggcugcuucgaguucuaccacaagugcgacaacgagugcauggagagcgugagaaacggcaccuacgacuacccccaguacagcgaggaggccagacugaagagagaggagaucagcggcgugaagcuggagagcaucggcaccuaccagauccugagcaucuacagcaccguggccagcagccuggcccuggccaucaugguggccggccugagccuguggaugugcagcaacggcagccugcagugcagaaucugcaucuga

SEQ ID NO: 174079 - RNA, 1683 nt, Artificial Sequence; identical to SEQ ID NO: 172411
  derived and/or modified CDS sequence (opt4) from hemagglutinin__InfluenzaA__EPI486492

SEQ ID NO: 174080 - RNA, 1683 nt, Artificial Sequence
  derived and/or modified CDS sequence (opt4) from hemagglutinin__InfluenzaA__EPI740738
augaacacccagauccugguguucgcccugaucgccaucauccccaccaacgccgacaagaucugccugggccaccacgccgugagcaacggcaccaaggugaacacccugaccgagagaggcguggagguggugaacgccaccgagaccguggagagaaccaacauccccagaaucugcagcaagggcaagagaaccguggaccugggccagugcggccugcugggcaccaucaccggccccccccagugcgaccaguuccuggaguucagcgccgaccugaucaucgagagaagagagggcagcgacgugugcuaccccggcaaguucgugaacgaggaggcccugagacagauccugagagagagcggcggcaucgacaaggagaccaugggcuucaccuacagcggcaucagaaccaacggcgugaccagcgccugcaagagaagcggcagcagcuucuacgccgagaugaaguggcugcugagcaacaccgacaacgccgccuucccccagaugaccaagagcuacaagaacaccagaaagagccccgccaucaucguguggggcauccaccacagcgugagcaccgccgagcagaccaagcuguacggcagcggcaacaagcuggugaccgugggcagcagcaacuaccagcagagcuucgugcccagccccggcgccagaccccaggugaacggccugagcggcagaaucgacuuccacuggcugauccugaaccccaacgacaccgugaccuucagcuucaacggcgccuucaucgcccccgacagagccagcuuccugagaggcaagagcaugggcauccagagcggcgugcagguggacgccaacugcgagggcgacugcuaccacagcggcggcaccaucaucagcaaccugcccuuccagaacaucgacagcagagccgugggcaagugccccagauacgugaagcagagaagccugcugcuggccaccggcaugaagaacgugcccgagauccccaagggcagaggccuguucggcgccaucgccggcuucaucgagaacggcugggagggccugaucgacggcugguacggcuucagacaccagaacgcccagggcgagggcaccgccgccgacuacaagagcacccagagcgccaucgaccagaucaccggcaagcugaacagacugaucgccaagaccaaccagcaguucgagcugaucgacaacgaguucaacgagguggagaagcagaucggcaacgugaucaacuggaccagagacagcaucaccgagguguggagcuacaacgccgagcugcugaucgccauggagaaccagcacaccaucgaccuggccgacagcgagauggacaagcuguacgagagagugaagagacagcugagagagaacgccgaggaggacggcaccggcugcuucgagaucuuccacaagugcgacgacgacugcauggccagcaucagaaacaacaccuacgaccacagaaaguacagagaggaggccaugcagaacagaauccagaucgaccccgugaagcugagcagcggcuacaaggacgugauccugugguucagcuucggcgccagcugcuucauccugcuggccaucgugaugggccugguguucaucugcgugaagaacggcaacaugagaugcaccaucugcaucuga

SEQ ID NO: 174081 - RNA, 1683 nt, Artificial Sequence
  derived and/or modified CDS sequence (opt4) from hemagglutinin__InfluenzaA__EPI730495
augaacauccagauccugguguucgcccugaucgccaucauccccaccgacgccgacaagaucugccugggccaccacgccgugagcaacggcaccaaggugaacacccugaccgagagaggcguggagguggugaacgccaccgagaccguggagagaaccaacauccccagaaucugcagcaagggcaagagaaccguggaccugggccagugcggccugcugggcaccaucaccggccccccccagugcgaccaguuccuggaguucagcgccgaccugaucaucgagagaagagagggcagcgacgugugcuaccccggcaaguucgugaacgaggaggcccugagacagauccugagaaagagcggcggcaucgacaaggaggccaugggcuucaccuacagcggcaucagaaccaacggcgccaccagcgccugcagaagaagcggcagcagcuucuacgccgagaugaaguggcugcugagcaacaccgacaacgccgccuucccccagaugaccaagagcuacaagaacaccagaaagagccccgccaucaucguguggggcauccaccacagcgugagcaccgccgagcagaccaagcuguacggcagcggcagcaagcuggugaccgugggcagcagcaacuaccagcagagcuucgugcccagccccggcgccagaccccaggugaacggccugagcggcagaaucgacuuccacuggcugauccugaaccccaacgacaccgugaccuucagcuucaacggcgccuucaucgcccccgacagagccagcuuccugagaggcaagagcaugggcauccagagcggcgugcagguggacgccgacugcgagggcgacugcuaccacagcggcggcaccaucaucagcaaccugcccuuccagaacaucgacagcagagccgugggcaagugccccagauacgugaagcagagaagccugcugcuggccaccggcaugaagaacgugcccgagauccccaagggcagaggccuguucggcgccaucgccggcuucaucgagaacggcugggagggccugaucgacggcugguacggcuucagacaccagaacgcccagggcgagggcaccgccgccgacuacaagagcacccagagcgccaucgaccagaucaccggcaagcugaacagacugaucgagaagaccaaccagcaguucgagcugaucgacaacgaguucaucgagguggagaagcagaucggcaacgugaucaacuggaccagagacagcaucaccgagguguggagcuacaacgccgagcugcugguggccauggagaaccagcacaccaucgaccuggccgacagcgagauggacaagcuguacgagagagugaagagacagcugagagagaacgccgaggaggacggcaccggcugcuucgagaucuuccacaagugcgacgacgacugcauggccagcaucagaaacaacaccuacgaccacagcaaguacagagaggaggccaugcagaacagaauccagaucgaccccgugaagcugagcagcggcuacaaggacgugauccugugguucagcuucggcgccagcugcuucauccugcccgccaucgugaugggccugguguucaugugcgugaagaacggcaacaugagaugcaccaucugcaucuga

SEQ ID NO: 174082 - RNA, 1683 nt, Artificial Sequence
  derived and/or modified CDS sequence (opt4) from hemagglutinin__InfluenzaA__EPI712926
augaacacccagauccugguguucgcccugaucgccaucauccccaccaacgccgacaagaucugccugggccaccacgccgugagcaacggcaccaaggugaacacccugaccgagagaggcguggagguggugaacgccaccgagaccguggagagaaccaacauccccagaaucugcagcaagggcaagagaaccguggaccugggccagugcggccugcugggcaccaucaccggccccccccagugcgaccaguuccuggaguucagcgccgaccugaucaucgagagaagagagggcagcgacgugugcuaccccggcaaguucgugaacgaggaggcccugagacagauccugagagagagcggcggcaucgacaaggagaccaugggcuucaccuacaacggcaucagaaucaacggcgugaccagcgccugcaagagaagcggcagcagcuucuacgccgagaugaaguggcugcugagcaacaccgacaacgccgccuucccccagaugaccaagagcuacaagaacaccagaaagagccccgccaucaucguguggggcauccaccacagcgugagcaccgccgagcagaccaagcuguacggcagcggcaacaagcuggugaccgugggcagcagcaacuaccagcagagcuucgugcccagccccggcgccagaccccaggugaacggccugagcggcagaaucgacuuccacuggcugauccugaaccccaacgacaccgugaccuucagcuucaacggcgccuucaucgcccccgacagagccagcuuccugagaggcaagagcaucggcauccagagcggcgugcagguggacgccaacugcgagggcgacugcuaccacagcggcggcaccaucaucagcaaccugcccuuccagaacaucgacagcagagccgugggcaagugccccagauacgugaagcagagaagccugcugcuggccaccggcaugaagaacgugcccgagauccccaagggcagaggccuguucggcgccaucgccggcuucaucgagaacggcugggagggccugaucgacggcugguacggcuucagacaccagaacgcccagggcgagggcaccgccgccgacuacaagagcacccagagcgccaucgaccagaucaccggcaagcugaacagacugaucgccaagaccaaccagcaguucgagcugaucgacaacgaguucaacgagguggagaagcagaucggcaacgugaucaacuggaccagagacagcaucaccgagguguggagcuacaacgccgagcugcugaucgccauggagaaccagcacaccaucgaccuggccgacagcgagauggacaagcuguacgagagagugaagagacagcugagagagaacgccgaggaggacggcaccggcugcuucgagaucuuccacaagugcgacgacgacugcauggccagcaucagaaacaacaccuacgaccacagaaaguacagagaggaggccaugcagaacagaauccagaucgaccccgugaagcugagcagcggcuacaaggacgugauccugugguucagcuucggcgccagcugcuucauccugcuggccaucgugaugggccugguguucaucugcgugaagaacggcaacaugagaugcaccaucugcaucuga

SEQ ID NO: 174083 - RNA, 1683 nt, Artificial Sequence; identical to SEQ ID NO: 170048
  derived and/or modified CDS sequence (opt4) from hemagglutinin__InfluenzaA__AGL44438

SEQ ID NO: 174084 - RNA, 1683 nt, Artificial Sequence
  derived and/or modified CDS sequence (opt4) from hemagglutinin__InfluenzaA__EPI445996
auggagaccgugagccugaugaccauccugcugcuggugaccaccagcaacgccgacaagaucugcaucggccaccagagcaccaacagcaccgagaccguggacacccugaccgagaccaacgugcccgugacccacgccaaggagcugcugcacaccgaccacaacggcaugcugugcgccaccaaccugggccacccccugauccuggacaccugcaacguggagggccugaucuacggcaaccccagcugcgaccugcugcugggcggcagagaguggagcuacaucguggagagacccagcgccgugaacggcaccugcuaccccggcaacguggagaaccuggaggagcugagaacccuguucagcagcagcagcagcuaccagagaauccagaucuuccccgacaccaucuggaacgugaccuacaccggcaccagcaagagcugcagcgacagcuucuacagaaacaugagauggcugacccagaagaacggccuguaccccgugcaggacgcccaguucaccaacaacagaggcaaggacauccuguucguguggggcauccaccacccccccaccgacaccgcccagaccaaccuguacaccagaaccgacaccaccaccagcgugaccaccgagaaccuggacagaaccuucaagccccugaucggccccagaccccuggugaacggccugaucggcagaaucaacuacuacuggagcgugcugaagcccggccagacccugagagugagaagcaacggcaaccugaucgcccccugguacggccacgugcugagcggcgagagccacggcagaauccugaagaccaaccugaacagcggcaacugcguggugcagugccagaccgagaagggcggccugaacagcacccugcccuuccacaacaucagcaaguacgccuucggcaacugccccaaguacaucggcgugaagagccugaagcuggccaucggccugagaaacgugcccgccaagagcagcagaggccuguucggcgccaucgccggcuucaucgagggcggcuggcccggccugguggccggcugguacggcuuccagcacagcaacgaccagggcgugggcaucgccgccgacagagugagcacccagaaggccguggacaagaucaccagcaaggugaacaacaucguggacaagaugaacaagcaguacgagaucaucgaccacgaguucagcgagguggagaccagacugaacaugaucaacaacaagaucgacgaccagauccaggacgugugggccuacaacgccgagcugcuggugcugcuggagaaccagaagacccuggacgagcacgacgccaacgugaacaaccuguacaacaaggugaagagagcccugggcagcaacgcccuggaggacggcaagggcugcuucgagcuguaccacaagugcgacgaccagugcauggagaccaucagaaacggcaccuacaacagaagaaaguaccaggaggagagcagacuggagagacagaagaucgagggcaucaagcuggagagcgagggcaccuacaagauccugaccaucuacagcaccguggccagcagccuggugcuggccaugggcuucgccgccuuccuguucugggccaugagcaacggcagcugcagaugcaacaucugcaucuga

SEQ ID NO: 174085 - RNA, 1695 nt, Artificial Sequence
  derived and/or modified CDS sequence (opt4) from hemagglutinin__InfluenzaA__EPI433309
auggagaagaucgugcugcugcuggccaucgccagccuggugaagagcgaccagaucugcaucggcuaccacgccaacaacagcaccgagcagguggacaccaucauggagaagaacgugaccgugacccacgcccaggacauccuggagaagacccacaacggcaagcugugcgaccuggacggcgugaagccccugauccugagagacugcagcguggccggcuggcugcugggcaaccccaugugcgacaaguucaacgacgugcccgaguggagcuacaucguggagaaggccaaccccgccaacgaccugugcuaccccggcaaccugaacgacuacgaggagcugaagcaccugcugagcagaaucaaccacuucgagaagauccagaccuuccccaagagcagcuggagcgaccacgaggccagccugggcgugagcgccgccugccccuaccagggcaugcccagcuucuucagaaacgugguguggcugaucaagaagaacaacaccuaccccaccaucaagagcagcuacaacaacaccaaccaggaggaccugcugauccuguggggcauccaccacagcaacgacgaggccgagcagaccagacuguaccagaacagcaacaccuacaucagcgugggcaccagcacccugaaccagagacuggugcccaagaucgccaccagaagcaaggugaacggccagagcggcagaauggacuucuucuggaccauccugaagcccaacgacgccaucaacuucgagagcaacggcaacuucaucgcccccgaguacgccuacaagaucgugaagaagggcgacagcgccaucaugaagagcgaggugggcuacggcgacugcaacaccaagugccagacccccaucggcgccaucaacagcagcaugcccuuccacaacauccacccccugaccaucggcgagugccccaaguacgugaagagcaacaagcuggugcuggccaccggccugagaaacagcccccagaucgagaccagaggccuguucggcgccaucgccggcuucaucgagggcggcuggcagggcaugguggacggcugguacggcuaccaccacagcaacgagcagggcagcggcuacgccgccgacaaggagagcacccagaaggccaucgacggcgugaccaacaaggugaacagcaucaucgacaagaugaacacccaguucgaggccguggagagagaguucaacaaccuggagagaagaaucgagaaccugaacaagaagauggaggacggcuuccuggacguguggaccuacaacgccgagcugcuggugcugauggagaacgagagaacccuggacuuccacgacagcaacgugaagaaccuguacgacaaggugagacugcagcugagagacaacgccaaggagcugggcaacggcugcuucgaguucuaccacaagugcgacaacgagugcauggagagcgugagaaacggcaccuacgacuacccccaguacagcgaggaggccagacugaagagagaggagaucagcggcgugaagcuggagagcaucggcaccuaccagauccugagcaucuacagcaccguggccagcagccuggcccuggccaucaugguggccggccugagccuguggaugugcagcaacggcagccugcagugcagaaucugcaucuga

SEQ ID NO: 174086 - RNA, 1683 nt, Artificial Sequence
  derived and/or modified CDS sequence (opt4) from hemagglutinin__InfluenzaA__EPI470859
auggaggccaucccccugaucaccauccugcugguggugaccgccagcaacgccgacaagaucugcaucggcuaccagagcaccaacagcaccgagaccguggacacccugaccgagaacaacgugcccgugacccacgccaaggagcugcugcacaccgagcacaacggcaugcugugcgccaccaaccugggcagaccccugauccuggacaccugcaccaucgagggccugaucuacggcaaccccagcugcgaccugcugcugggcggcagagaguggagcuacaucguggagagacccagcgccgugaacggcaugugcuaccccggcaacguggagaaccuggaggagcugagaagcuucuucagcagcgccagcagcuaccagagaauccagaucuuccccgacaccaucuggaacgugagcuacagcggcaccagcaaggccugcagcgacagcuucuacagaagcaugagauggcugacccagaagaacaacgccuaccccauccaggacgcccaguacaccaacaacagaggcaagagcauccuguucauguggggcaucaaccacccccccaccgacaccgcccagaccaaccuguacaccagaaccgacaccaccaccagcguggccaccgaggacaucaacagaaccuucaagcccgugaucggccccagaccccuggugaacggccugcagggcagaaucgacuacuacuggagcgugcugaagcccggccagacccugagagugagaagcaacggcaaccugaucgcccccugguacggccacauccugagcggcgagagccacggcagaauccugaagaccgaccugaacagcggcagcugcguggugcagugccagaccgagagaggcggccugaacaccacccugcccuuccacaacgugagcaaguacgccuucggcaacugccccaaguacgugggcgugaagagccugaagcuggccgugggccugagaaacgugcccgccagaagcagcagaggccuguucggcgccaucgccggcuucaucgagggcggcuggagcggccugguggccggcugguacggcuuccagcacagcaacgaccagggcgugggcaucgccgccgacagagacagcacccagagagccaucgacaagaucaccagcaaggugaacaacaucguggacaagaugaacaagcaguacgagaucaucgaccacgaguucagcgagguggagaacagacugaacaugaucaacaacaagaucgacgaccagauccaggacaucugggccuacaacgccgagcugcuggugcugcuggagaaccagaagacccuggacgagcacgacgccaacgugaacaaccuguacaacaaggugaagagagcccugggcagcaacgccauggaggacggcaagggcugcuucgagcuguaccacaagugcgacgaccagugcauggagaccaucagaaacggcaccuacaacagaagaaaguacaaggaggagagcagacuggagagacagaagaucgagggcgugaagcuggagagcgagggcaccuacaagauccugaccaucuacagcaccguggccagcagccuggugaucgccaugggcuucgccgccuuccuguucugggccaugagcaacggcagcugcagaugcaacaucugcaucuga

SEQ ID NO: 174087 - RNA, 1683 nt, Artificial Sequence
  derived and/or modified CDS sequence (opt4) from hemagglutinin__InfluenzaA__EPI498037
auggagaccgugagccugaucaccauccugcugguggccaccgugagcaacgccgacaagaucugcaucggcuaccagagcaccaacagcaccgagaccguggacacccugaccgagaacaacgugcccgugacccacgccaaggagcugcugcacaccgagcacaacggcaugcugugcgccaccagccugggccagccccugauccuggacaccugcaccaucgagggccugaucuacggcaaccccagcugcgaccugcugcuggagggcagagaguggagcuacaucguggagagacccagcgccgugaacggccugugcuaccccggcaacguggagaaccuggaggagcugagaagccuguucagcagcgccagaagcuaccagagaauccagaucuuccccgacaccaucuggaacgugagcuacaacggcaccagcaaggccugcagcggcagcuucuacagaagcaugagauggcugaccagaaagaacggcgacuaccccauccaggacgugcaguacaccaacaaccagggcaagaacauccuguucauguggggcaucaaccacccccccaccgacaccacccagagagaccuguacaccagaaccgacaccaccaccagcguggccaccgaggagaucaacagaaucuucaagccccugaucggccccagaccccuggugaacggccugaugggcagaaucgacuacuacuggagcgugcugaagcccggccagacccugagaaucaagagcgacggcaaccugaucgcccccugguacggccacauccugagcggcgagagccacggcagaauccugaagaccgaccugaagagaggcagcugcaccgugcagugccagaccgagaagggcggccugaacaccacccugcccuuccagaacgugagcaaguacgccuucggcaacugcagcaaguacaucggcaucaagagccugaagcuggccgugggccugagaaacgugcccagcagaagcagcagaggccuguucggcgccaucgccggcuucaucgagggcggcuggagcggccugguggccggcugguacggcuuccagcacagcaacgaccagggcgugggcauggccgccgacagagacagcacccagaaggccaucgacaagaucaccagcaaggugaacaacaucguggacaagaugaacaagcaguacgagaucaucgaccacgaguucagcgagguggagaccagacugaacaugaucaacaacaagaucgacgaccagauccaggacaucugggccuacaacgccgagcugcuggugcugcuggagaaccagaagacccuggacgagcacgacgccaacgugaacaaccuguacaacaaggugaagagagcccugggcagcaacgccguggaggacggcaagggcugcuucgagcuguaccacaagugcgacaaccagugcauggagaccaucagaaacggcaccuacaacaagagaaaguaccaggaggagagcaagcuggagagacagaagaucgagggcgugaagcuggagagcgagggcaccuacaagauccugaccaucuacagcaccguggccagcagccuggugaucgccaugggcuucgccgccuuccuguucugggccaugagcaacggcagcugcagaugcaacaucugcaucuga

SEQ ID NO: 174088 - RNA, 1683 nt, Artificial Sequence
  derived and/or modified CDS sequence (opt4) from hemagglutinin__InfluenzaA__AGO17847
auggagaccaucagccugaugaccauccugcugaucaccaccgccagcaacgccgacaagaucugcaucggccaccagagcaccaacagcaccgagaccguggacacccugaccgagaccaacgugcccgugacccacgccaaggagcugcugcagaccgagcacaacggcaugcugugcgccaccaaccugggccacccccugauccuggacaccugcaccaucgagggccugaucuacggcaaccccagcugcgaccugcugcuggagggcagagaguggagcuacaucguggagagacccagcgccgugaacggcaccugcuaccccggcaacguggagaaccuggaggagcugagaacccuguucagcagcgccagcagcuaccagagaauccagaucuuccccgacaccaccuggaacgugaccuacaccggcaccagcagaagcugcagcggcagcuucuacagaagcaugagauggcugacccagaagagcggcuucuaccccgugcaggacgccaaguacaccaacaacagaggcaagaacauccuguucguguggggcauccaccacccccacaccuacaccgaccagaccacccuguacaucagaaacgacaccaccaccagcgugaccaccgaggagcugaacagaaucuucaagcccgugaucgugcccagacugcuggugaacggccagcagggcagaaucgacuacuacuggagcgugcugaagcccggccagacccugagagugagaagcaacggcaaccugaucgcccccugguacggccacgugcugagcggcggcagccacggcagaauccugaagaccgaccugaagagcggcaacugcguggugcagugccagaccgagaagggcggccugaacagcacccugcccuuccacaacaucagcaaguacgccuucggcaccugccccaaguacgugaaggugaacagccugaagcuggccaucggccugagaaacgugcccgccagaagcaacagaggccuguucggcgccaucgccggcuucaucgagggcggcuggcccggccugguggccggcugguacggcuuccagcacagcaacgaccagggcgugggcauggccgccgacagagacagcacccagaaggccguggacaagaucaccagcaaggugaacaacaucguggacaagaugaacaagcaguacgagaucaucgaccacgaguucagcgagguggagaccagacugaacaugaucaacaacaagaucgacgaccagauccaggacgugugggccuacaacgccgagcugcuggugcugcuggagaaccagaagacccuggacgagcacgacgccaacgugaacaaccuguacaacaaggugaagagagcccugggcagcaacgccauggaggacggcaagggcugcuucgagcuguaccacaagugcgacgaccagugcauggagaccaucagaaacggcaccuacgacagaagaaaguacagagaggagagcagacuggagagacagagaaucgagggcgugaagcuggagagcgagggcaccuacaagauccugaccaucuacagcaccguggccagcagccuggugaucgccaugggcuucgccgccuuccuguucugggccaugagcaacggcagcugcagaugcaacaucugcaucuga

SEQ ID NO: 174089 - RNA, 1683 nt, Artificial Sequence
  derived and/or modified CDS sequence (opt4) from hemagglutinin__InfluenzaA__ANZ03807
auggagaccgugagccugaucaccauccugcugguggccaccgugagcaacgccgacaagaucugcaucggcuaccagagcaccaacagcaccgagaccguggacacccugaccgagaacaacgugcccgugacccacgccaaggagcugcugcacaccgagcacaacggcaugcugugcgccaccagccugggccagccccugauccuggacaccugcaccaucgagggccugaucuacggcaaccccagcugcgaccugagccuggagggcagagaguggagcuacaucguggagagacccagcgccgugaacggccugugcuaccccggcaacguggagaaccuggaggagcugagaagccuguucagcagcgccagaagcuaccagagaauccagaucuuccccgacaccaucuggaacgugagcuacgacggcaccagcaccgccugcagcggcagcuucuacagaagcaugagauggcugaccagaaagaacggcgacuaccccacccaggacgcccaguacaccaacaaccagggcaagaacauccuguucauguggggcaucaaccacccccccaccgacgacacccagagaaaccuguacaccagaaccgacaccaccaccagcguggccaccgaggagaucaacagaaucuucaagccccugaucggccccagaccccuggugaacggccugaugggcagaaucgacuacuacuggagcgugcugaagcccggccagacccugagaaucaagagcgacggcaaccugaucgcccccugguacggccacauccugagcggcgagagccacggcagaauccugaagaccgaccugaagagaggcagcugcaccgugcagugccagaccgagaagggcggccugaacaccacccugcccuuccagaacgugagcaaguacgccuucggcaacugcagcaaguacaucggcaucaagagccugaagcuggccgugggccugagaaacgugcccagcagaagcagcagaggccuguucggcgccaucgccggcuucaucgagggcggcuggagcggccugguggccggcugguacggcuuccagcacagcaacgaccagggcgugggcauggccgccgacagagacagcacccagaaggccaucgacaagaucaccagcaaggugaacaacaucguggacaagaugaacaagcaguacgagaucaucgaccacgaguucagcgagguggagaccagacugaacaugaucaacaacaagaucgacgaccagauccaggacaucugggccuacaacgccgagcugcuggugcugcuggagaaccagaagacccuggacgagcacgacgccaacgugaacaaccuguacaacaaggugaagagagcccugggcagcaacgccguggaggacggcaagggcugcuucgagcuguaccacaagugcaacgaccagugcauggagaccaucagaaacggcaccuacaacagaagaaaguaccaggaggagagcaagcuggagagacagaagaucgagggcgugaagcuggagagcgagggcaccuacaagauccugaccaucuacagcaccguggccagcagccuggugaucgccaugggcuucgccgccuuccuguucugggccaugagcaacggcagcugcagaugcaacaucugcaucuga

SEQ ID NO: 174090 - RNA, 1683 nt, Artificial Sequence; identical to SEQ ID NO: 174089
  derived and/or modified CDS sequence (opt4) from hemagglutinin__InfluenzaA__EPI680526

SEQ ID NO: 174091 - RNA, 1683 nt, Artificial Sequence; identical to SEQ ID NO: 173745
  derived and/or modified CDS sequence (opt4) from hemagglutinin__InfluenzaA__ALT20080

SEQ ID NO: 174092 - RNA, 1410 nt, Artificial Sequence
  derived and/or modified CDS sequence (opt4) from neuraminidase__InfluenzaA__AAA43084
augaaccccaaccagaagaucaucaccaucggcagcgugagccugaccaucgccaccgugugcuuccugaugcagaucgccauccuggccaccaccgugacccugcacuucaagcagcacgagugcgacagccccgccagcaaccaggugaugcccugcgagcccaucaucaucgagagaaacaucaccgagaucguguaccugaacaacaccaccaucgagaaggagaucugccccgaggugguggaguacagaaacuggagcaagccccagugccagaucaccggcuucgcccccuucagcaaggacaacagcaucagacugagcgccggcggcgacaucugggugaccagagagcccuacgugagcugcgaccccggcaagugcuaccaguucgcccugggccagggcaccacccuggacaacaagcacagcaacggcaccauccacgacagaaucccccacagaacccugcugaugaacgagcugggcgugcccuuccaccugggcaccaagcaggugugcguggccuggagcagcagcagcugccacgacggcaaggccuggcugcacgugugcgugaccggcgacgacagaaacgccaccgccagcuucaucuacgacggcagacugguggacagcaucggcagcuggagccagaacauccugagaacccaggagagcgagugcgugugcaucaacggcaccugcaccguggugaugaccgacggcagcgccagcggcagagccgacaccagaauccuguucaucaaggagggcaagaucgugcacaucagcccccugagcggcagcgcccagcacaucgaggagugcagcugcuaccccagauaccccgacgugagaugcaucugcagagacaacuggaagggcagcaacagacccgugaucgacaucaacauggaggacuacagcaucgacagcggcuacgugugcagcggccuggugggcgacacccccagaaacgacgacagcagcagcaacagcaacugcagagaccccaacaacgagagaggcaaccccggcgugaagggcugggccuucgacaacggcgacgacguguggaugggcagaaccaucaacaaggagagcagaagcggcuacgagaccuucaaggugaucggcggcuggagcacccccaacagcaagagccaggugaacagacaggugaucguggacaacaacaacuggagcggcuacagcggcaucuucagcguggagggcaagagcugcaucaacagaugcuucuacguggagcugaucagaggcagaccccaggagaccagagugugguggaccagcaacagcaucgugguguucugcggcaccagcggcaccuacggcaccggcagcuggcccgacggcgccaacaucaacuucaugcccaucuga

SEQ ID NO: 174093 - RNA, 1362 nt, Artificial Sequence
  derived and/or modified CDS sequence (opt4) from neuraminidase__InfluenzaA__AAA43397
augaaccccaaccagaagaucaucaccaucggcagcaucugcaugguggugggcaucaucagccugauccugcagaucggcaacaucaucagcaucuggaucagccacagcauccagaccggcaaccagaaccacaccggcaucugcaaccagggcagcaucaccuacaaggugguggccggccaggacagcaccagcgugauccugaccggcaacagcagccugugccccaucagaggcugggccauccacagcaaggacaacggcaucagaaucggcagcaagggcgacguguucgugaucagagagcccuucaucagcugcagccaccuggagugcagaaccuucuuccugacccagggcgcccugcugaacgacaagcacagcagaggcaccuucaaggacagaagccccuacagagcccugaugagcugccccgugggcgaggcccccagccccuacaacagcagauucgagagcguggccuggagcgccagcgccugccacgacggcgugggcuggcugaccaucggcaucagcggccccgacgacggcgccguggccgugcugaaguacaacagaaucaucaccgagaccaucaagagcuggagaaagaacauccugagaacccaggagagcgagugcaccugcgugaacggcagcugcuucaccaucaugaccgacggccccagcgacggccuggccagcuacaagaucuucaagaucgagaagggcaaggugaccaagagcaucgagcugaacgcccccaacagccacuacgaggagugcagcugcuaccccgacaccggcaaggugaugugcgugugcagagacaacuggcacggcagcaacagacccugggugagcuucgaccagaaccuggacuacaagaucggcuacaucugcagcggcguguucggcgacaaccccagacccaaggacggcaccggcagcugcggccccgugagcgccgacggcgccaacggcgugaagggcuucagcuacaaguacggcaacggcguguggaucggcagaaccaagagcgacagcagcagacacggcuucgagaugaucugggaccccaacggcuggaccgagaccgacagcagauucagcaugagacaggacgugguggccaucaccaacagaagcggcuacagcggcagcuucgugcagcaccccgagcugaccggccuggacugcaugagacccugcuucuggguggagcugaucagaggccugcccgaggaggacgccaucuggaccagcggcagcaucaucagcuucugcggcgugaacagcgacaccguggacuggagcuggcccgacggcgccgagcugcccuucaccaucgacaaguga

SEQ ID NO: 174094 - RNA, 1365 nt, Artificial Sequence
  derived and/or modified CDS sequence (opt4) from neuraminidase__InfluenzaA__AAA43412
augaaccccaaccagaagaucaucaccaucggcagcaucugccugguggugggccugaucagccugauccugcagaucggcaacaucaucagcaucuggaucagccacagcauccagaccggcagccagaaccacaccggcaucugcaaccagaacaucaucaccuacaagaacagcaccugggugaaggacaccaccagcgugauccugaccggcaacagcagccugugccccaucagaggcugggccaucuacagcaaggacaacagcaucagaaucggcagcaagggcgacguguucgugaucagagagcccuucaucagcugcagccaccuggagugcagaaccuucuuccugacccagggcgcccugcugaacgacagacacagcaacggcaccgugaaggacagaagccccuacagagcccugaugagcugccccgugggcgaggcccccagccccuacaacagcagauucgagagcguggccuggagcgccagcgccugccacgacggcaugggcuggcugaccaucggcaucagcggccccgacaacggcgccguggccgugcugaaguacaacggcaucaucaccgagaccaucaagagcuggagaaagaagauccugagaacccaggagagcgagugcgccugcgugaacggcagcugcuucaccaucaugaccgacggccccagcgacggccuggccagcuacaagaucuucaagaucgagaagggcaaggugaccaagagcaucgagcugaacgcccccaacagccacuacgaggagugcagcugcuaccccgacaccggcaaggugaugugcgugugcagagacaacuggcacggcagcaacagacccugggugagcuucgaccagaaccuggacuaccagaucggcuacaucugcagcggcguguucggcgacaaccccagacccaaggacggcaccggcagcugcggccccguguacguggacggcgccaacggcgugaagggcuucagcuacagauacggcaacggcguguggaucggcagaaccaagagccacagcagcagacacggcuucgagaugaucugggaccccaacggcuggaccgagaccgacagcaaguucagcgugagacaggacgugguggccaugaccgacuggagcggcuacagcggcagcuucgugcagcaccccgagcugaccggccuggacugcaucagacccugcuucuggguggagcugaucagaggcagacccaaggagaagaccaucuggaccagcgccagcagcaucagcuucugcggcgugaacagcgacaccguggacuggagcuggcccgacggcgccgagcugcccuucaccaucgacaaguga

SEQ ID NO: 174095 - RNA, 1410 nt, Artificial Sequence
  derived and/or modified CDS sequence (opt4) from neuraminidase__InfluenzaA__AAG01743
augaaccccaaccagaagaucaucacccugggcagcgugagccugaccaucgccaccaucugcuuccugaugcagaucgccauccuggugaccaccgugacccugcacuucaagcaguacgagugcgacuaccccgccaacaaccaggccaugcccugcgagcccaucaucaucgagagaaacaucaccgagaucguguaccugaccaacaccaccaucgagaaggaggugugccccaagcugguggaguacagaaacuggagcaagccccagugcaagaucaccggcuucgcccccuucagcaaggacaacagcaucagacugagcgccggcggcgacaucugggugaccagagagcccuacgugagcugcgaccccggcaagugcuaccaguucgcccugggccagggcaccacccuggacaacaagcacagcaacgacaccauccacgacagaaccccccacagaacccugcugaugaacgagcugggcgugcccuuccaccugggcaccagacaggugugcaucgccuggagcagcagcagcugccacgacggcaaggccuggcugcacgugugcgugaccggcuacgacaagaacgccaccgccagcuucaucuacgacggcagacugguggacagcaucggcagcuggagccagaacauccugagaacccaggagagcgagugcgugugcaucaacggcaccugcaccguggugaugaccgacggcagcgccagcggcagagccgacaccaagauccuguucaucgaggagggcaagaucgugcacaccagcccccugagcggcagcgcccagcacguggaggagugcagcugcuaccccagauaccccggcgugagaugcaucugcagagacaacuggaagggcagcaacagacccgugguggacaucaacgugaaggacuacagcaucaacagcagcuacgugugcagcggccuggugggcgacacccccagaaacaacgacagaagcagcagcagcuacugccagaaccccaacaacgagaagggcacccacggcgugaagggcugggccuucgacgacggcaacgacguguggaugggcagaaccaucagcgaggacagcagaagcggcuacgagaccuucaaggugaucggcggcuggagcacccccaacagcaagcugcagaucaacagacaggugaucguggacagcgacaacagaagcggcuacagcggcaucuucagcguggagggcaagagcugcaucaacagaugcuucuacguggagcugaucagaggcagagagcaggagaccagagugugguggaccagcaacagcaucgugguguucugcggcaccagcggcaccuacggcaccggcagcuggcccgacggcgccgacaucaacaucaugcccaucuga

SEQ ID NO: 174096 - RNA, 1410 nt, Artificial Sequence
  derived and/or modified CDS sequence (opt4) from neuraminidase__InfluenzaA__AAG01759
augaaccccaaccagaagaucaucaccaucggcagcgugagccugaccaucgccaccaugugcuuccugaugcagaucgccauccuggugaccaccgugacccugcacuucaagcaguacgagugcaacagcccccccaacaaccaggugauccugugcgagcccaccaucaucgagagaaacaucaccgagaucguguaccugaccaacaccaccaucgagaaggagaucugccccaagcuggccgaguacaagaacuggagcaagccccagugcaagaucaccggcuucgcccccuucagcaaggacaacagcaucagacugagcgccggcggcgacaucugggugaccagagagcccuacgugagcugcgaccccgacaagugcuaccaguucgcccugggccagggcaccacccugaacaacagacacagcaacgacaccgugcacgacagaacccccuacagaacccugcugaugaacgagcugggcgugcccuuccaccugggcaccaagcaggugugcaucgccuggagcagcagcagcugccacgacggcaaggccuggcugcacgugugcgugaccggccacgacgagaacgccaccgccagcuucaucuacgacggcagacugguggacagcaucggcagcuggagcaagaagauccugagaacccaggagagcgagugcgugugcaucaacggcaccugcaccguggugaugaccgacggcagcgccagcggcagagccgacaccaagauccuguucaucgaggagggcaagaucgugcacaucagcccccugcugggcagcgcccagcacguggaggagugcagcugcuaccccagauaccccggcgugagaugcgugugcagagacaacuggaagggcagcaacagacccaucguggacaucaacgugaaggacuacagcaucgugagcagcuacgugugcagcggccuggugggcgacacccccagaaagaacgacagaagcagcagcagcaacugccugaaccccaacaacgaggagggcggccacggcgugaagggcugggccuucgacgacggcaacgacguguggaugggcagaaccaucagcgagaagcugagaagcggcuacgagaccuucaaggugaucgagggcuggagcaagcccaacagcaagcugcagaucaacagacaggugaucguggacagaggcaacagaagcggcuacagcggcaucuucagcguggagggcaagagcugcaucaacagaugcuucuacguggagcugaucagaggcagaaagcaggagaccgaggugugguggaccagcaacagcaucgugguguucugcggcaccagcggcaccuacggcaccggcagcuggcccgacggcgccgacaucaaccugaugcccaucuga

SEQ ID NO: 174097 - RNA, 1410 nt, Artificial Sequence
  derived and/or modified CDS sequence (opt4) from neuraminidase__InfluenzaA__AAG01777
augaaccccaaccagaagaucaucaccaucggcagcgugagccugaccaucgccaccaucugcuuccugaugcagaucgccauccuggugaccaccgugacccugcacuucaagcaguacgagugcaacagcccccccaacaaccaggugauccugugcgagcccaccaucaucgagagaaacaucaccgagaucguguaccugaccaacaccaccaucgagaaggagaucugccccaagcuggccgaguacaagaacuggagcaagccccagugcaagaucaccggcuucgcccccuucagcaaggacaacagcaucagacugagcgccggcggcgacaucugggugaccagagagcccuacgugagcugcgaccccgacaagugcuaccaguucgcccugggccagggcaccacccugaacaacagacacagcaacgacaccgugcacgacagaacccccuacagaacccugcugaugaacgagcugggcgugcccuuccaccugggcaccaagcaggugugcaucgccuggagcagcagcagcugccacgacggcaaggccuggcugcacgugugcgugaccggccacgacgagaacgccaccgccagcuucaucuacgacggcagacugguggacagcaucggcagcuggagcaagaagauccugagaacccaggagagcgagugcgugugcaucaacggcaccugcaccguggugaugaccgacggcagcgccagcggcagagccgacaccaagauccuguucaucgaggagggcaagaucgugcacaucagcccccugcugggcagcgcccagcacguggaggagugcagcugcuaccccagauaccccggcgugagaugcgugugcagagacaacuggaagggcagcaacagacccaucguggacaucaacgugaaggacuacagcaucgugagcagcuacgugugcagcggccuggugggcgacacccccagaaagaacgacagaagcagcagcagcaacugccugaaccccaacaacgaggagggcggccacggcgugaagggcugggccuucgacgacggcaacgacguguggaugggcagaaccaucagcgagaagcugagaagcggcuacgagaccuucaaggugaucgagggcuggagcaagcccaacagcaagcugcagaucaacagacccgugaucguggacagaggcgacagaagcggcuacagcggcaucuucagcguggagggcaagagcugcaucaacagaugcuucuacguggagcugaucagaggcagaaagcaggagaccgaggugugguggaccagcaacagcaucgugguguucugcggcaccagcggcaccuacggcaccggcagcuggcccgacggcgccgacaucaaccugaugcccaucuga

SEQ ID NO: 174098 - RNA, 1410 nt, Artificial Sequence
  derived and/or modified CDS sequence (opt4) from neuraminidase__InfluenzaA__AAG01786
augaaccccaaccagaagaucaucaccaucggcagcgugagccugaccaucgccaccaugugcuuccugaugcagaucgccauccuggugaccaccgugacccugcacuucaagcaguacgagugcaacagcccccccaacaaccaggugauccugugcgagcccaccaucaucgagagaaacaucaccgagaucguguaccugaccaacaccaccaucgagaaggagaucugccccaagcuggccgaguacaagaacuggagcaagccccagugcaagaucaccggcuucgcccccuucagcaaggacaacagcaucagacugagcgccggcggcgacaucugggugaccagagagcccuacgugagcugcgaccccgacaagugcuaccaguucgcccugggccagggcaccacccugaacaacagacacagcaacgacaccgugcacgacagaacccccuacagaacccugcugaugaacgagcugggcgugcccuuccaccugggcaccaagcaggugugcaucgccuggagcagcagcagcugccacgacggcaaggccuggcugcacgugugcgugaccggccacgacgagaacgccaccgccagcuucaucuacgacggcagacugguggacagcaucggcagcuggagcaagaagauccugagaacccaggagagcgagugcgugugcaucaacggcaccugcaccguggugaugaccgacggcagcgccagcggcagagccgacaccaagauccuguucaucgaggagggcaagaucgugcacaucagcccccugcugggcagcgcccagcacguggaggagugcagcugcuaccccagauaccccggcgugagaugcgugugcagagacaacuggaagggcagcaacagacccaucguggacaucaacgugaaggacuacagcaucgugagcagcuacgugugcagcggccuggugggcgacacccccagaaagaacgacagaagcagcagcagcaacugccugaaccccaacaacgaggagggcggccacggcgugaagggcugggccuucgacgacggcaacgacguguggaugggcagaaccaucagcgagaagcugagaagcggcuacgagaccuucaaggugaucgagggcuggagcaagcccaacagcaagcugcagaucaacagacaggugaucguggacagaggcgacagaagcggcuacagcggcaucuucagcguggagggcaagagcugcaucaacagaugcuucuacguggagcugaucagaggcagaaagcaggagaccgaggugugguggaccagcaacagcaucgugguguucugcggcaccagcggcaccuacggcaccggcagcuggcccgacggcgccgacaucaaccugaugcccaucuga

SEQ ID NO: 174099 - RNA, 1410 nt, Artificial Sequence
  derived and/or modified CDS sequence (opt4) from neuraminidase__InfluenzaA__AAK71688
augaaccccaaccagaagaucaucaccaucggcagcgugagccugaccaucgccaccaugugcuuccugaugcagaucgccauccuggugaccaccgugacccugcacuucaagcaguacgagugcaacagcccccccaacaaccaggugauccugugcgagcccaccaucaucgagagaaacaucaccgagaucguguaccugaccaacgccaccaucgagaaggagaucugccccaagcuggccgaguacagaaacuggagcaagccccagugcaagaucaccggcuucgcccccuucagcaaggacaacagcaucagacugagcgccggcggcgacaucugggugaccagagagcccuacgugagcugcgaccccgacaagugcuaccaguucgcccugggccagggcaccacccugaacaacagacacagcaacgacaccgugcacgacagaacccccuacagaacccugcugaugaacgagcugggcgugcccuuccaccugggcaccaagcaggugugcaucgccuggagcagcagcagcugccacgacggcaaggccuggcugcacgugugcgugaccggccacgacgagaacgccaccgccagcuucaucuacgacggcagacugguggacagcaucggcagcuggagcaagaagauccugagaacccaggagagcgagugcgugugcaucaacggcaccugcaccguggugaugaccgacggcagcgccagcggcagagccgacaccaagauccuguucaucgaggagggcaagaucgugcacaucagcccccugcugggcagcgcccagcacguggaggagugcagcugcuaccccagauaccccggcgugagaugcgugugcagagacaacuggaagggcagcaacagacccaucguggacaucaacgugaaggacuacagcaucgugagcagcuacgugugcagcggccuggugggcgacacccccagaaagaacgacagaagcagcagcagcaacugccugaaccccaacaacgaggagggcggccacggcgugaagggcugggccuucgacgacggcaacgacguguggaugggcagaaccaucagcgaggagcugagaagcggcuacgagaccuucaaggugaucgagggcuggagcaagcccaacagcaagcugcagaucaacagacaggugaucguggacagaggcgacagaagcggcuacagcggcaucuucagcguggagggcaagagcugcaucaacagaugcuucuacguggagcugaucagaggcagaaagcaggagaccgaggugugguggaccagcaacagcaucgugguguucugcggcaccagcggcaccuacggcaccggcagcuggcccgacggcgccgacaucaaccugaugcccaucuga

SEQ ID NO: 174100 - RNA, 1410 nt, Artificial Sequence
  derived and/or modified CDS sequence (opt4) from neuraminidase__InfluenzaA__AAN01169
augaaccccaaccagaagaucaucaccaucggcagcgugagccugaccaucgccaccaucugcuuccugaugcagaucgccauccuggugaccaccgugacccugcacuucaagcaguacgagugcaacagccugcccaacaaccaggugaugcugugcgagcccaccaucaucgagagaaacaucaccgagaucguguaccugaccaacaccaccaucgagaaggagaucugccccaagcuggccgaguacagaaacuggagcaagccccagugcaagaucaccggcuucgcccccuucagcaaggacaacagcaucagacugagcgccggcggcgacaucugggugaccagagagcccuacgugagcugcgaccccgacaagugcuaccaguucgcccugggccagggcaccacccugaacaacagacacagcaacgacaccgugcacgacagaacccccuacagaacccugcugaugaacgagcugggcgugcccuuccaccugggcaccaagcaggugugcaucgccuggagcagcagcagcugccacgacggcaaggccuggcugcacgugugcgugaccggccacgacgagaacgccaccgccagcuucaucuacgacggcagacugguggacagcaucggcagcuggagcaagaagauccugagaacccaggagagcgagugcgugugcaucaacggcaccugcaccguggugaugaccgacggcagcgccagcggcagagccgacaccaagauccuguucaucgaggagggcaagaucauccacaucagccagcugagcggcagcgcccagcacguggaggagugcagcugcuaccccagauaccccggcgugagaugcgugugcagagacaacuggaagggcagcaacagacccaucguggacaucaacgugaaggacuacagcaucgugagcagcuacgugugcagcggccuggugggcgacacccccagaaagaacgacagcagcagcagcagccacugccugaaccccaacaacgaggagggcggccacggcgugaagggcugggccuucgacgacggcaacgacguguggaugggcagaaccaucagcgagaaguucagaagcggcuacgagaccuucaaggugaucgagggcuggagcaagcccaacagcaagcugcagaucaacagacaggugaucguggacagagacaacagaagcggcuacagcggcaucuucagcguggagggcaagagcugcaucaacagaugcuucuacguggagcugaucagaggcagaaagcaggagaccgaggugugguggaccagcaacagcaucgugguguucugcggcaccagcggcaccuacggcaccggcagcuggcccgacggcgccgacaucaaccugaugcccaucuga

SEQ ID NO: 174101 - RNA, 1410 nt, Artificial Sequence; identical to SEQ ID NO: 174100
  derived and/or modified CDS sequence (opt4) from neuraminidase__InfluenzaA__AAN01170

SEQ ID NO: 174102 - RNA, 1410 nt, Artificial Sequence
  derived and/or modified CDS sequence (opt4) from neuraminidase__InfluenzaA__AAN01171
augaaccccaaccagaagaucaucaccaucggcagcgugagccugaccaucgccaccaucugcuuccugaugcagaucgccauccuggugaccaccgugacccugcacuucaagcaguacgagugcaacagccugcccaacaaccaggugaugcugugcgagcccaccaucaucgagagaaacaucaccgagaucguguaccugaccaacaccaccaucgagaaggagaucugccccaagcuggccgaguacagaaacuggagcaagccccagugcaagaucaccggcuucgcccccuucagcaaggacaacagcaucagacugagcgccggcggcgacaucugggugaccagagagcccuacgugagcugcgaccccgacaagugcuaccaguucgcccugggccagggcaccacccugaacaacagacacagcaacgacaccgugcacggcagaacccccuacagaacccugcugaugaacgagcugggcgugcccuuccaccugggcaccaagcaggugugcaucgccuggagcagcagcagcugccacgacggcaaggccuggcugcacgugugcgugaccggccacgacgagaacgccaccgccagcuucaucuacgacggcagacugguggacagcaucggcagcuggagcaagaagauccugagaacccaggagagcgagugcgugugcaucaacggcaccugcaccguggugaugaccgacggcagcgccagcggcagagccgacaccaagauccuguucaucgaggagggcaagaucauccacaucagccagcugagcggcagcgcccagcacguggaggagugcagcugcuaccccagauaccccggcgugagaugcgugugcagagacaacuggaagggcagcaacagacccaucguggacaucaacgugaaggacuacagcaucgugagcagcuacgugugcagcggccuggugggcgacacccccagaaagaacgacagcagcagcagcagccacugccugaaccccaacaacgaggagggcggccacggcgugaagggcugggccuucgacgacggcaacgacguguggaugggcagaaccaucagcgagaaguucagaagcggcuacgagaccuucaaggugaucgagggcuggagcaagcccaacagcaagcugcagaucaacagacaggugaucguggacagagacaacagaagcggcuacagcggcaucuucagcguggagggcaagagcugcaucaacagaugcuucuacguggagcugaucagaggcagaaagcaggagaccgaggugugguggaccagcaacagcaucgugguguucugcggcaccagcggcaccuacggcaccggcagcuggcccgacggcgccgacaucaaccugaugcccaucuga

SEQ ID NO: 174103 - RNA, 1410 nt, Artificial Sequence; identical to SEQ ID NO: 174100
  derived and/or modified CDS sequence (opt4) from neuraminidase__InfluenzaA__AAN01172

SEQ ID NO: 174104 - RNA, 1410 nt, Artificial Sequence
  derived and/or modified CDS sequence (opt4) from neuraminidase__InfluenzaA__AAN01173
augaaccccaaccagaagaucaucaccaucggcagcgugagccugaccaucgccaccaucugcuuccugaugcagaucgccauccuggugaccaccgugacccugcacuucaagcaguacgagugcaacagccugcccaacaaccaggugaugcugugcgagcccaccaucaucgagagaaacaucaccgagaucguguaccugaccaacaccaccaucgagaaggagaugugccccaagcuggccgaguacagaaacuggagcaagccccagugcaagaucaccggcuucgcccccuucagcaaggacaacagcaucagacugagcgccggcggcgacaucugggugaccagagagcccuacgugagcugcgaccccgacaagugcuaccaguucgcccugggccagggcaccacccugaacaacagacacagcaacgacaccgugcacgacagaacccccuacagaacccugcugaugaacgagcugggcgugcccuuccaccugggcaccaagcaggugugcaucgccuggagcagcagcagcugccacgacggcaaggccuggcugcacgugugcgugaccggccacgacgagaacgccaccgccagcuucaucuacgacggcagacugguggacagcaucggcagcuggagcaagaagauccugagaacccaggagagcgagugcgugugcaucaacggcaccugcaccguggugaugaccgacggcagcgccagcggcagagccgacaccaagauccuguucaucgaggagggcaagaucauccacaucagccagcugagcggcagcgcccagcacguggaggagugcagcugcuaccccagauaccccggcgugagaugcgugugcagagacaacuggaagggcagcaacagacccaucguggacaucaacgugaaggacuacagcaucgugagcagcuacgugugcagcggccuggugggcgacacccccagaaagaacgacagcagcagcagcagccacugccugaaccccaacaacgaggagggcggccacggcgugaagggcugggccuucgacgacggcaacgacguguggaugggcagaaccaucagcgagaaguucagaagcggcuacgagaccuucaaggugaucgagggcuggagcaagcccaacagcaagcugcagaucaacagacaggugaucguggacagagacaacagaagcggcuacagcggcaucuucagcguggagggcaagagcugcaucaacagaugcuucuacguggagcugaucagaggcagaaagcaggagaccgaggugugguggaccagcaacagcaucgugguguucugcggcaccagcggcaccuacggcaccggcagcuggcccgacggcgccgacaucaaccugaugcccaucuga

SEQ ID NO: 174105 - RNA, 1410 nt, Artificial Sequence; identical to SEQ ID NO: 174100
  derived and/or modified CDS sequence (opt4) from neuraminidase__InfluenzaA__AAN01174

SEQ ID NO: 174106 - RNA, 1410 nt, Artificial Sequence; identical to SEQ ID NO: 174100
  derived and/or modified CDS sequence (opt4) from neuraminidase__InfluenzaA__AAN01175

SEQ ID NO: 174107 - RNA, 1410 nt, Artificial Sequence; identical to SEQ ID NO: 174100
  derived and/or modified CDS sequence (opt4) from neuraminidase__InfluenzaA__AAN01176

SEQ ID NO: 174108 - RNA, 1410 nt, Artificial Sequence; identical to SEQ ID NO: 174100
  derived and/or modified CDS sequence (opt4) from neuraminidase__InfluenzaA__AAN01177

SEQ ID NO: 174109 - RNA, 1410 nt, Artificial Sequence; identical to SEQ ID NO: 174100
  derived and/or modified CDS sequence (opt4) from neuraminidase__InfluenzaA__AAN01178

SEQ ID NO: 174110 - RNA, 1410 nt, Artificial Sequence; identical to SEQ ID NO: 174100
  derived and/or modified CDS sequence (opt4) from neuraminidase__InfluenzaA__AAN01179

SEQ ID NO: 174111 - RNA, 1410 nt, Artificial Sequence; identical to SEQ ID NO: 174100
  derived and/or modified CDS sequence (opt4) from neuraminidase__InfluenzaA__AAN01180

SEQ ID NO: 174112 - RNA, 1410 nt, Artificial Sequence
  derived and/or modified CDS sequence (opt4) from neuraminidase__InfluenzaA__AAN01181
augaaccccaaccagaagaucaucaccaucggcagcgugagccugaccaucgccaccaucugcuuccugaugcagaucgccauccuggugaccaccgugacccugcacuucaagcaguacgagugcaacagccugcccaacaaccaggugaugcugugcgagcccaccaucaucgagagaaacaucaccgagaucguguaccugaccaacaccaccaucgagaaggagaucugccccaagcuggccgaguacagaaacuggagcaagccccagugcaagaucaccggcuucgcccccuucagcaaggacaacagcaucagacugagcgccggcggcgacaucugggugaccagagagcccuacgugagcugcgaccccgacaagugcuaccaguucgcccugggccagggcaccacccugaacaacagacacagcaacgacaccgugcacgacagaacccccuacagaacccugcugaugaacgagcugggcgugcccuuccaccugggcaccaagcaggugugcaucgccuggagcagcagcagcugccacgacggcaaggccuggcugcacgugugcgugaccggccacgacgagaacgccaccgccagcuucaucuacgacggcagacugguggacagcaucggcagcuggagcaagaagauccugagaacccaggagagcgagugcgugugcaucaacggcaccugcaccguggugaugaccgacggcagcgccagcggcagagccgacaccaagauccuguucaucgaggagggcaagaucauccacaucagccagcugagcggcagcgcccagcacguggaggagugcagcugcuaccccagauaccccggcgugagaugcgugugcagagacaacuggaagggcagcaacagacccaucguggacaucaacgugaaggacuacagcaucgugagcagcuacgugugcagcggccuggugggcgacacccccagaaagaacgacagcagcagcagcagccacugccugaaccccaacaacgaggagggcggccacggcgugaagggcugggccuucgacgacggcaacgacguguggaugggcagaaccaucggcgagaaguucagaagcggcuacgagaccuucaaggugaucgagggcuggagcaagcccaacagcaagcugcagaucaacagacaggugaucguggacagagacaacagaagcggcuacagcggcaucuucagcguggagggcaagagcugcaucaacagaugcuucuacguggagcugaucagaggcagaaagcaggagaccgaggugugguggaccagcaacagcaucgugguguucugcggcaccagcggcaccuacggcaccggcagcuggcccgacggcgccgacaucaaccugaugcccaucuga

SEQ ID NO: 174113 - RNA, 1410 nt, Artificial Sequence; identical to SEQ ID NO: 174100
  derived and/or modified CDS sequence (opt4) from neuraminidase__InfluenzaA__AAN01182

SEQ ID NO: 174114 - RNA, 1410 nt, Artificial Sequence; identical to SEQ ID NO: 174100
  derived and/or modified CDS sequence (opt4) from neuraminidase__InfluenzaA__AAN01183

SEQ ID NO: 174115 - RNA, 1410 nt, Artificial Sequence; identical to SEQ ID NO: 174100
  derived and/or modified CDS sequence (opt4) from neuraminidase__InfluenzaA__AAN01184

SEQ ID NO: 174116 - RNA, 1410 nt, Artificial Sequence; identical to SEQ ID NO: 174100
  derived and/or modified CDS sequence (opt4) from neuraminidase__InfluenzaA__AAN01185

SEQ ID NO: 174117 - RNA, 1410 nt, Artificial Sequence
  derived and/or modified CDS sequence (opt4) from neuraminidase__InfluenzaA__AAN01186
augaaccccaaccagaagaucaucaccaucggcagcgugagccugaccaucgccaccaucugcuuccugaugcagaucgccauccuggugaccaccgugacccugcacuucaagcaguacgagugcaacagccugcccaacaaccaggugaugcugugcgagcccaccaucaucgagagaaacaucaccgagaucguguaccugaccaacaccaccaucgagaaggagaucugccccaagcuggccgaguacagaaacuggagcaagccccagugcaagaucaccggcuucgcccccuucagcaaggacaacagcaucagacugagcgccggcggcgacaucugggugaccagagagcccuacgugagcugcgaccccgacaagugcuaccaguucgcccugggccagggcaccacccugaacaacagacacagcaacgacaccgugcacgacagaacccccuacagaacccugcugaugaacgagcugggcgugcccuuccaccugggcaccaagcaggugugcaucgccuggagcagcagcagcugccacgacggcaaggccuggcugcacgugugcgugaccggccacgacgagaacgccaccgccagcuucaucuacgacggcagacugguggacagcaucggcagcuggagcaagaagauccugagaacccaggagagcgagugcgugugcaucaacggcaccugcaccguggugaugaccgacggcagcgccagcggcagagccgacaccaagauccuguucaucgaggagggcaagaucauccacaucagccagcugagcggcagcgcccagcacguggaggagugcagcugcuaccccagauaccccggcgugagaugcgugugcagagacaacuggaagggcagcaacagacccaucguggacaucaacgugaaggacuacagcaucgugagcagcuacgugugcagcggccuggugggcgacacccccagaaagaacgacagcagcagcagcagccacugccugaaccccaacaacgaggagggcggccacggcgugaagggcugggccuucgacgacggcaacgacguguggaugggcagaaccaucagcgagaaguucagacugggcuacgagaccuucaaggugaucgagggcuggagcaagagcaacagcaagcugcagaucaacagacaggugaucguggacagagacaacagaagcggcuacagcggcaucuucagcguggagggcaagagcugcaucaacagaugcuucuacguggagcugaucagaggcagaaagcaggagaccgaggugugguggaccagcaacagcaucgugguguucugcggcaccagcggcaccuacggcaccggcagcuggcccgacggcgccgacaucaaccugaugcccaucuga

SEQ ID NO: 174118 - RNA, 1410 nt, Artificial Sequence
  derived and/or modified CDS sequence (opt4) from neuraminidase__InfluenzaA__AAN01187
augaaccccaaccagaagaucaucaccaucggcagcgugagccugaccaucgccaccaucugcuuccugaugcagaucgccauccuggugaccaccgugacccugcacuucaagcaguacgagugcgacagccugcccaacaaccaggugaugcugugcgagcccaccaucaucgagagaaacaucaccgagaucguguaccugaccaacaccaccaucgagaaggagaugugccccaagcuggccgaguacagaaacuggagcaagccccagugcaagaucaccggcuucgcccccuucagcaaggacaacagcaucagacugagcgccggcggcgacaucugggugaccagagagcccuacgugagcugcgaccccgacaagugcuaccaguucgcccugggccagggcaccacccugaacaacagacacagcaacgacaccgugcacgacagaacccccuacagaacccugcugaugaacgagcugggcgugcccuuccaccugggcaccaagcaggugugcaucgccuggagcagcagcagcugccacgacggcaaggccuggcugcacgugugcgugaccggccacgacgagaacgccaccgccagcuucaucuacgacggcagacugguggacagcaucggcagcuggagcaagaagauccugagaacccaggagagcgagugcgugugcaucaacggcaccugcaccguggugaugaccgacggcagcgccagcggcagagccgacaccaagauccuguucaucgaggagggcaagaucauccacaucagccagaugagcggcagcgcccagcacguggaggagugcagcugcuaccccagauaccccggcgugagaugcgugugcagagacaacuggaagggcagcaacagacccaucguggacaucaacgugaaggacuacagcaucgugagcagcuacgugugcagcggccuggugggcgacacccccagaaagaacgacagcagcagcagcagccacugccugaaccccaacaacgaggagggcggccacggcgugaagggcugggccuucgacgacggcaacgacguguggaugggcagaaccaucagcgagaaguucagaagcggcuacgagaccuucaaggugaucgagggcuggagcaagcccaacagcaagcugcagaucaacagacaggugaucguggacagagacaacagaagcggcuacagcggcaucuucagcguggagggcaagagcugcaucaacagaugcuucuacguggagcugaucagaggcagaaagcaggagaccgaggugugguggaccagcaacagcaucgugguguucugcggcaccagcggcaccuacggcaccggcagcuggcccgacggcgccgacaucaaccugaugcccaucuga

SEQ ID NO: 174119 - RNA, 1410 nt, Artificial Sequence; identical to SEQ ID NO: 174100
  derived and/or modified CDS sequence (opt4) from neuraminidase__InfluenzaA__AAN01188

SEQ ID NO: 174120 - RNA, 1410 nt, Artificial Sequence
  derived and/or modified CDS sequence (opt4) from neuraminidase__InfluenzaA__AAN64883
augaaccccaaccagaagaucaucaccaucggcagcgugagccugaccaucgccaccaucugcuuccugaugcagaucgccauccuggugaccaccgugacccugcacuucaagcaguacgagugcaacagcccccccaacaaccaggugaugcugugcgagcccaccaucaucgagagaaacaucaccgagaucguguaccugaccaacaccaccaucgagaaggagaucugccccaagcuggccgaguacagaaacuggagcaagccccagugcaacaucaccggcuucgcccccuucagcaaggacaacagcaucagacugagcgccggcggcgacaucugggugaccagagagcccuacgugagcugcgaccccgacaagugcuaccaguucgcccugggccagggcaccacccugaacaacggccacagcaacgacaccgugcacgacagaacccccuacagaacccugcugaugaacgagcugggcgugcccuuccaccugggcaccaagcaggugugcaucgccuggagcagcagcagcugccacgacggcaaggccuggcugcacgugugcgugaccggcgacgacgagaacgccaccgccagcuucaucuacaacggcagacugguggacagcaucggcagcuggagcaagaagauccugagaacccaggagagcgagugcgugugcaucaacggcaccugcaccguggugaugaccgacggcagcgccagcggcaaggccgacaccaagauccuguucaucgaggagggcaagaucgugcacaccagccugcugagcggcagcgcccagcacguggaggagugcagcugcuaccccagauaccccggcgugagaugcgugugcagagacaacuggaagggcagcaacagacccaucguggacaucaacgugaaggacuacagcaucgugagcagcuacgugugcagcggccuggugggcgacacccccagaaagaacgacagcagcagcagcagccacugccuggaccccaacaacgaggagggcggccacggcgugaagggcugggccuucgacgacggcgacgacguguggaugggcagaaccaucagcgagaagcugagaagcggcuacgagaccuucaaggugaucgagggcuggagcaagcccaacagcaagcugcagaucaacagacaggugaucguggacagaggcaacagaagcggcuacagcggcaucuucagcguggagggcaagagcugcaucaacagaugcuucuacguggagcugaucagaggcagaaagcaggagaccgaggugcuguggaccagcaacagcaucgugguguucugcggcaccagcggcaccuacggcaccggcagcuggcccgacggcgccgacaucaaccugaugcccaucuga

SEQ ID NO: 174121 - RNA, 1410 nt, Artificial Sequence
  derived and/or modified CDS sequence (opt4) from neuraminidase__InfluenzaA__AAN64884
augaaccccaaccagaagaucaucaccaucggcagcgugagccugaccaucgccaccaucugcuuccugaugcagaucgccauccuggugaccaccgugacccugcacuucaagcaguacgagugcaacagcccccccaacaaccaggugaugcugugcgagcccaccaucaucgagagaaacaucaccgagaucguguaccugaccaacaccaccaucgagaaggagaucugccccaagcuggccgaguacagaaacuggagcaagccccagugcaacaucaccggcuucgcccccuucagcaaggacaacagcaucagacugagcgccggcggcgacaucugggugaccagagagcccuacgugagcugcgaccccgacaagugcuaccaguucgcccugggccagggcaccacccugaacaacggccacagcaacgacaccgugcacgacagaacccccuacagaacccugcugaugaacgagcugggcgugcccuuccaccugggcaccaagcaggugugcaucgccuggagcagcagcagcugccacgacggcaaggccuggcugcacgugugcgugaccggcgacgacgagaacgccaccgccagcuucaucuacaacggcagacugguggacagcaucggcagcuggagcaagaagauccugagaacccaggagagcgagugcgugugcaucaacggcaccugcaccguggugaugaccgacggcagcgccagcggcaaggccgacaccaagauccuguucaucgaggagggcaagaucgugcacaccagccugcugagcggcagcgcccagcacguggaggagugcagcugcuaccccagauaccccggcgugagaugcgugugcagagacaacuggaagggcagcaacagacccaucguggacaucaacgugaaggacuacagcaucgugagcagcuacgugugcagcggccuggugggcgacacccccagaaagaacgacagcagcagcagcagccacugccuggaccccaacaacgaggagggcggccacggcgugaagggcugggccuucgacgacggcaacgacguguggaugggcagaaccaucagcgagaagcugagaagcggcuacgagaccuucaaggugaucgagggcuggagcaagcccaacagcaagcugcagaucaacagacaggugaucguggacagaggcaacagaagcggcuacagcggcaucuucagcguggagggcaagagcugcaucaacagaugcuucuacguggagcugaucagaggcagaaagcaggagaccgaggugcuguggaccagcaacagcaucgugguguucugcggcaccagcggcaccuacggcaccggcagcuggcccgacggcgccgacaucaaccugaugcccaucuga

SEQ ID NO: 174122 - RNA, 1410 nt, Artificial Sequence; identical to SEQ ID NO: 174121
  derived and/or modified CDS sequence (opt4) from neuraminidase__InfluenzaA__AAN64885

SEQ ID NO: 174123 - RNA, 1410 nt, Artificial Sequence; identical to SEQ ID NO: 174121
  derived and/or modified CDS sequence (opt4) from neuraminidase__InfluenzaA__AAN64886

SEQ ID NO: 174124 - RNA, 1410 nt, Artificial Sequence; identical to SEQ ID NO: 174121
  derived and/or modified CDS sequence (opt4) from neuraminidase__InfluenzaA__AAN64887

SEQ ID NO: 174125 - RNA, 1410 nt, Artificial Sequence
  derived and/or modified CDS sequence (opt4) from neuraminidase__InfluenzaA__AAN64888
augaaccccaaccagaagaucaucaccaucggcagcgugagccugaccaucgccaccaucugcuuccugaugcagaucgugauccuggugaccaccgugacccugcacuucaagcaguacgagugcaacagcccccccaacaaccaggugaugcugugcgagcccaccaucaucgagagaaacaucaccgagaucguguaccugaccaacaccaccaucgagaaggagaucugccccaagcuggccgaguacagaaacuggagcaagccccagugcaacaucaccggcuucgcccccuucagcaaggacaacagcaucagacugagcgccggcggcgacaucugggugaccagagagcccuacgugagcugcgaccccgacaagugcuaccaguucgcccugggccagggcaccacccugaacaacggccacagcaacgacaccgugcacgacagaacccccuacagaacccugcugaugaacgagcugggcgugcccuuccaccugggcaccaagcaggugugcaucgccuggagcagcagcagcugccacgacggcaaggccuggcugcacgugugcgugaccggcgacgacaagaacgccaccgccagcuucaucuacaacggcagacugguggacagcaucggcagcuggagcaagaagauccugagaacccaggagagcgagugcgugugcaucaacggcaccugcaccguggugaugaccgacggcagcgccagcggcaaggccgacaccaagauccuguucaucgaggagggcaagaucgugcacaccagccugcugagcggcagcgcccagcacguggaggagugcagcugcuaccccagauaccccggcgugagaugcgugugcagagacaacuggaagggcagcaacagacccaucguggacaucaacgugaaggacuacagcaucgugagcagcuacgugugcagcggccuggugggcgacacccccagaaagaacgacagcagcagcagcagccacugccuggaccccaacaacgaggagggcggccacggcgugaagggcugggccuucgacgacggcaacgacguguggaugggcagaaccaucagcgagaagcugagaagcggcuacgagaccuucaaggugaucgagggcuggagcaagcccaacagcaagcugcagaucaacagacaggugaucguggacagaggcaacagaagcggcuacagcggcaucuucagcguggagggcaagagcugcaucaacagaugcuucuacguggagcugaucagaggcagaaaccaggagaccgaggugcuguggaccagcaacagcaucgugguguucugcggcaccagcggcaccuacggcaccggcagcuggcccgacggcgccgacaucaaccugaugcccaucuga

SEQ ID NO: 174126 - RNA, 1410 nt, Artificial Sequence; identical to SEQ ID NO: 174121
  derived and/or modified CDS sequence (opt4) from neuraminidase__InfluenzaA__AAN64889

SEQ ID NO: 174127 - RNA, 1410 nt, Artificial Sequence
  derived and/or modified CDS sequence (opt4) from neuraminidase__InfluenzaA__AAN64890
augaaccccaaccagaagaucaucaccaucggcagcgugagccugaccaucgccaccaucugcuuccugaugcagaucgccauccuggugaccaccgugacccugcacuucaagcaguacgagugcaacagcccccccaacaaccaggagaugcugugcgagcccaccaucaucgagagaaacaucaccgagaucguguaccugaccaacaccaccaucgagaaggagaucugccccaagcuggccgaguacagaaacuggagcaagccccagugcaacaucaccggcuucgcccccuucagcaaggacaacagcaucagacugagcgccggcggcgacaucugggugaccagagagcccuacgugagcugcgaccccgacaagugcuaccaguucgcccugggccagggcaccacccugaacaacggccacagcaacgacaccgugcacgacagaacccccuacagaacccugcugaugaacgagcugggcgugcccuuccaccugggcaccaagcaggugugcaucgccuggagcagcagcagcugccacgacggcaaggccuggcugcacgugugcgugaccggcgacgacgagaacgccaccgccagcuucaucuacaacggcagacugguggacagcaucggcagcuggagcaagaagauccugagaacccaggagagcgagugcgugugcaucaacggcaccugcaccguggugaugaccgacggcagcgccagcggcaaggccgacaccaagauccuguucaucgaggagggcaagaucgugcacaccagccugcugagcggcagcgcccagcacguggaggagugcagcugcuaccccagauaccccggcgugagaugcgugugcagagacaacuggaagggcagcaacagacccaucguggacaucaacgugaaggacuacagcaucgugagcagcuacgugugcagcggccuggugggcgacacccccagaaagaacgacagcagcagcagcagccacugccuggaccccaacaacgaggagggcggccacggcgugaagggcugggccuucgacgacggcaacgacguguggaugggcagaaccaucagcgagaagcugagaagcggcuacgagaccuucaaggugaucgagggcuggagcaagcccaacagcaagcugcagaucaacagacaggugaucguggacagaggcaacagaagcggcuacagcggcaucuucagcguggagggcaagagcugcaucaacagaugcuucuacguggagcugaucagaggcagaaagcaggagaccgaggugcuguggaccagcaacagcaucgugguguucugcggcaccagcggcaccuacggcaccggcagcuggcccgacggcgccgacaucaaccugaugcccaucuga

SEQ ID NO: 174128 - RNA, 1410 nt, Artificial Sequence; identical to SEQ ID NO: 174121
  derived and/or modified CDS sequence (opt4) from neuraminidase__InfluenzaA__AAN64891

SEQ ID NO: 174129 - RNA, 1410 nt, Artificial Sequence
  derived and/or modified CDS sequence (opt4) from neuraminidase__InfluenzaA__AAO46212
augaaccccaaccagaagaucaucaccaucggcagcgugagccugaccaucgagaccgugugcuuccugaugcagaucgccauccuggccaccaccgugacccugcacuucaagcagcacgagugcgacagccccgccagcaaccaggugaugcccugcgagcccaucaucaucgagagaaacaucaccgagaucguguaccugaacaacaccaccaucgagaaggagaucugccccgaggugguggaguacagaaacuggagcaagccccagugccagaucaccggcuucgcccccuucagcaaggacaacagcaucagacugagcgccggcggcgacaucugggugaccagagagcccuacgugagcugcgacaccggcaagugcuaccaguucgcccugggccagggcaccacccuggacaacaagcacagcaacggcaccauccacgacagaaucccccacagaacccugcugaugaacgagcugggcgugcccuuccaccugggcaccaagcaggugugcguggccuggagcagcagcagcugccacgacggcaaggccuggcugcacgugugcgugaccggcgacgacagaaacgccaccgccagcuucaucuacgacggcagacugguggacagcaucggcagcuggagccagaacauccugagaacccaggagagcgagugcgugugcaucaacggcaccugcaccguggugaugaccgacggcagcgccagcggcagagccgacaccagaauccuguucaucaaggagggcaagaucgugcacaucagcccccugagcggcagcgcccagcacaucgaggagugcagcugcuaccccagauaccccgacgugagaugcaucugcagagacaacuggaagggcagcaacagacccgugaucgacaucaacauggaggacuacagcaucgacagcagcuacgugugcagcggccuggugggcgacacccccagaaacgacgacagcagcagcaacagcaacugcagagaccccaacaacgagagaggcaaccccggcgugaagggcugggccuucgacaacggcgacgacguguggaugggcagaaccaucagcaaggaccugagaagcggcuacgagaccuucaaggugaucggcggcuggagcacccccaacagcaagagccaggugaacagacaggugaucguggacaacaacaacuggagcggcuacagcggcaucuucagcguggagggcaagagcugcaucaacagaugcuucuacguggagcugaucagaggcagaccccaggagaccagagugugguggaccagcaacagcaucgugguguucugcggcaccagcggcaccuacggcaccggcagcuggcccgacggcgccaacaucaacuucaugcccaucuga

SEQ ID NO: 174130 - RNA, 1410 nt, Artificial Sequence
  derived and/or modified CDS sequence (opt4) from neuraminidase__InfluenzaA__AAO46213
augaaccccaaccagaagaucaucaccaucgacagcgugagccugaccaucgccaccgugugcuuccugaugcagaucgccauccuggccaccaccgugacccugcacuucaagcagcacgagugcgacagccccgccagcaaccaggugaugcccugcgagcccaucaucaucgagagaaacaucaccgagaucguguaccugaacaacaccaccaucgagaaggagaucugccccgaggugguggaguacagaaacuggagcaagccccagugccagaucaccggcuucgcccccuucagcaaggacaacagcaucagacugagcgccggcggcgacaucugggugaccagagagcccuacgugagcugcgacaccggcaagugcuaccaguucgcccugggccagggcaccacccuggacaacaagcacagcaacggcaccauccacgacagaaucccccacagaacccugcugaugaacgagcugggcgugcccuuccaccugggcaccaagcaggugugcguggccuggagcagcagcagcugccacgacggcaaggccuggcugcacgugugcgugaccggcgacgacagaaacgccaccgccagcuucaucuacgacggcagacugguggacagcaucggcagcuggagccagaacauccugagaacccaggagagcgagugcgugugcaucaacggcaccugcaccguggugaugaccgacggcagcgccagcggcagagccgacaccagaauccuguucaucaaggagggcaagaucgugcacaucagcccccugagcggcagcgcccagcacaucgaggagugcagcugcuaccccagauaccccgacgugagaugcaucugcagagacaacuggaagggcagcaacagacccgugaucgacaucaacauggaggacuacagcaucgacagcagcuacgugugcagcggccuggugggcgacacccccagaaacgacgacagcagcagcaacagcaacugcagagaccccaacaacgagagaggcaaccccggcgugaagggcugggccuucgacaacggcgacgacguguggaugggcagaaccaucagcaaggaccugagaagcggcuacgagaccuucaaggugaucggcggcuggagcacccccaacagcaagagccaggugaacagacaggugaucguggacaacaacaacuggagcggcuacagcggcaucuucagcguggagggcaagagcugcaucaacagaugcuucuacguggagcugaucagaggcagaccccaggagaccagagugugguggaccagcaacagcaucgugguguucugcggcaccagcggcaccuacggcaccggcagcuggcccgacggcgccaacaucaacuucaugcccaucuga

SEQ ID NO: 174131 - RNA, 1410 nt, Artificial Sequence
  derived and/or modified CDS sequence (opt4) from neuraminidase__InfluenzaA__AAO46214
augaaccccaaccagaagaucaucaccaucggcagcgugagccugaccaucgccaccgugugcuuccugaugcagaucgccauccuggccaccaccgugacccugcacuucaagcagcacgagugcgacagccccgccagcaaccaggugaugcccugcgagcccaucaucaucgagagaaacaucaccgagaucguguaccugaacaacaccaccaucgagaaggagaucugccccgaggccguggaguacagaaacuggagcaagccccagugccagaucaccggcuucgcccccuucagcaaggacaacagcaucagacugagcgccggcggcgacaucugggugaccagagagcccuacgugagcugcgaccccggcaagugcuaccaguucgcccugggccagggcaccacccuggacaacaagcacagcaacggcaccauccacgacagaaucccccacagaacccugcugaugaacgagcugggcgugcccuuccaccugggcaccaagcaggugugcguggccuggagcagcagcagcugccacgacggcaaggccuggcugcacgugugcgugaccggcgacgacagaaacgccaccgccagcuucaucuacgacggcagacugguggacagcaucggcagcuggagccagaacauccugagaacccaggagagcgagugcgugugcaucaacggcaucugcaccguggugaugaccgacggcagcgccagcggcagagccgacaccagaauccuguucaucgaggagggcaagaucgugcacaucagcccccugagcggcagcgcccagcacguggaggagugcagcugcuaccccagauaccccgacgugagaugcaucugcagagacaacuggaagggcagcaacagacccgugaucgacaucaacauggaggacuacagcaucgacagcagcuacgugugcagcggccuggugggcgacacccccagaaacgacgacagaagcagcaacagcaacugcagagaccccaacaacgagagaggcaaccccggcgugaagggcugggccuucgacaacggcgacgacguguggaugggcagaaccaucagcaaggaccugagaagcggcuacgagaccuucaaggugaucggcggcuggagcacccccaacagcaagagccaggugaacagacaggugaucguggacaacaacaacuggagcggcuacagcggcaucuucagcguggagggcaagagcugcaucaacagaugcuucuacguggagcugaucagaggcagacagcaggagaccagagugugguggaccagcaacagcaucgugguguucugcggcaccagcggcaccuacggcaccggcagcuggcccgacggcgccaacaucaacuucaugcccaucuga

SEQ ID NO: 174132 - RNA, 1410 nt, Artificial Sequence
  derived and/or modified CDS sequence (opt4) from neuraminidase__InfluenzaA__AAO46215
augaaccccaaccagaagaucaucaccaucggcagcgugagccugaccaucgccaccgugugcuuccugaugcagaucgccauccuggccaccaccgugacccugcacuucaagcagcacgagugcgacagccccaccagcaaccaggugaugcccugcgagcccaucaucaucgagagaaacaucaccgagaucguguaccugaacaacaccaccaucgagaaggagaucugccccgaggugguggaguacagaaacuggagcaagccccagugccagaucaccggcuucgcccccuucagcaaggacaacagcaucagacugagcgccggcggcgacaucugggugaccagagagcccuacgugagcugcgaccccggcaagugcuaccaguucgcccugggccagggcaccacccuggacaacaagcacagcaacggcaccauccacgacagaaucccccacagaacccugcugaugaacgagcugggcgugcccuuccaccugggcaccaagcaggugugcguggccuggagcagcagcagcugccacgacggcaaggccuggcugcacgugugcgugaccggcgacgacagaaacgccaccgccagcuucaucuacgacggcagacugguggacagcaucggcagcuggagccagaacauccugagaacccaggagagcgagugcgugugcaucaacggcaccugcaccguggugaugaccgacggcagcgccagcggcagagccgacaccagaauccuguucaucaaggagggcaagaucgugcacaucagcccccugagcggcagcgcccagcacaucgaggagugcagcugcuaccccagauaccccgacgugagaugcaucugcagagacaacuggaagggcagcaacagacccgugaucgacaucaacauggaggacuacagcaucgacagcagcuacgugugcagcggccuggugggcgacacccccagaaacggcgacagcagcagcaacagcaacugcagagaccccaacaacgagagaggcaaccccggcgugaagggcugggccuucgacaacggcgacgacguguggaugggcagaaccaucagcaaggagagcagaagcggcuacgagaccuucaaggugaucggcggcuggagcacccccaacagcaagagccaggugaacagacaggugaucguggacaacaacaacuggagcggcuacagcggcaucuucagcguggagggcaagagcugcaucaacagaugcuucuacguggagcugaucagaggcagaccccaggagaccagagugugguggaccagcaacagcaucgugguguucugcggcaccagcggcaccuacggcaccggcagcuggcccgacggcgccaacaucaacuucaugcccaucuga

SEQ ID NO: 174133 - RNA, 1410 nt, Artificial Sequence
  derived and/or modified CDS sequence (opt4) from neuraminidase__InfluenzaA__AAO46216
augaaccccaaccagaagaucaucaccaucggcagcgugagccugaccaucgccaccgugugcuuccugaugcagaucgccauccuggccaccaccgugacccugcacuucaagcagcacgagugcgacagccccgccagcaaccaggugaugcccugcgagcccaucaucaucgagagaaacaucaccgagaucguguaccugaacaacaccaccaucgagaaggagaucugccccgaggugguggaguacagaaacuggagcaagccccagugccagaucaccggcuucgcccccuucagcaaggacaacagcaucagacugagcgccggcggcgacaucugggugaccagagagcccuacgugagcugcgaccccagcaagugcuaccaguucgcccugggccagggcaccacccuggagaacaagcacagcaacggcaccaagcacgacagaaucccccacagaacccugcugaugaacgagcugggcgugcccuuccaccugggcaccaagcaggugugcguggccuggagcagcagcagcugccacgacggcaaggccuggcugcacgugugcgugaccggcgacgacagaaacgccaccgccagcuucaucuacgagggcagacugguggacagcaucgugagcuggagccagaacauccugagaacccaggagagcgagugcgugugcaucaacggcaccugcaccguggugaugaccgacggcagcgccagcggcagagccgacaccagaauccuguucaucaaggagggcaagaucgugcacaucagcccccugagcggcagcgcccagcacaucgaggagugcagcugcuaccccagauaccccgacgugagaugcaucugcagagacaacuggaagggcagcaacagacccgugaucgacaucaacauggaggacuacagcaucgacagcagcuacgugugcagcggccuggugggcgacacccccagaaacgacgacagcagcagcaacagcaacugcagagaccccaacaacgagagaggcaaccccggcgugaagggcugggccuucgacaacggcgacgacguguggaugggcagaaccaucagcaaggacagcagaagcggcuacgagaccuucaaggugaucggcggcuggagcacccccaacagcaagagccaggugaacagacaggugaucguggacagcaacaacuggagcggcuacagcggcaucuucagcguggagggcaagagcugcaucaacagaugcuucuacguggagcugaucagaggcagaccccaggagaccagagugugguggaccagcaacagcaucgugguguucugcggcaccagcggcaccuacggcaccggcagcuggcccgacggcgccaacaucaacuucaugcccaucuga

SEQ ID NO: 174134 - RNA, 1410 nt, Artificial Sequence
  derived and/or modified CDS sequence (opt4) from neuraminidase__InfluenzaA__AAO46217
augaaccccaaccagaagaucaucaccaucggcagcgugagccugaccaucgccaccgugugcuuccugaugcagaucgccauccuggccaccaccgugacccugcacuucaagcagcacgagugcgacagccccgccagcaaccaggugaugcccugcgagcccaucaucaucgagagaaacaucaccgagaucguguaccugaacaacaccaccaucgagaaggagaucugccccgaggugguggaguacagaaacuggagcaagccccagugccagaucaccggcuucgcccccuucagcaaggacaacagcaucagacugagcgccggcggcgacaucugggugaccagagagcccuacgugagcugcgaccccagcaagugcuaccaguucgcccugggccagggcaccacccuggacaacaagcacagcaacggcaccauccacgacagaaucccccacagaacccugcugaugaacgagcugggcgugcccuuccaccugggcaccaagcaggugugcguggccuggagcagcagcagcugccacgacggcaaggccuggcugcacgugugcgugaccggcgacgacagaaacgccaccgccagcuucaucuacgacggcagacuggaggacagcaucggcagcuggagccagaacauccugagaacccaggagagcgagugcgugugcaucaacggcaccugcaccguggugaugaccgacggcagcgccagcggcagagccgacaccagaauccuguucaucaaggagggcaagaucgugcacaucagcccccugagcggcagcgcccagcacaucgaggagugcagcugcuaccccagauaccccgacgugagaugcaucugcagagacaacuggaagggcagcaacagacccgugcuggacaucagcauggaggacuacagcaucgacagcagcuacgugugcagcggccuggugggcgacacccccagaaacgacgacagcagcagcaacagcaacugcagagaccccaacaacgagagaggcaaccccggcgugaagggcugggccuucgacaacggcgacgacguguggaugggcagaaccaucagcaaggaccugagaagcggcuacgagaccuucaaggugaucggcggcuggagcacccccaacagcaagagccaggugaacagacaggugaucguggacaacaacaacuggagcggcuacagcggcaucuucagcguggagggcaagagcugcaucaacagaugcuucuacguggagcugaucagaggcagaagccaggagaccagagugugguggaccagcaacagcaucgugguguucugcggcaccagcggcaccuacggcaccggcagcuggcccgacggcgccaacaucaacuucaugcccaucuga

SEQ ID NO: 174135 - RNA, 1410 nt, Artificial Sequence
  derived and/or modified CDS sequence (opt4) from neuraminidase__InfluenzaA__AAO46218
augaaccccaaccagaagaucaucaccaucggcagcgugagccugaccaucgccaccgugugcuuccugaugcagaucgccauccuggccaccaccgugacccugcacuucaagcagcacgagugcgacagccccgccagcaaccaggugaugcccugcgagcccaucaucaucgagagaaacaucaccgagaucguguaccugaacaacaccaccaucgagaaggagaucugccccgaggugguggaguacagaaacuggagcaagccccagugccagaucaccggcuucgcccccuucagcaaggacaacagcaucagacugagcgccggcggcgacaucugggugaccagagagcccuacgugagcugcgaccccggcaagugcuaccaguucgcccugggccagggcaccacccuggacaacaagcacagcaacggcaccauccacgacagaaucccccacagaacccugcugaugaacgagcugggcgugcccuuccaccugggcaccaagcaggugugcguggccuggagcagcagcagcugccacgacggcaaggccuggcugcacgugugcgugaccggcgacgacagaaacgccaccgccagcuucaucuacgacggcagacuggaggacagcaucggcagcuggagccagaacauccugagaacccaggagagcgagugcgugugcaucaacggcaccugcaccguggugaugaccgacggcagcgccagcggcagagccgacaccagaauccuguucaucaaggagggcaagaucgugcacaucagcccccugagcggcagcgcccagcacaucgaggagugcagcugcuaccccagauaccccgacgugagaugcaucugcagagacaacuggaagggcagcaacagacccgugcuggacaucagcauggaggacuacagcaucggcagcagcuacgugugcagcggccuggugggcgacacccccagaaacgacgacagcagcagcaacagcaacugcagagaccccaacaacgagagaggcaaccccggcgugaagggcugggccuucgacaacggcgacgacguguggaugggcagaaccaucagcaaggaccugagaagcggcuacgagaccuucaaggugaucggcggcuggagcacccccaacagcaagagccaggugaacagacaggugaucguggacaacaacaacuggagcggcuacagcggcaucuucagcguggagggcaagagcugcaucaacagaugcuucuacguggagcugaucagaggcagaagccaggagaccagagugugguggaccagcaacagcaucgugguguucugcggcaccagcggcaccuacggcaccggcagcuggcccgacggcgccaacaucaacuucaugcccaucuga

SEQ ID NO: 174136 - RNA, 1410 nt, Artificial Sequence
  derived and/or modified CDS sequence (opt4) from neuraminidase__InfluenzaA__AAO46220
augaaccccaaccagaagaucaucaccaucggcagcgugagccugaccaucgccaccgugugcuuccugaugcagaucgccauccuggccaccaccgugacccugcacuucaagcagcacgagugcgacagccccgccagcaaccaggugaugcccugcgagcccaucaucaucgagagaaacaucaccgagaucguguaccugaacaacaccaccaucgagaaggagaucugccccgaggccguggaguacagaaacuggagcaagccccagugccagaucaccggcuucgcccccuucagcaaggacaacagcaucagacugagcgccggcggcgacaucugggugaccagagagcccuacgugagcugcgaccccggcaagugcuaccaguucgcccugggccagggcaccacccuggacaacaagcacagcaacgacaccauccacgacagaaucccccacagaacccugcugaugaacgagcugggcgugcccuuccaccugggcaccagacaggugugcguggccuggagcagcagcagcugccacgacggcaaggccuggcugcacgugugcgugaccggcgacgacagaaacgccaccgccagcuucaucuacgacggcagacugguggacagcaucggcagcuggagccagaacauccugagaacccaggagagcgagugcgugugcaucaacggcaucugcaccguggugaugaccgacggcagcgccagcggcagagccgacaccagaauccuguucaucgaggagggcaagaucgugcacaucagcccccugagcggcagcgcccagcacguggaggagugcagcugcuaccccagauaccccgacgugagaugcaucugcagagacaacuggaagggcagcaacagacccgugaucgacaucaacauggaggacuacagcaucgacagcagcuacgugugcagcggccuggugggcgacacccccagaaacgacgacagaagcagcaacagcaacugcagagaccccaacaacgagagaggcaaccccggcgugaagggcugggccuucgacaacggcgacgacguguggaugggcagaaccaucagcaaggaccugagaagcggcuacgagaccuucaaggugaucggcggcuggagcacccccaacagcaagagccaggugaacagacaggugaucguggacaacaacaacuggagcggcuacagcggcaucuucagcguggagggcaagagcugcaucaacagaugcuucuacguggagcugaucagaggcagacagcaggagaccagagugugguggaccagcaacagcaucgugguguucugcggcaccagcggcaccuacggcaccggcagcuggcccgacggcgccaacaucaacuucaugcccaucuga

SEQ ID NO: 174137 - RNA, 1410 nt, Artificial Sequence
  derived and/or modified CDS sequence (opt4) from neuraminidase__InfluenzaA__AAO46221
augaaccccaaccagaagaucaucaccaucggcagcgugagccugaccaucgccaccgugugcuuccugaugcagaucgccauccuggccaccaccgugacccugcacuucaagcagcacgagugcgacagccccgccagcaaccaggugaugcccugcgagcccaucaucaucgagagaaacaucaccgagaucguguaccugaacaacaccaccaucgagaaggagaucugccccgaggccgccgaguacagaaacuggagcaagccccagugccagaucaccggcuucgcccccuucagcaaggacaacagcaucagacugagcgccggcggcgacaucugggugaccagagagcccuacgugagcugcgaccccggcaagugcuaccaguucgcccugggccagggcaccacccuggacaacaagcacagcaacgacaccauccacgacagaaucccccacagaacccugcugaugaacgagcugggcgugcccuuccaccugggcaccagacaggugugcguggccuggagcagcagcagcugccacgacggcaaggccuggcugcacgugugcgugaccggcgacgacagaaacgccaccgccagcuucaucuacgacggcagacugguggacagcaucggcagcuggagccagaacauccugagaacccaggagagcgagugcgugugcaucaacggcaucugcaccguggugaugaccgacggcagcgccagcggcagagccgacaccagaauccuguucaucgaggagggcaagaucgugcacaucagcccccugagcggcagcgcccagcacguggaggagugcagcugcuaccccagauaccccgacgugagaugcaucugcagagacaacuggaagggcagcaacagacccgugaucgacaucaacauggaggacuacagcaucgacagcagcuacgugugcagcggccuggugggcgacacccccagaaacgacgacagaagcagcaacagcaacugcagagaccccaacaacgagagaggcaaccccggcgugaagggcugggccuucgacaacggcgacgacguguggaugggcagaaccaucagcaaggaccugagaagcggcuacgagaccuucaaggugaucggcggcuggagcacccccaacagcaagagccaggugaacagacaggugaucguggacaacaacaacuggagcggcuacagcggcaucuucagcguggagggcaagagcugcaucaacagaugcuucuacguggagcugaucagaggcagacagcaggagaccagagugugguggaccagcaacagcaucgugguguucugcggcaccagcggcaccuacggcaccggcagcuggcccgacggcgccaacaucaacuucaugcccaucuga

SEQ ID NO: 174138 - RNA, 1410 nt, Artificial Sequence
  derived and/or modified CDS sequence (opt4) from neuraminidase__InfluenzaA__AAO46223
augaaccccaaccagaagaucaucaccaucggcagcgugagccugaccaucgccaccgugugcuuccugaugcagaucgccauccuggugaccaccgugacccugcacuucaagcagcacgagugcgacagccccgccagcaaccaggugaugcccugcgagcccaucaucaucgagagaaacaucaccgagaucguguaccugaacaacaccaccaucgagaaggagaucugccccgaggugguggaguacagaaacuggagcaagccccagugccagaucaccggcuucgcccccuucagcaaggacaacagcaucagacugagcgccggcggcgacaucugggugaccagagagcccuacgugagcugcgaccccggcaagugcuaccaguucgcccugggccagggcaccacccuggacaacaagcacagcaacgacaccauccacgacagaaucccccacagaacccugcugaugaacgagcugggcgugcccuuccaccugggcaccagacaggugugcguggccuggagcagcagcagcugccacgacggcaaggccuggcugcacgugugcgugaccggcgacgacaagaacgccaccgccagcuucaucuacgacggcagacugguggacagcaucggcagcuggagccagaacauccugagaacccaggagagcgagugcgugugcaucaacggcaccugcaccguggugaugaccgacggcagcgccagcggcagagccgacaccagaauccuguucaucgaggagggcaagaucgugcacaucagcccccugagcggcagcgcccagcacguggaggagugcagcugcuaccccagauaccccgacgugagaugcaucugcagagacaacuggaagggcagcaacagacccgugaucgacaucaacauggaggacuacagcaucgacagcagcuacgugugcagcggccuggugggcgacacccccagaaacgacgacagaagcagcaacagcaacugcagagaccccaacaacgagagaggcaaccccggcgugaagggcugggccuucgacaacggcgacgacguguggaugggcagaaccaucagcaaggaccugagaagcggcuacgagaccuucaaggugaucggcggcuggagcacccccaacagcaagagccagaucaacagacaggugaucguggacagcaacaacuggagcggcuacagcggcaucuucagcguggagggcaagagcugcaucaacagaugcuucuacguggagcugaucagaggcagaaagcaggagaccagagugugguggaccagcaacagcaucgugguguucugcggcaccagcggcaccuacggcaccggcagcuggcccgacggcgccaacaucaacuucaugcccaucuga

SEQ ID NO: 174139 - RNA, 1410 nt, Artificial Sequence; identical to SEQ ID NO: 174138
  derived and/or modified CDS sequence (opt4) from neuraminidase__InfluenzaA__AAO46224

SEQ ID NO: 174140 - RNA, 1410 nt, Artificial Sequence
  derived and/or modified CDS sequence (opt4) from neuraminidase__InfluenzaA__AAO46225
augaaccccaaccagaagaucaucaccaucggcuucgugagccugaucaucgccaccgugugcuuccugaugcagaucgccauccuggccaccaccgugacccugcacuucaagcagcacgagugcgacagccccgccagcaaccaggugaugcccugcgagcccaucaucaucgagagaaacaucaccaagaucguguaccugaacaacaccaccaucgagaaggagaucugccccgaggugguggaguacagaaacuggagcaagccccagugccacaucaccggcuucgcccccuucagcaaggacaacagcaucagacugagcgccggcggcgacaucugggugaccagagagcccuacgugagcugcgaccccggcaagugcuaccaguucgcccugggccagggcaccacccuggacaacaagcacagcaacgacaccauccacgacagaaucccccacagaacccugcugaugaacgagcugggcgugcccuuccaccugggcaccagacaggugugcguggccuggagcagcagcagcugccacgacggcaaggccuggcugcacgugugcgugaccggcgacgacaagaacgccaccgccagcuucaucuacgacggcagacugguggacagcaucggcagcuggagccacaacauccugagaacccaggagagcgagugcgugugcaucaacggcaccugcaccguggugaugaccgacggcagcgccagcggcagagccgacaccagaauccuguucaucaaggagggcaagaucgugcacaucagcccccugagcggcagcgcccagcacguggaggagugcagcugcuaccccagauaccccgacgugagaugcaucugcagagacaacuggaagggcagcaacagacccgugaucgacaucaacauggaggacuacagcaucgacagcagcuacgugugcagcggccuggugggcgacacccccagaaacaacgacggcagcagcaacagcaacugcagagaccccaacaacgagagaggcaaccccggcgugaagggcugggccuucgacaacggcgacgacguguggaugggcagaaccaucagcaaggaccugagaagcggcuacgagaccuucaaggugaucggcggcuggagcacccccaacagcaagagccaggugaacagacaggugaucguggacaacaacaacuggagcggcuacagcggcaucuucagcguggagggcaagagcugcaucaacagaugcuucuacguggagcugaucagaggcagacagcaggagaccagagugugguggaccagcaacagcaucgugguguucugcggcaccagcggcaccuacggcaccggcagcuggcccgacggcgccaacaucaacuucaugcccaucuga

SEQ ID NO: 174141 - RNA, 1410 nt, Artificial Sequence
  derived and/or modified CDS sequence (opt4) from neuraminidase__InfluenzaA__AAO46226
augaaccccaaccagaagaucaucaccaucggcagcgugagccugaccaucgccaccgugugcuuccugaugcagaucgccauccuggugaccaccgugacccugcacuucaagcagcacgagugcgacagccccgccagcaaccaggugaugcccugcgagcccaucaucaucgagagaaacaucaccgagaucguguaccugaacaacaccaccaucgagaaggagaucugccccgaggugguggaguacagaaacuggagcaagccccagugccagaucaccggcuucgcccccuucagcaaggacaacagcaucagacugagcgccggcggcgacaucugggugaccagagagcccuacgugagcugcgaccccggcaagugcuaccaguucgcccugggccagggcaccacccuggacaacaagcacagcaacgacaccauccacgacagaaucccccacagaacccugcugaugaacgagcugggcgugcccuuccaccugggcaccagacaggugugcguggccuggagcagcagcagcugccacgacggcaaggccuggcugcacgugugcgugaccggcgacgacgagaacgccaccgccagcuucaucuacgacggcagacugguggacagcaucggcagcuggagccagaacauccugagaacccaggagagcgagugcgugugcaucaacggcaccugcaccguggugaugaccgacggcagcgccagcggcagagccgacaccagaauccuguucaucgaggagggcaagaucgugcacaucagcccccugagcggcagcgcccagcacguggaggagugcagcugcuaccccagauaccccgacgugagaugcaucugcagagacaacuggaagggcagcaacagacccgugaucgacaucaacauggaggacuacagcaucgacagcagcuacgugugcagcggccuggugggcgacacccccagaaacgacgacagaagcagcaacagcaacugcagagaccccaacaacgagagaggcaaccccggcgugaagggcugggccuucgacaacggcgacgacguguggaugggcagaaccaucagcaaggaccugagaagcggcuacgagaccuucaaggugaucggcggcuggagcacccccaacagcaagagccagaucaacagacaggugaucguggacagcaacaacuggagcggcuacagcggcaucuucagcguggagggcaagagcugcaucaacagaugcuucuacguggagcugaucagaggcagacagcaggagaccagagugugguggaccagcaacagcaucgugguguucugcggcaccagcggcaccuacggcaccggcagcuggcccgacggcgccaacaucaacuucaugcccaucuga

SEQ ID NO: 174142 - RNA, 1410 nt, Artificial Sequence
  derived and/or modified CDS sequence (opt4) from neuraminidase__InfluenzaA__AAO46229
augaaccccaaccagaagaucaucaccaucggcagcgugagccugaccaucgccaccgugugcuuccugaugcagaucgccauccuggugaccaccgugacccugcacuucaagcagcacgagugcgacagccccgccagcaaccaggugaugcccugcgagcccaucaucaucgagagaaacaucaccgagaucauguaccugaacaacaccaccaucgagaaggagaucugccccgaggugguggaguacagaaacuggagcaagccccagugccagaucaccggcuucgcccccuucagcaaggacaacagcaucagacugagcgccggcggcgacaucugggugaccagagagcccuacgugagcugcgaccccggcaagugcuaccaguucgcccugggccagggcaccacccuggacaacaagcacagcaacgacaccauccacgacagaaucccccacagaacccugcugaugaacgagcugggcgugcccuuccaccugggcaccagacaggugugcguggccuggagcagcagcagcugccacgacggcaaggccuggcugcacgugugcgugaccggcgacgacaagaacgccaccgccagcuucaucuacgacggcagacugguggacagcaucggcagcuggagccagaacauccugagaacccaggagagcgagugcgugugcaucaacggcaccugcaccguggugaugaccgacggcagcgccagcggcagagccgacaccagaauccuguucaucgaggagggcaagaucgugcacaucagcccccugagcggcagcgcccagcacguggaggagugcagcugcuaccccagauaccccgacgugagaugcaucugcagagacaacuggaagggcagcaacagacccaucaucgacaucaacauggaggacuacagcaucgacagcagcuacgugugcagcggccuggugggcgacacccccagaaacgacgacagaagcagcaacagcaacugcagaaaccccaacaacgagagaggcaaccccggcgugaagggcugggccuucgacaacggcgacgacguguggaugggcagaaccaucagcaaggaccugagaagcggcuacgagaccuucaaggugaucggcggcuggagcacccccaacagcaagagccagaucaacagacaggugaucguggacagcaacaacuggagcggcuacagcggcaucuucagcguggagggcaagagcugcaucaacagaugcuucuacguggagcugaucagaggcagacagcaggagaccagagugugguggaccagcaacagcaucgugguguucugcggcaccagcggcaccuacggcaccggcagcuggcccgacggcgccaacaucaacuucaugcccaucuga

SEQ ID NO: 174143 - RNA, 1410 nt, Artificial Sequence
  derived and/or modified CDS sequence (opt4) from neuraminidase__InfluenzaA__AAO46230
augaaccccaaccagaagaucaucaccaucggcagcgugagccugaccaucgccaccgugugcuuccugaugcagaucgccauccuggugaccaccgugacccugcacuucaagcagcacgagugcgacagccccgccagcaaccaggugaugcccugcgagcccaucaucaucgagagaaaccugaccgagaucguguaccugaacaacaccaccaucgagaaggagaucugccccgaggugguggaguacagaaacuggagcaagccccagugccagaucaccggcuucgcccccuucagcaaggacaacagcaucagacugagcgccggcggcgacaucugggugaccagagagcccuacgugagcugcgaccccggcaagugcuaccaguucgcccugggccagggcaccacccuggacaacaagcacagcaacgacaccauccacgacagaaucccccacagaacccugcugaugaacgagcugggcgugcccuuccaccugggcaccagacaggugugcguggccuggagcagcagcagcugccacgacggcaaggccuggcugcacgugugcgugaccggcgacgacaagaacgccaccgccagcuucaucuacgacggcagacugguggacagcaucggcagcuggagccagaacauccugagaacccaggagagcgagugcgugugcaucaacggcaccugcaccguggugaugaccgacggcagcgccagcggcagagccgacaccagaauccuguucaucgaggagggcaagaucgugcacaucagcccccugagcggcagcgcccagcacguggaggagugcagcugcuaccccagauaccccgacgugagaugcaucugcagagacaacuggaagggcagcaacagacccgugaucgacaucaacauggaggacuacagcaucgacagcagcuacgugugcagcggccuggugggcgacacccccagaaacgacgacagaagcagcaacagcaacugcagagaccccaacaacgagagaggcaaccccggcgugaagggcugggccuucgacaacggcgacgacguguggaugggcagaaccaucagcaaggaccugagaagcggcuacgagaccuucaaggugaucggcggcuggagcacccccaacagcaagagccagaucaacagacaggugaucguggacagcaacaacuggagcggcuacagcggcaucuucagcguggagggcaagagcugcaucaacagaugcuucuacguggagcugaucagaggcagacagcaggagaccagagugugguggaccagcaacagcaucgugguguucugcggcaccagcggcaccuacggcaccggcagcuggcccgacggcgccaacaucaacuucaugcccaucuga

SEQ ID NO: 174144 - RNA, 1410 nt, Artificial Sequence
  derived and/or modified CDS sequence (opt4) from neuraminidase__InfluenzaA__AAO46231
augaaccccaaccagaagaucaucaccaucggcagcgugagccugaccaucgccaccgugugcuuccugaugcagaucgccauccuggugaccaccgugacccugcacuucaagcagcacgacugcgacagccccgccagcaaccaggugaugcccugcgagcccaucaucaucgagagaaacaucaccgagaucguguaccugaacaacaccaccaucgagaaggagaucugccccaaggugguggaguacagaaacuggagcaagccccagugccagaucaccggcuucgcccccuucagcaaggacaacagcaucagacugagcgccggcggcgacaucugggugaccagagagcccuacgugagcugcgaccccgugaagugcuaccaguucgcccugggccagggcaccacccuggacaacaagcacagcaacgacaccgugcacgacagaaucccccacagaacccugcugaugaacgagcugggcgugcccuuccaccugggcaccagacaggugugcaucgccuggagcagcagcagcugccacgacggcaaggccuggcugcacgugugcgugaccggcgacgacaagaacgccaccgccagcuucaucuacgacggcagacugguggacagcaucggcagcuggagccagaacauccugagaacccaggagagcgagugcgugugcaucaacggcaccugcaccguggugaugaccgacggcagcgccagcggcagagccgacaccagaauccuguucaucgaggagggcaagaucgugcacaucagcccccugagcggcagcgcccagcacguggaggagugcagcugcuaccccagauaccccgacgugagaugcaucugcagagacaacuggaagggcagcaacagacccgugaucgacaucaacauggaggacuacagcaucgacagcagcuacgugugcagcggccuggugggcgacacccccagaaacgacgacagaagcagcaacagcaacugcagaaaccccaacaacgagagaggcaaccccggcgugaagggcugggccuucgacaacggcgacgacguguggaugggcagaaccaucagcaaggaccugagaagcggcuacgagaccuucaaggugaucggcggcuggagcacccccaacagcaagagccagaucaacagacaggugaucguggacagcaacaacuggagcggcuacagcggcaucuucagcguggagggcaagagcugcaucaacagaugcuucuacguggagcugaucagaggcagacagcaggagaccagagugugguggaccagcaacagcaucgugguguucugcggcaccagcggcaccuacggcaccggcagcuggcccgacggcgccaacaucaacuucaugcccaucuga

SEQ ID NO: 174145 - RNA, 1410 nt, Artificial Sequence
  derived and/or modified CDS sequence (opt4) from neuraminidase__InfluenzaA__AAO46232
augaaccccaaccagaagaucaucaccaucggcagcgugagccugaccaucgccaccgugugcuuccugaugcagaucgccauccuggugaccaccgugacccugcacuucaagcagcacgagugcgacagccccgccagcaaccaggugaugcccugcgagcccaccaucaucgagagaaacaucaccgagaucguguaccugaacaacaccaccaucgagaaggagaucugccccaaggugguggaguacagaaacuggagcaagccccagugccagaucaccggcuucgcccccuucagcaaggacaacagcaucagacugagcgccggcggcgacaucugggugaccagagagcccuacgugagcugcgaccccggcaagugcuaccaguucgcccugggccagggcaccacccuggacaacaagcacagcaacgacaccauccacgacagaaucccccacagaacccugcugaugaacgagcugggcgugcccuuccaccugggcaccagacaggugugcaucgccuggagcagcagcagcugccacgacggcaaggccuggcugcacgugugcgugaccggcgacgacaagaacgccaccgccagcuucaucuacgacggcagacugguggacagcaucggcagcuggagccagaacauccugagaacccaggagagcgagugcgugugcaucaacggcaccugcaccguggugaugaccgacggcagcgccagcggcagagccgacaccagaauccuguucaucgaggagggcaagaucgugcacaucagcccccugagcggcagcgcccagcacguggaggagugcagcugcuaccccagauaccccgacgugagaugcaucugcagagacaacuggaagggcagcaacagacccaucaucgacaucaacauggaggacuacagcaucgacagcagcuacgugugcagcggccuggugggcgacacccccagaaacgacgacagaagcagcaacagcaacugcagaaaccccaacaacgagagaggcaaccccggcgugaagggcugggccuucgacaacggcgacgacguguggaugggcagaaccaucagcaaggaccugagaagcggcuacgagaccuucaaggugaucggcggcuggagcacccccaacagcaagagccagaucaacagacaggugaucguggacagcaacaacuggagcggcuacagcggcaucuucagcguggagggcaagagcugcaucaacagaugcuucuacguggagcugaucagaggcagacagcaggagaccagagugugguggaccagcaacagcaucgugguguucugcggcaccagcggcaccuacggcaccggcagcuggcccgacggcgccaacaucaacuucaugcccaucuga

SEQ ID NO: 174146 - RNA, 1410 nt, Artificial Sequence
  derived and/or modified CDS sequence (opt4) from neuraminidase__InfluenzaA__AAO46233
augaaccccaaccagaagaucaucaccaucggcagcgugagccugaccaucgccgccgugugcuuccugaugcagaucgccauccuggugaccaccgugacccugcacuucaagcagcacgagugcgacagccccgccagcaaccaggugaugcccugcgagcccaucaucaucgagagaaacaucaccgagaucguguaccugaacaacaccaccaucgagaaggagaucugccccaaggugguggaguacagaaacuggagcaagccccagugccagaucaccggcuucgcccccuucagcaaggacaacagcaucagacugagcgccggcggcgacaucugggugaccagagagcccuacgugagcugcgaccccggcaagugcuaccaguucgcccugggccagggcaccacccuggacaacaagcacagcaacgacaccauccacgacagaaucccccacagaacccugcugaugaacgagcugggcgugcccuuccaccugggcaccagacaggugugcaucgccuggagcagcagcagcugccacgacggcaaggccuggcugcacgugugcgugaccggcgacgacaagaacgccaccgccagcuucaucuacgacggcagacugguggacagcaucggcagcuggagccagaacauccugagaacccaggagagcgagugcgugugcaucaacggcaccugcaccguggugaugaccgacggcagcgccagcggcagagccgacaccagaauccuguucaucgaggagggcaagaucgugcacaucagcccccugagcggcagcgcccagcacguggaggagugcagcugcuaccccagauaccccgacgugagaugcaucugcagagacaacuggaagggcagcaacagacccgugguggacaucaacauggaggacuacagcaucgacagcagcuacgugugcagcggccuggugggcgacacccccagaaacgacgacagaagcagcaacagcaacugcagaaaccccaacaacgagagaggcaaccccggcgugaagggcugggccuucgacaacggcgacgacguguggaugggcagaaccaucagcaaggaccugagaagcggcuacgagaccuucaaggugaucggcggcuggagcacccccaacagcaagagccagaucaacagacaggugaucguggacagcaacaacagaagcggcuacagcggcaucuucagcguggagggcaagggcugcaucaacagaugcuucuacguggagcugaucagaggcagacagcaggagaccagagugugguggaccagcaacagcaucgugguguucugcggcaccagcggcaccuacggcaccggcagcuggcccgacggcgccaacaucaacuucaugcccaucuga

SEQ ID NO: 174147 - RNA, 1410 nt, Artificial Sequence
  derived and/or modified CDS sequence (opt4) from neuraminidase__InfluenzaA__AAO46235
augaaccccaaccagaagaucaucaccaucggcagcgugagccugaccaucgccaccgugugcuuccugaugcagaucgccauccuggugaccaccgugacccugcacuucaagcagcacgagugcgacagccccgccagcaaccaggugaugcccugcgagcccaucaucaucgagagaaacaucaccgagaucguguaccugaacaacaccaccaucgagaaggagaucugccccaaggugguggaguacagaaacuggagcaagccccagugccagaucaccggcuucgcccccuucagcaaggacaacagcaucagacugagcgccggcggcgacaucugggugaccagagagcccuacgugagcugcgaccccggcaagugcuaccaguucgcccugggccagggcaccacccuggacaacaagcacagcaacgacaccauccacgacagaaucccccacagaacccugcugaugaacgagcugggcgugcccuuccaccugggcaccagacaggugugcaucgccuggagcagcagcagcugccacgacggcaaggccuggcugcacgugugcaucaccggcgacgacaagaacgccaccgccagcuucaucuacgacggcagacugguggacagcaucggcagcuggagccagaacauccugagaacccaggagagcgagugcgugugcaucaacggcaccugcaccguggugaugaccgacggcagcgccagcggcagagccgacaccagaauccuguucaucgaggagggcaagaucgugcacaucagcccccugagcggcagcgcccagcacguggaggagugcagcugcuaccccagauaccccggcgugagaugcaucugcagagacaacuggaagggcagcaacagacccgugguggacaucaacauggaggacuacagcaucgacagcagcuacgugugcagcggccuggugggcgacacccccagaaacgacgacagaagcagcaacagcaacugcagaaaccccaacaacgagagaggcaaccagggcgugaagggcugggccuucgacaacggcgacgacguguggaugggcagaaccaucagcaaggaccugagaagcggcuacgagaccuucaaggugaucggcggcuggagcacccccaacagcaagagccagaucaacagacaggugaucguggacagcgacaacagaagcggcuacagcggcaucuucagcguggagggcaagagcugcaucaacagaugcuucuacguggagcugaucagaggcagaaagcaggagaccagagugugguggaccagcaacagcaucgugguguucugcggcaccagcggcaccuacggcaccggcagcuggcccgacggcgccaacaucaacuucaugcccaucuga

SEQ ID NO: 174148 - RNA, 1410 nt, Artificial Sequence
  derived and/or modified CDS sequence (opt4) from neuraminidase__InfluenzaA__AAO46236
augaaccccaaccagaagaucaucaccaucggcagcgugagccugaccaucgccaccgugugcuuccugaugcacaucgccauccuggugaccaccgugacccugcacuucaagcagcacgagugcgacagccccgccagcaaccaggugaugcccugcgagcccaucaucaucgagagaaacaucaccgagaucguguaccugaacaacaccaccaucgagaaggagaucugccccaaggugguggaguacagaaacuggagcaagccccagugccagaucaccggcuucgcccccuucagcaaggacaacagcaucagacugagcgccggcggcgacaucugggugaccagagagcccuacgugagcugcgaccccggcaagugcuaccaguucgcccugggccagggcaccacccuggacaacaagcacagcaacgacaccauccacgacagaaucccccacagaacccugcugaugaacgagcugggcgugcccuuccaccugggcaccagacaggugugcaucgccuggagcagcagcagcugccacgacggcaaggccuggcugcacgugugcaucaccggcgacgacaagaacgccaccgccagcuucaucuacgacggcagacugguggacagcaucggcagcuggagccagaacauccugagaacccaggagagcgagugcgugugcaucaacggcaccugcaccguggugaugaccgacggcagcgccagcggcagagccgacaccagaauccuguucaucgaggagggcaagaucgugcacaucagcccccugagcggcagcgcccagcacguggaggagugcagcugcuaccccagauaccccggcgugagaugcaucugcagagacaacuggaagggcagcaacagacccgugguggacaucaacauggaggacuacagcaucgacagcagcuacgugugcagcggccuggugggcgacacccccagaaacgacgacagaagcagcaacagcaacugcagaaaccccaacaacgagagaggcaaccagggcgugaagggcugggccuucgacaacggcgacgacguguggaugggcagaaccaucagcaaggaccugagaagcggcuacgagaccuucaaggugaucggcggcuggagcacccccaacagcaagagccagaucaacagacaggugaucguggacagcgacaacagaagcggcuacagcggcaucuucagcguggagggcaagagcugcaucaacagaugcuucuacguggagcugaucagaggcagaaagcaggagaccagagugugguggaccagcaacagcaucgugguguucugcggcaccagcggcaccuacggcaccggcagcuggcccgacggcgccaacaucaacuucaugcccaucuga

SEQ ID NO: 174149 - RNA, 1410 nt, Artificial Sequence
  derived and/or modified CDS sequence (opt4) from neuraminidase__InfluenzaA__AAO46237
augaaccccaaccagaagaucaucaccaucggcagcgugagccugaccaucgccaccgugugcuuccugaugcagaucgccauccuggugaccaccgugacccugcacuucaagcagcacgagugcgacagccccgccagcaaccaggugaugcccugcgagcccaucaucaucgagagaaacaucaccgagaucguguaccugaacaacaccaccaucgagaaggagaucugccccaagaucguggaguacagaaacuggagcaagccccagugccagaucaccggcuucgcccccuucagcaaggacaacagcaucagacugagcgccggcggcgacaucugggugaccagagagcccuacgugagcugcgaccccggcaagugcuaccaguucgcccugggccagggcaccacccuggacaacaagcacagcaacgacaccauccacgacagaaucccccacagaacccugcugaugaacgagcugggcgugcccuuccaccugggcaccagacaggugugcaucgccuggagcagcagcagcugccacgacggcaaggccuggcugcacgugugcaucaccggcgacgacaagaacgccaccgccagcuucaucuacgacggcagacugguggacagcaucggcagcuggagccagaacauccugagaacccaggagagcgagugcgugugcaucaacggcaccugcaccguggugaugaccgacggcagcgccagcggcagagccgacaccagaauccuguucaucgaggagggcaagaucgugcacaucagcccccugagcggcagcgcccagcacguggaggagugcagcugcuaccccagauaccccggcgugagaugcaucugcagagacaacuggaagggcagcaacagacccgugguggacaucaacauggaggacuacagcaucgacagcagcuacgugugcagcggccuggugggcgacacccccagaaacgacgacagaagcagcaacagcaacugcagaaaccccaacaacgagagaggcaaccagggcgugaagggcugggccuucgacaacggcgacgacguguggaugggcagaaccaucagcaaggaccugagaagcggcuacgagaccuucaaggugaucggcggcuggagcacccccaacagcaagagccagaucaacagacaggugaucguggacagcgacaacagaagcggcuacagcggcaucuucagcguggagggcaagagcugcaucaacagaugcuucuacguggagcugaucagaggcagaaagcaggagaccagagugugguggaccagcaacagcaucgugguguucugcggcaccagcggcaccuacggcaccggcagcuggcccgacggcgccaacaucaacuucaugcccaucuga

SEQ ID NO: 174150 - RNA, 1410 nt, Artificial Sequence
  derived and/or modified CDS sequence (opt4) from neuraminidase__InfluenzaA__AAO46238
augaaccccaaccagaagaucaucaccaucggcagcgccagccugaccaucgccaccgugugcuuccugaugcagaucgccauccuggugaccaccgugacccugcacuucaagcagcacgagugcgacagccccgccagcaaccaggugaugcccugcgagcccaucaucaucgagagaaacaucaccgagaucguguaccugaacaacaccaccaucgagaaggagaucugccccaagaucguggaguacagaaacuggagcaagccccagugcaagaucaccggcuucgcccccuucagcaaggacaacagcaucagacugagcgccggcggcgacaucugggugaccagagagcccuacgugagcugcgaccccggcaagugcuaccaguucgcccugggccagggcaccacccuggacaacaagcacagcaacgacaccauccacgacagaaucccccacagaacccugcugaugaacgagcugggcgugcccuuccaccugggcaccagacaggugugcaucgccuggagcagcagcagcugccacgacggcaaggccuggcugcacgugugcgugaccggcgacgacaagaacgccaccgccagcuucaucuacgacggcagacugguggacagcaucggcagcuggagccagaacauccugagaacccaggagagcgagugcgugugcaucaacggcaccugcaccguggugaugaccgacggcagcgccagcggcagagccgacaccagaauccuguucaucgaggagggcaagaucgugcacaucagcccccugagcggcagcgcccagcacguggaggagugcagcugcuaccccagauaccccgacgugagaugcaucugcagagacaacuggaagggcagcaacagacccgugguggacaucaacauggaggacuacagcaucgacagcagcuacgugugcagcggccuggugggcgacacccccagaaacgacgacagaagcagcaacagcaacugcagaaaccccaacaacgagaagggcaaccagggcgugaagggcugggccuucgacaacggcgacgacguguggaugggcagaaccaucagcaaggaccugagaagcggcuacgagaccuucaaggugaucggcggcuggagcacccccaacagcaagagccagaucaacagacaggugaucguggacagcgacaacagaagcggcuacagcggcaucuucagcguggagggcaagagcugcaucaacagaugcuucuacguggagcugaucagaggcagaaagcaggagaccagagugugguggaccagcaacagcaucgugguguucugcggcaccagcggcaccuacggcaccggcagcuggcccgacggcgccaacaucaaccugaugcccaucuga

SEQ ID NO: 174151 - RNA, 1410 nt, Artificial Sequence
  derived and/or modified CDS sequence (opt4) from neuraminidase__InfluenzaA__AAO46241
augaaccccaaccagaagaucaucaccaucggcagcgugagccugaccaucgccaccgugugcuuccugaugcagaucgccauccuggugaccaccgugacccugcacuucaagcagcacgagugcgacagccccgccagcaaccaggugaugcccugcgagcccaucaucaucgagagaaacaucaccgagaucguguaccugaacaacaccaccaucgagaaggagaucugccccaagguggugggcuacagaaacuggagcaagccccagugccagaucaccggcuucgcccccuucagcaaggacaacagcaucagacugagcgccggcggcgacaucugggugaccagagagcccuacgugagcugcgaccccggcaagugcuaccaguucgcccugggccagggcaccacccuggacaacaagcacagcaacgacaccauccacgacagaaucccccacagaacccugcugaugaacgagcugggcgugcccuuccaccugggcaccagacaggugugcaucgccuggagcagcagcagcugccacgacggcaaggccuggcugcacgugugcaucaccggcgacgacaagaacgccaccgccagcuucaucuacgacggcagacugguggacagcaucggcagcuggagccagaacauccugagaacccaggagagcgagugcgugugcaucaacggcaccugcaccguggugaugaccgacggcagcgccagcggcagagccgacaccagaauccuguucaucgaggagggcaagaucgugcacaucagcccccugagcggcagcgcccagcacguggaggagugcagcugcuaccccagauaccccggcgugagaugcaucugcagagacaacuggaagggcagcaacagacccgugguggacaucaacauggaggacuacagcaucgacagcagcuacgugugcagcggccuggugggcgacacccccagaaacgacgacagaagcagcaacagcaacugcagaaaccccaacaacgagagaggcaaccagggcgugaagggcugggccuucgacaacggcgacgacguguggaugggcagaaccaucagcaaggaccugagaagcggcuacgagaccuucaaggugaucggcggcuggagcacccccaacagcaagagccagaucaacagacaggugaucguggacagcgacaacagaagcggcuacagcggcaucuucagcguggagggcaagagcugcaucaacagaugcuucuacguggagcugaucagaggcagaaagcaggagaccagagugugguggaccagcaacagcaucgugguguucugcggcaccagcggcaccuacggcaccggcagcuggcccgacggcgccaacaucaacuucaugcccaucuga

SEQ ID NO: 174152 - RNA, 1410 nt, Artificial Sequence
  derived and/or modified CDS sequence (opt4) from neuraminidase__InfluenzaA__AAO46245
augaaccccaaccagaagaucaucaccaucggcagcgugagccugaccaucgccaccgugugcuuccugaugcagaucgccauccuggugaccaccgugacccugcacuucaagcagcacgacugcgacagccccgccagcaaccaggugaugcccugcgagcccaucaucaucgagagaaacaucaccgagaucguguaccugaacaacaccaccaucgagaaggagaucugccccaaggugguggaguacagaaacuggagcaagccccagugccagaucaccggcuucgcccccuucagcaaggacaacagcaucagacugagcgccggcggcgacaucugggugaccagagagcccuacgugagcugcgaccccgugaagugcuaccaguucgcccugggccagggcaccacccuggacaacaagcacagcaacgacaccgugcacgacagaaucccccacagaacccugcugaugaacgagcugggcgugcccuuccaccugggcaccagacaggugugcaucgccuggagcagcagcagcugccacgacggcaaggccuggcugcacgugugcaucaccggcgacgacaagaacgccaccgccagcuucaucuacgacggcagacugguggacagcaucggcagcuggagccagaacauccugagaacccaggagagcgagugcgugugcaucaacggcaccugcaccguggugaugaccgacggcagcgccagcggcagagccgacaccagaauccuguucaucgaggagggcaagaucgugcacaucagcccccuggccggcagcgcccagcacguggaggagugcagcugcuaccccagauaccccggcgugagaugcaucugcagagacaacuggaagggcagcaacagacccgugguggacaucaacauggaggacuacagcaucgacagcagcuacgugugcagcggccuggugggcgacacccccagaaacgacgacagaagcagcaacagcaacugcagaaaccccaacaacgagagaggcacccagggcgugaagggcugggccuucgacaacggcaacgaccuguggaugggcagaaccaucagcaaggaccugagaagcggcuacgagaccuucaaggugaucggcggcuggagcacccccaacagcaagagccagaucaacagacaggugaucguggacagcgacaacagaagcggcuacagcggcaucuucagcguggagggcaagagcugcaucaacagaugcuucuacguggagcugaucagaggcagaaagcaggagaccagagugugguggaccagcaacagcaucgugguguucugcggcaccagcggcaccuacggcaccggcagcuggcccgacggcgccaacaucaacuucaugcccaucuga

SEQ ID NO: 174153 - RNA, 1410 nt, Artificial Sequence
  derived and/or modified CDS sequence (opt4) from neuraminidase__InfluenzaA__AAO46246
augaaccccaaccagaagaucaucaccaucggcagcgugagccugaccaucgccaccgugugcuuccugaugcagaucgccauccuggccaccaccgugacccugcacuucaagcagcacgagugcgacagccccgccagcaaccaggugaugcccugcgagcccaucaucaucgagagaaacaucaccgagaucguguaccugaacaacaccaucaucgagaaggagaucugccccaaggugguggaguacagaaacuggagcaagccccagugccagaucaccggcuucgcccccuucagcaaggacaacagcaucagacugagcgccggcggcgacaucugggugaccagagagcccuacgugagcugcgaccccggcaagugcuaccaguucgcccugggccagggcaccacccuggacaacaagcacagcaacgacaccauccacgacagaaccccccacagaacccugcugaugaacgagcugggcgugcccuuccaccugggcaccagacaggugugcaucgccuggagcagcagcagcugccacgacggcaaggccuggcugcacgugugcaucaccggcgacgacaagaacgccaccgccagcuucaucuacgacggcagacugguggacagcaucggcagcuggagccagaacauccugagaacccaggagagcgagugcgugugcaucaacggcaccugcaccguggugaugaccgacggcagcgccagcggcagagccgacaccagaauccuguucaucgaggagggcaagaucgugcacaucagcccccugagcggcagcgcccagcacguggaggagugcagcugcuaccccagauaccccggcgugagaugcaucugcagagacaacuggaagggcagcaacagacccgugguggacaucaacauggaggacuacagcaucgacagcagcuacgugugcagcggccuggugggcgacacccccagaaacgacgacagaagcagcaacagcaacugcagaaaccccaacaacgagagaggcaaccagggcgugaagggcugggccuucgacaacggcgacgacguguggaugggcagaaccaucagcaaggaccugagaagcggcuacgagaccuucaaggugaucggcggcuggagcacccccaacagcaagagccagaucaacagacaggugaucguggacagcgacaacagaagcggcuacagcggcaucuucagcguggagggcaagagcugcaucaacagaugcuucuacguggagcugaucagaggcagaaagcaggagaccagagugugguggaccagcaacagcaucgccguguucugcggcaccagcggcaccuacggcaccggcagcuggcccgacggcgccaacaucaacuucaugcccaucuga

SEQ ID NO: 174154 - RNA, 1410 nt, Artificial Sequence
  derived and/or modified CDS sequence (opt4) from neuraminidase__InfluenzaA__AAO46247
augaaccccaaccagaagaucaucaccaucggcagcgugagccugaccaucgccaccgugugcuuccugaugcagaucgccauccuggugaccaccgugacccugcacuucaagcagcacgagugcgacagccccgccagcaaccaggugaugcccugcgagcccaucaucaucgagagaaacaucaccgagaucguguaccugaacaacaccaccaucgagaaggagaucugccccaaggugguggaguacagaaacuggagcaagccccagugccagaucaccggcuucgcccccuucagcaaggacaacagcaucagacugagcgccggcggcgacaucugggugaccagagagcccuacgugagcugcgaccccggcaagugcuaccaguucgcccugggccagggcaccacccuggacaacaagcacagcaacgacaccauccacgacagaaucccccacagaacccugcugaugaacgagcugggcgugcccuuccaccugggcaccagacaggugugcaucgccuggagcagcagcagcugccacgacggcaaggccuggcugcacgugugcaucaccggcgacgacaagaacgccaccgccagcuucaucuacgacggcagacugguggacagcaucggcagcuggagccagaacauccugagaacccaggagagcgagugcgugugcaucaacggcaccugcaccguggugaugaccgacggcagcgccagcggcagagccgacaccagaauccuguucaucgaggagggcaagaucgugcacaucagcccccugagcggcagcgcccagcacguggaggagugcagcugcuaccccagauaccccggcgugagaugcaucugcagagacaacuggaagggcagcaacagacccgugaucgacaucaacauggaggacuacagcaucgacagcagcuacgugugcagcggccuggugggcgacacccccagaaacgacgacagaagcagcaacagcaacugcagaaaccccaacaacgagagaggcaaccagggcgugaagggcugggccuucgacaacggcgacgacguguggaugggcagaaccaucagcaaggaccugagaagcggcuacgagaccuucaaggugaucggcggcuggagcacccccaacagcaagagccagaucaacagacaggugaucguggacagcgacaacagaagcggcuacagcggcaucuucagcguggagggcaagagcugcaucaacagaugcuucuacguggagcugaucagaggcagaaagcaggagaccagagugugguggaccagcaacagcaucgugguguucugcggcaccagcggcaccuacggcaccggcagcuggcccgacggcgccaacaucaacuucaugcccaucuga

SEQ ID NO: 174155 - RNA, 1410 nt, Artificial Sequence
  derived and/or modified CDS sequence (opt4) from neuraminidase__InfluenzaA__AAO46462
augaaccccaaccagaagaucaucaccaucggcagcgugagccugaccaucgccaccgugugcuuccugaugcagaucgccauccuggugaccaccgugacccugcacuucaagcaguacgagugcgacagccccgccagcaaccaggugaugcccugcgagcccaucaucaucgagagaaacaucaccgagaucguguaccugaacaacaccaccaucgagaaggagaucugccccaaggugguggaguacagaaacuggagcaagccccagugccagaucaccggcuucgcccccuucagcaaggacaacagcaucagacugagcgccggcggcgacaucugggugaccagagagcccuacgugagcugcgaccacggcaagugcuaccaguucgcccugggccagggcaccacccuggacaacaagcacagcaacgacaccauccacgacagaaucccccacagaacccugcugaugaacgagcugggcgugcccuuccaccugggcaccagacaggugugcaucgccuggagcagcagcagcugccacgacggcaaggccuggcugcacgugugcaucaccggcgacgacaagaacgccaccgccagcuucaucuacgacggcagacugguggacagcaucggcagcuggagccagaacauccugagaacccaggagagcgagugcgugugcaucaacggcaccugcaccguggugaugaccgacggcagcgccagcggcagagccgacaccagaauccuguucaucgaggagggcaagaucgugcacaucagcccccugagcggcagcgcccagcacguggaggagugcagcugcuaccccagauaccccggcgugagaugcaucugcagagacaacuggaagggcagcaacagacccgugguggacaucaacauggaggacuacagcaucgacagcagcuacgugugcagcggccuggugggcgacacccccagaaacgacgacagaagcagcaacagcaacugcagaaaccccaacaacgagagaggcaaccagggcgugaagggcugggccuucgacaacggcgacgacguguggaugggcagaaccaucagcaaggaccugagaagcggcuacgagaccuucaaggugaucggcggcuggagcacccccaacagcaagagccagaucaacagacaggugaucguggacagcgacaacagaagcggcuacagcggcaucuucagcguggagggcaagagcugcaucaacagaugcuucuacguggagcugaucagaggcagaaagcaggagaccagagugugguggaccagcaacagcaucgugguguucugcggcaccagcggcaccuacggcaccggcagcuggcccgacggcgccaacaucaacuucaugcccaucuga

SEQ ID NO: 174156 - RNA, 1410 nt, Artificial Sequence; identical to SEQ ID NO: 174155
  derived and/or modified CDS sequence (opt4) from neuraminidase__InfluenzaA__AAO46463

SEQ ID NO: 174157 - RNA, 1410 nt, Artificial Sequence; identical to SEQ ID NO: 174155
  derived and/or modified CDS sequence (opt4) from neuraminidase__InfluenzaA__AAO46464

SEQ ID NO: 174158 - RNA, 1410 nt, Artificial Sequence; identical to SEQ ID NO: 174155
  derived and/or modified CDS sequence (opt4) from neuraminidase__InfluenzaA__AAO46465

SEQ ID NO: 174159 - RNA, 1410 nt, Artificial Sequence; identical to SEQ ID NO: 174155
  derived and/or modified CDS sequence (opt4) from neuraminidase__InfluenzaA__AAO46466

SEQ ID NO: 174160 - RNA, 1410 nt, Artificial Sequence
  derived and/or modified CDS sequence (opt4) from neuraminidase__InfluenzaA__AAO46467
augaaccccaaccagaagaucaucaccaucggcagcgugagccugaccaucgccaccgugugcuuccugaugcagaucgccauccuggugaccaccgugacccugcacuucaagcaguacgagugcgacagccccgccagcaaccaggugaugcccugcgagcccaucaucaucgagagaaacaucaccgagaucguguaccugaacaacaccaccaucgagaaggagaucugccccaaggugguggaguacagaaacuggagcaagccccagugccagaucaccggcuucgcccccuucagcaaggacaacagcaucagacugagcgccggcggcgacaucugggugaccagagagcccuacgugagcugcgaccacggcaagugcuaccaguucgcccugggccagggcaccacccuggacaacaagcacagcaacgacaccauccacgacagaaucccccacagaacccugcugaugaacgagcugggcgugcccuuccaccugggcaccagacaggugugcaucgccuggagcagcagcagcugccacgacggcaaggccuggcugcacgugugcaucaccggcgacgacaagaacgccaccgccagcuucaucuacgacggcagacugguggacagcaucggcagcuggagccagaacauccugagaacccaggagagcgagugcgugugcaucaacggcaccugcaccguggugaugaccgacggcagcgccagcggcagagccgacaccagaauccuguucaucgaggagggcaagaucgugcacaucagcccccugaccggcagcgcccagcacguggaggagugcagcugcuaccccagauaccccggcgugagaugcaucugcagagacaacuggaagggcagcaacagacccgugguggacaucaacauggaggacuacagcaucgacagcagcuacgugugcagcggccuggugggcgacacccccagaaacgacgacagaagcagcaacagcaacugcagaaaccccaacaacgagagaggcaaccagggcgugaagggcugggccuucgacaacggcgacgacguguggaugggcagaaccaucagcaaggaccugagaagcggcuacgagaccuucaaggugaucggcggcuggagcacccccaacagcaagagccagaucaacagacaggugaucguggacagcgacaacagaagcggcuacagcggcaucuucagcguggagggcaagagcugcaucaacagaugcuucuacguggagcugaucagaggcagaaagcaggagaccagagugugguggaccagcaacagcaucgugguguucugcggcaccagcggcaccuacggcaccggcagcuggcccgacggcgccaacaucaacuucaugcccaucuga

SEQ ID NO: 174161 - RNA, 1410 nt, Artificial Sequence
  derived and/or modified CDS sequence (opt4) from neuraminidase__InfluenzaA__AAO46468
augaaccccaaccagaagaucaucaccaucggcagcgugagccugaccaucgccaccgugugcuuccugaugcagaucgccauccuggugaccaccgugacccugcacuucaagcaguacgagugcgacuuccccgccagcaaccaggugaugcccugcgagcccaucaucaucgagagaaacaucaccgagaucguguaccugaacaacaccaccaucgagaaggagaucugccccaaggugguggaguacagaaacuggagcaagccccagugccagaucaccggcuucgcccccuucagcaaggacaacagcaucagacugagcgccggcggcgacaucugggugaccagagagcccuacgugagcugcgaccacggcaagugcuaccaguucgcccugggccagggcaccacccuggacaacaagcacagcaacgacaccauccacgacagaaucccccacagaacccugcugaugaacgagcugggcgugcccuuccaccugggcaccagacaggugugcaucgccuggagcagcagcagcugccacgacggcaaggccuggcugcacgugugcaucaccggcgacgacaagaacgccaccgccagcuucaucuacgacggcagacugguggacagcaucggcagcuggagccagaacauccugagaacccaggagagcgagugcgugugcaucaacggcaccugcaccguggugaugaccgacggcagcgccagcggcagagccgacaccagaauccuguucaucgaggagggcaagaucgugcacaucagcccccugagcggcagcgcccagcacguggaggagugcagcugcuaccccagauaccccggcgugagaugcaucugcagagacaacuggaagggcagcaacagacccgugguggacaucaacauggaggacuacagcaucgacagcagcuacgugugcagcggccuggugggcgacacccccagaaacgacgacagaagcagcaacagcaacugcagaaaccccaacaacgagagaggcaaccagggcgugaagggcugggccuucgacaacggcgacgacguguggaugggcagaaccaucagcaaggaccugagaagcggcuacgagaccuucaaggugaucggcggcuggagcacccccaacagcaagagccagaucaacagacaggugaucguggacagcgacaacagaagcggcuacagcggcaucuucagcguggagggcaagagcugcaucaacagaugcuucuacguggagcugaucagaggcagaaagcaggagaccagagugugguggaccagcaacagcaucgugguguucugcggcaccagcggcaccuacggcaccggcagcuggcccgacggcgccaacaucaacuucaugcccaucuga

SEQ ID NO: 174162 - RNA, 1410 nt, Artificial Sequence; identical to SEQ ID NO: 174155
  derived and/or modified CDS sequence (opt4) from neuraminidase__InfluenzaA__AAO46469

SEQ ID NO: 174163 - RNA, 1410 nt, Artificial Sequence
  derived and/or modified CDS sequence (opt4) from neuraminidase__InfluenzaA__AAO46471
augaaccccaaccagaagaucaucaccaucggcagcgugagccugaccaucgccaccgugugcuuccugaugcagaucgccauccuggugaccaccgugacccugcacuucaagcaguacgagugcgacagccccgccagcaaccaggugaugcccugcgagcccaucaucaucgagagaaacaucaccgagaucguguaccugaacaacaccaccaucgagaaggagaucugccccaaggugguggaguacagaaacuggagcaagccccagugccagaucaccggcuucgcccccuucagcaaggacaacagcaucagacugagcgccggcggcgacaucugggugaccagagagcccuacgugagcugcgaccccggcaagugcuaccaguucgcccugggccagggcaccacccuggacaacaagcacagcaacgacaccauccacgacagaaucccccacagaacccugcugaugaacgagcugggcgugcccuuccaccugggcaccagacaggugugcaucgccuggagcagcagcagcugccacgacggcaaggccuggcugcacgugugcaucaccggcgacgacaagaacgccaccgccagcuucaucuacgacggcagacugguggacagcaucggcagcuggagccagaacauccugagaacccaggagagcgagugcgugugcaucaacggcaccugcaccguggugaugaccgacggcagcgccagcggcagagccgacaccagaauccuguucaucgaggagggcaagaucgugcacaucagcccccugagcggcagcgcccagcacguggaggagugcagcugcuaccccagauaccccggcgugagaugcaucugcagagacaacuggaagggcagcaacagacccgugguggacaucaacauggaggacuacagcaucgacagcagcuacgugugcagcggccuggugggcgacacccccagaaacgacgacagaagcagcaacagcaacugcagaaaccccaacaacgagagaggcaaccagggcgugaagggcugggccuucgacaacggcgacgacguguggaugggcagaaccaucagcaaggaccugagaagcggcuacgagaccuucaaggugaucggcggcuggagcacccccaacagcaagagccagaucaacagacaggugaucguggacagcgacaacagaagcggcuacagcggcaucuucagcguggagggcaagagcugcaucaacagaugcuucuacguggagcugaucagaggcagaaagcaggagaccagagugugguggaccagcaacagcaucgugguguucugcggcaccagcggcaccuacggcaccggcagcuggcccgacggcgccaacaucaacuucaugcccaucuga

SEQ ID NO: 174164 - RNA, 1410 nt, Artificial Sequence
  derived and/or modified CDS sequence (opt4) from neuraminidase__InfluenzaA__AAO46472
augaaccccaaccagaagaucaucaccaucggcagcgugagccugaccaucgccaccgugugcuuccugaugcagaucgccauccuggugaccaccgugacccugcacuucaagcaguacgagugcgacagccccgccagcaaccaggugaugcccugcgagcccaucaccaucgagagaaacaucaccgagaucguguaccugaacaacaccaccaucgagaaggagaucugccccaaggugguggaguacagaaacuggagcaagccccagugccagaucaccggcuucgcccccuucagcaaggacaacagcaucagacugagcgccggcggcgacaucugggugaccagagagcccuacgugagcugcgaccccggcaagugcuaccaguucgcccugggccagggcaccacccuggacaacaagcacagcaacgacaccauccacgacagaaucccccacagaacccugcugaugaacgagcugggcgugcccuuccaccugggcaccagacaggugugcaucgccuggagcagcagcagcugccacgacggcaaggccuggcugcacgugugcaucaccggcgacgacaagaacgccaccgccagcuucaucuacgacggcagacugguggacagcaucggcagcuggagccagaacauccugagaacccaggagagcgagugcgugugcaucaacggcaccugcaccguggugaugaccgacggcagcgccagcggcagagccgacaccagaauccuguucaucgaggagggcaagaucgugcacaucagcccccugagcggcagcgcccagcacguggaggagugcagcugcuaccccagauaccccggcgugagaugcaucugcagagacaacuggaagggcagcaacagacccgugguggacaucaacauggaggacuacagcaucgacagcagcuacgugugcagcggccuggugggcgacacccccagaaacgacgacagaagcagcaacagcaacugcagaaaccccaacaacgagagaggcaaccagggcgugaagggcugggccuucgacaacggcgacgacguguggaugggcagaaccaucagcaaggaccugagaagcggcuacgagaccuucaaggugaucagcggcuggagcacccccaacagcaagagccagaucaacagacaggugaucguggacagcgacaacagaagcggcuacagcggcaucuucagcguggagggcaagagcugcaucaacagaugcuucuacguggagcugaucagaggcagaaagcaggagaccagagugugguggaccagcaacagcaucgugguguucugcggcaccagcggcaccuacggcaccggcagcuggcccgacggcgccaacaucaacuucaugcccaucuga

SEQ ID NO: 174165 - RNA, 1410 nt, Artificial Sequence; identical to SEQ ID NO: 174155
  derived and/or modified CDS sequence (opt4) from neuraminidase__InfluenzaA__AAO46473

SEQ ID NO: 174166 - RNA, 1410 nt, Artificial Sequence; identical to SEQ ID NO: 174155
  derived and/or modified CDS sequence (opt4) from neuraminidase__InfluenzaA__AAO46474

SEQ ID NO: 174167 - RNA, 1410 nt, Artificial Sequence; identical to SEQ ID NO: 174155
  derived and/or modified CDS sequence (opt4) from neuraminidase__InfluenzaA__AAO46475

SEQ ID NO: 174168 - RNA, 1410 nt, Artificial Sequence
  derived and/or modified CDS sequence (opt4) from neuraminidase__InfluenzaA__AAO46476
augaaccccaaccagaagaucaucaccaucggcagcgugagccugaccaucgccaccgugugcuuccugaugcagaucgccauccuggugaccaccgugacccugcacuucagacaguacgagugcgacagccccgccaacaaccaggugaugcccugcgagcccaccaucaucgagagaaacaucaccgagaucguguaccugaacaacaccaccaucgagaaggagaucugccccaagcugguggaguacagaaacuggagcaagccccagugcaagaucaccggcuucgcccccuucagcaaggacaacagcaucagacugagcgccggcggcgacaucugggugaccagagagcccuacgugagcugcgaccccggcaagugcuaccaguucgcccugggccagggcaccacccuggacaacaagcacagcaacgacaccauccacgacagaaucccccacagaacccugcugaugaacgagcugggcgugcccuuccaccugggcaccagacaggugugcaucgccuggagcagcagcagcugccacgacggcaaggccuggcugcacgugugcgugaccggcgacgacaagaacgccaccgccagcuucaucuacgacggcagacugguggacagcaucggcagcuggagccagaacauccugagaacccaggagagcgagugcgugugcaucaacggcaccugcaccguggugaugaccgacggcagcgccagcggcagagccgacaccagaauccuguucaucgaggagggcaagaucgugcacaucagcccccugagcggcagcgcccagcacguggaggagugcagcugcuaccccagauaccccggcgugagaugcaucugcagagacaacuggaagggcagcaacagacccgugguggacaucaacguggaggacuacagcaucgacagcagcuacgugugcagcggccuggugggcgacacccccagaaacaacgacagaagcagcaacagcaacugcagaaaccccaacaacgagagaggcaaccacggcgugaagggcugggccuucgacgacggcaacgacguguggaugggcagaaccaucagcaaggaccugagaagcggcuacgagaccuucaaggugaucggcggcuggagcacccccaacagcaagagccagaucaacagacaggugaucguggacagcgacaacagaagcggcuacagcggcaucuucagcguggagggcaagagcugcaucaacagaugcuucuacguggagcugaucagaggcagagagcaggagaccagagugugguggaccagcaacagcaucgugguguucugcggcaccagcggcaccuacggcaccggcagcuggcccgacggcgccgacaucaaccugaugcccaucuga

SEQ ID NO: 174169 - RNA, 1410 nt, Artificial Sequence; identical to SEQ ID NO: 174155
  derived and/or modified CDS sequence (opt4) from neuraminidase__InfluenzaA__AAO46477

SEQ ID NO: 174170 - RNA, 1410 nt, Artificial Sequence
  derived and/or modified CDS sequence (opt4) from neuraminidase__InfluenzaA__AAO46478
augaaccccaaccagaagaucaucaccaucggcagcgugagccugaucaucgccaccgugugcuuccugaugcagaucgccauccuggugaccaccgugacccugcacuucaagcagcacgagugcgacagccccagcagcaaccaggugaugcccugcgagcccaucaucaucgagagaaacaucaccgagaucguguaccugaacaacaccaccaucgagaaggagaccugccccaagcugguggaguacagaaacuggagcaagccccagugcaagaucaccggcuucgcccccuucagcaaggacaacagcaucagacugagcgccggcggcgacaucugggugaccagagagcccuacgugagcugcgaccccggcaagugcuaccaguucgcccugggccagggcaccacccuggacaacaagcacagcaacgacaccauccacgacagaaucccccacagaacccugcugaugaacgagcugggcgugcccuuccaccugggcaccagacaggugugcaucgccuggagcagcagcagcugccacgacggcaaggccuggcugcacgugugcgugaccggcgacgacaagaacgccaccgccagcuucaucuacgacggcagacugguggacagcaucggcagcuggagccagaacauccugagaacccaggagagcgagugcgugugcaucaacggcaccugcaccguggugaugaccgacggcaacgccagcggcagagccgacaccagaauccuguucaucgaggagggcaagaucgugcacaucagcccccugagcggcagcgcccagcacguggaggagugcagcugcuaccccagauaccccgacgugagaugcaucugcagagacaacuggaagggcagcaacagacccaucguggacaucaacaugaaggacuacagcaucgacagcagcuacgugugcagcggccuggugggcgacacccccagaaacgacgacagaagcagcaagagcaacugcagaaaccccaacaacgagagaggcaaccacggcgugaagggcugggccuucgacaacggcaacgacguguggaugggcagaaccaucagcaaggaccugagaagcggcuacgagaccuucaaggugaucggcggcuggagcacccccaacagcaagagccagaucaacagacaggugaucguggacagcgacaacagaagcggcuacagcggcaucuucagcguggagggcaagagcugcaucaacagaugcuucuacguggagcugaucagaggcagagagcaggagaccagagugugguggaccagcaacagcaucgugguguucugcggcaccagcggcaccuacggcaccggcagcuggcccgacggcgccaacaucaacuucaugcccaucuga

SEQ ID NO: 174171 - RNA, 1410 nt, Artificial Sequence
  derived and/or modified CDS sequence (opt4) from neuraminidase__InfluenzaA__AAO46479
augaaccccaaccagaagaucaucaccaucggcagcgugagccugaccaucgccaccgugugcuuccugaugcagaucgccauccuggugaccaccgugacccugcacuucaagcaguacgagugcgacagccccgccagcaacagagugaugcccugcgagcccaucaucaucgagagaaacaucaccgagaucguguaccugaacaacaccaccaucgagaaggagaucugccccaaggugguggaguacagaaacuggagcaagccccagugccagaucaccggcuucgcccccuucagcaaggacaacagcaucagacugagcgccggcggcgacaucugggugaccagagagcccuacgugagcugcgaccccggcaagugcuaccaguucgcccugggccagggcaccacccuggacaacaagcacagcaacgacaccauccacgacagaaucccccacagaacccugcugaugaacgagcugggcgugcccuuccaccugggcaccagacaggugugcaucgccuggagcagcagcagcugccacgacggcaaggccuggcugcacgugugcaucaccggcgacgacaagaacgccaccgccagcuucaucuacgacggcagacugguggacagcaucggcagcuggagccagaacauccugagaacccaggagagcgagugcgugugcaucaacggcaccugcaccguggugaugaccgacggcagcgccagcggcagagccgacaccagaauccuguucaucgaggagggcaagaucgugcacaucagcccccugagcggcagcgcccagcacguggaggagugcagcugcuaccccagauaccccggcgugagaugcaucugcagagacaacuggaagggcagcaacagacccgugguggacaucaacauggaggacuacagcaucgacagcagcuacgugugcagcggccuggugggcgacacccccagaaacgacgacagaagcagcaacagcaacugcagaaaccccaacaacgagagaggcaaccagggcgugaagggcugggccuucgacaacggcgacgacguguggaugggcagaaccaucagcaaggaccugagaagcggcuacgagaccuucaaggugaucggcggcuggagcacccccaacagcaagagccagaucaacagacaggugaucguggacagcggcaacagaagcggcuacagcggcaucuucagcguggagggcaagagcugcaucaacagaugcuucuacguggagcugaucagaggcagaaagcaggagaccagagugugguggaccagcaacagcaucgugguguucugcggcaccagcggcaccuacggcaccggcagcuggcccgacggcgccaacaucaacuucaugcccaucuga

SEQ ID NO: 174172 - RNA, 1410 nt, Artificial Sequence
  derived and/or modified CDS sequence (opt4) from neuraminidase__InfluenzaA__AAO46481
augaaccccaaccagaagaucaucaccaucggcagcgugagccugaccaucgccaccgugugcuuccugaugcagaucgccauccuggugaccaccgugacccugcacuucaagcaguacgagugcgacagccccgccaacaaccaggugaugcccugcgagcccaucaucaucgagagaaacaucaccgagaucguguaccugaccaacaccaccaucgagaaggagaucugccccaagcugguggaguacagaaacuggagcaagccccagugcaagaucaccggcuucgcccccuucagcaaggacaacagcaucagacugagcgccggcggcgacaucugggugaccagagagcccuacgugagcugcgaccccggcaagugcuaccaguucgcccugggccagggcaccacccuggacaacaagcacagcaacgacaccauccacgacagaaucccccacagaacccugcugaugaacgagcugggcgugcccuuccaccugggcaccagacaggugugcaucgccuggagcagcagcagcugccacgacggcaaggccuggcugcacgugugcgugaccggcgacgacaagaacgccaccgccagcuucaucuacgacggcagacugguggacagcaucggcagcuggagccagaacauccugagaacccaggagagcgagugcgugugcaucaacggcaccugcaccguggugaugaccgacggcagcgccagcggcagagccgacaccagaauccuguucaucgaggagggcaagaucgugcacaucagcccccugagcggcagcgcccagcacguggaggagugcagcugcuaccccagauaccccggcgugagaugcaucugcagagacaacuggaagggcagcaacagacccgugguggacaucaacgugaaggacuacagcaucgacagcagauacgugugcagcggccuggugggcgacacccccagaaacaacgacagaagcagcaacagcaacugcagaaaccccaacaacgagagaggcaaccacggcgugaagggcugggccuucgacgacggcaacgacguguggaugggcagaaccaucagcaaggacagcagaagcggcuacgagaccuucaaggugaucggcggcuggagcacccccaacagcaagagccagaucaacagacaggugaucguggacagcgacaacagaagcggcuacagcggcaucuucagcguggagagcaagagcugcaucaacagaugcuucuacguggagcugaucagaggcagagagcaggagaccagagugugguggaccagcaacagcaucgugguguucugcggcaccagcggcaccuacggcaccggcagcuggcccgacggcgccgacaucaaccugaugcccaucuga

SEQ ID NO: 174173 - RNA, 1410 nt, Artificial Sequence
  derived and/or modified CDS sequence (opt4) from neuraminidase__InfluenzaA__AAO46482
augaaccccaaccagaagaucaucaccaucggcagcgugagccugaccaucgccaccgugugcuuccugaugcagaucgccauccuggugaccaccgugacccugcacuucaagcaguacgagugcgacagccccgccaacaaccaggugaugcccugcgagcccaugaucaucgagagaaacaucaccgagaucguguaccugaccaacaccaccaucgagaaggagaucugccccaagcugguggaguacagaaacuggagcaagccccagugcaagaucaccggcuucgcccccuucagcaaggacaacagcaucagacugagcgccggcggcgacaucugggugaccagagagcccuacgugagcugcgaccccggcaagugcuaccaguucgcccugggccagggcaccacccuggacaacaagcacagcaacgacaccauccacgacagaaucccccacagaacccugcugaugaacgagcugggcgugcccuuccaccugggcaccagacaggugugcaucgccuggagcagcagcagcugccacgacggcaaggccuggcugcacgugugcgugaccggcgacgacaagaacgccaccgccagcuucaucuacgacggcagacugguggacagcaucggcagcuggagccagaacauccugagaacccaggagagcgagugcgugugcaucaacggcaccugcaccguggugaugaccgacggcagcgccagcggcagagccgacaccagaauccuguucaucgaggagggcaagaucgugcacaucagcccccugagcggcagcgcccagcacguggaggagugcagcugcuaccccagauaccccggcgugagaugcaucugcagagacaacuggaagggcagcaacagacccgugguggacaucaacgugaaggacuacagcaucgacagcagauacgugugcagcggccuggugggcgacacccccagaaacaacgacagaagcagcaacagcaacugcagaaaccccaacaacgacaagggcaaccacggcgugaagggcugggccuucgacgacggcaacgacguguggaugggcagaaccaucagcaaggacagcagaagcggcuacgagaccuucaaggugaucggcggcuggagcacccccaacagcaagagccagaucaacagacaggugaucguggacagcgacaacagaagcggcuacagcggcaucuucagcguggagggcaagagcugcaucaacagaugcuucuacguggagcugaucagaggcagagagcaggagaccagagugugguggaccagcaacagcaucgugguguucugcggcaccagcggcaccuacggcaccggcagcuggcccgacggcgccgacaucaaccugaugcccaucuga

SEQ ID NO: 174174 - RNA, 1410 nt, Artificial Sequence
  derived and/or modified CDS sequence (opt4) from neuraminidase__InfluenzaA__AAO46483
augaaccccaaccagaagaucaucaccaucggcagcgugagccugaccaucgccaccgugugcuuccugaugcagaucgccauccuggugaccaccgugacccugcacuucagacaguacgagugcgacagccccgccaacaaccaggugaugcccugcgagcccaucaucaucgagagaaacaucaccgagaucguguaccugaacaacaccaccaucgagaaggagaucugccccaagcugguggaguacagaaacuggagcaagccccagugcaagaucaccggcuucgcccccuucagcaaggacaacagcaucagacugagcgccggcggcgacaucugggugaccagagagcccuacgugagcugcgaccccggcaagugcuaccaguucgcccugggccagggcaccacccuggacaacaagcacagcaacgacaccauccacgacagaaucccccacagaacccugcugaugaacgagcugggcgugcccuuccaccugggcaccagacaggugugcaucgccuggagcagcagcagcugccacgacggcaaggccuggcugcacgugugcgugaccggcgacgacaagaacgccaccgccagcuucaucuacgacggcagacugguggacagcaucggcagcuggagccagaacauccugagaacccaggagagcgagugcgugugcaucaacggcaccugcaccguggugaugaccgacggcagcgccagcggcagagccgacaccagaauccuguucaucgaggagggcaagaucgugcacaucagcccccugagcggcagcgcccagcacguggaggagugcagcugcuaccccagauaccccggcgugagaugcaucugcagagacaacuggaagggcagcaacagacccgugguggacaucaacguggaggacuacagcaucgacagcagcuacgugugcagcggccuggugggcgacacccccagaaacaacgacagaagcagcaacagcaacugcagaaaccccaacaacgagagaggcaaccacggcgugaagggcugggccuucgacgacggcaacgacguguggaugggcagaaccaucagcaaggaccugagaagcggcuacgagaccuucaaggugaucggcggcuggagcacccccaacagcaagagccagaucaacagacaggugaucguggacagcgacaacagaagcggcuacagcggcaucuucagcguggagggcaagagcugcaucaacagaugcuucuacguggagcugaucagaggcagagagcaggagaccagagugugguggaccagcaacagcaucgugguguucugcggcaccagcggcaccuacggcaccggcagcuggcccgacggcgccgacaucaaccugaugcccaucuga

SEQ ID NO: 174175 - RNA, 1410 nt, Artificial Sequence
  derived and/or modified CDS sequence (opt4) from neuraminidase__InfluenzaA__AAO46485
augaaccccaaccagaagaucaucaccaucggcagcgugagccugaccaucgccaccgugugcuuccugaugcagaucgccauccuggugaccaccgugacccugcacuucaagcaguacgagugcgacagccccgccaacaaccaggugaugcccugcgagcccaucaucaucgagagaaacaucaccgagaucguguaccugaccaacaccaccaucgagaaggagaucugccccaagcugguggaguacagaaacuggagcaagccccagugcaagaucaccggcuucgcccccuucagcaaggacaacagcaucagacugagcgccggcggcgacaucugggugaccagagagcccuacgugagcugcgaccccggcaagugcuaccaguucgcccugggccagggcaccacccuggacaacaagcacagcaacgacaccauccacgacagaaucccccacagaacccugcugaugaacgagcugggcgugcccuuccaccugggcaccagacaggugugcaucgccuggagcagcagcagcugccacgacggcaaggccuggcugcacgugugcgugaccggcgacgacaagaacgccaccgccagcuucaucuacgacggcagacugguggacagcaucggcagcuggagccagaacauccugagaacccaggagagcgagugcgugugcaucaacggcaccugcaccguggugaugaccgacggcagcgccagcggcagagccgacaccagaauccuguucaucgaggagggcaagaucgugcacaucagcccccugagcggcagcgcccagcacguggaggagugcagcugcuaccccagauaccccggcgugagaugcaucugcagagacaacuggaagggcagcaacagacccgugguggacaucaacgugaaggacuacagcaucgacagcagauacgugugcagcggccuggugggcgacacccccagaaacaacgacagaagcagcaacagcaacugcagaaaccccaacaacgacaagggcaaccacggcgugaagggcugggccuucgacgacggcaacgacguguggaugggcagaaccaucagcaaggacagcagaagcggcuacgagaccuucaaggugaucggcggcuggagcacccccaacagcaagagccagaucaacagacaggugaucguggacagcgacaacagaagcggcuacagcggcaucuucagcguggagggcaagagcugcaucaacagaugcuucuacguggagcugaucagaggcagagagcaggagaccagagugugguggaccagcaacagcaucgugguguucugcggcaccagcggcaccuacggcaccggcagcuggcccgacggcgccgacaucaaccugaugcccaucuga

SEQ ID NO: 174176 - RNA, 1410 nt, Artificial Sequence
  derived and/or modified CDS sequence (opt4) from neuraminidase__InfluenzaA__AAO46486
augaaccccaaccagaagaucaucaccaucggcagcgugagccugaccaucgccaccaucugcuuccugaugcagaucgccauccuggugaccaccgugacccugcacuucaagcaguacgagugcgacagccccgccaacaaccaggugaugcccugcgagcccaucaucaucgagagaaacaucaccgagaucguguaccugaccaacaccaccaucgagaaggagaucugccccaagcugguggaguacagaaacuggagcaagccccagugcaagaucaccggcuucgcccccuucagcaaggacaacagcaucagacugagcgccggcggcgacaucugggugaccagagagcccuacgugagcugcgaccccggcaagugcuaccaguucgcccugggccagggcaccacccuggacaacaagcacagcaacgacaccauccacgacagaaucccccacagaacccugcugaugaacgagcugggcgugcccuuccaccugggcaccagacaggugugcaucgccuggagcagcagcagcugccacgacggcaaggccuggcugcacgugugcgugaccggcgacgacaagaacgccaccgccagcuucaucuacgacggcagacugguggacagcaucggcagcuggagccagaacauccugagaacccaggagagcgagugcgugugcaucaacggcaccugcaccguggugaugaccgacggcagcgccagcggcagagccgacaccagaauccuguucaucgaggagggcaagaucgugcacaucagcccccugagcggcagcgcccagcacguggaggagugcagcugcuaccccagauaccccggcgugagaugcaucugcagagacaacuggaagggcagcaacagacccgugguggacaucaacgugaaggacuacagcaucgacagcagcuacgugugcagcggccuggugggcgacacccccagaaacaacgacagaagcagcaacagcuacugcagaaaccccaacaacgagagaggcaaccacggcgugaagggcugggccuucgacgacggcaacgacguguggaugggcagaaccaucagcaaggacagcagaagcggcuacgagaccuucaaggugaucggcggcuggagcacccccaacagcaagagccagaucaacagacaggugaucguggacagcgacaacagaagcggcuacagcggcaucuucagcguggagggcaagagcugcaucaacagaugcuucuacguggagcugaucagaggcagagagcaggagaccagagugugguggaccagcaacagcaucgugguguucugcggcaccagcggcaccuacggcaccggcagcuggcccgacggcgccgacaucaaccugaugcccaucuga

SEQ ID NO: 174177 - RNA, 1410 nt, Artificial Sequence
  derived and/or modified CDS sequence (opt4) from neuraminidase__InfluenzaA__AAO46489
augaaccccaaccagaagaucaucaccaucggcagcgugagccugaccaucgccaccaucugcuuccugaugcagaucgccauccuggugaccaccgugacccugcacuucaagcaguacgagugcgacagccccgccaacaaccaggugaugcccugcgagcccaucaucaucgagagaaacaucaccgagaucguguaccugaccaacaccaccaucgagaaggagaucugccccaagcugguggaguacagaaacuggagcaagccccagugcaagaucaccggcuucgcccccuucagcaaggacaacagcaucagacugagcgccggcggcgacaucugggugaccagagagcccuacgugagcugcgaccccggcaagugcuaccaguucgcccugggccagggcaccacccugaacaacaagcacagcaacgacaccauccacgacagaaucccccacagaacccugcugaugaacgagcugggcgugcccuuccaccugggcaccagacaggugugcaucgccuggagcagcagcagcugccacgacggcaaggccuggcugcacgugugcgugaccggcgacgacaagaacgccaccgccagcuucaucuacgacggcagacugguggacagcaucggcagcuggagccagaacauccugagaacccaggagagcgagugcgugugcaucaacggcaccugcaccguggugaugaccgacggcagcgccagcggcaaggccgacaccagaauccuguucaucgaggagggcaagaucgugcacaucagcccccugagcggcagcgcccagcacguggaggagugcagcugcuaccccagauaccccggcgugagaugcaucugcagagacaacuggaagggcagcaacagacccgugguggacaucaacgugaaggacuacagcaucgacagcagcuacgugugcagcggccuggugggcgacacccccagaaacaacgacagaagcagcagcagcuacugcagaaaccccaacaacgagagaggcaaccacggcgugaagggcugggccuucgacgacggcaacgacguguggaugggcagaaccaucagcaaggacagcagaagcggcuacgagaccuucaaggugaucggcggcuggagcacccccaacagcaagagccagaucaacagacaggugaucguggacagcgacaacagaagcggcuacagcggcaucuucagcguggagggcaagagcugcaucaacagaugcuucuacguggagcugaucagaggcagagagcaggagaccagagugugguggaccagcaacagcaucgugguguucugcggcaccagcggcaccuacggcaccggcagcuggcccgacggcgccgacaucaaccugaugcccaucuga

SEQ ID NO: 174178 - RNA, 1410 nt, Artificial Sequence
  derived and/or modified CDS sequence (opt4) from neuraminidase__InfluenzaA__AAO46491
augaaccccaaccagaagaucaucaccaucggcagcgugagccugaccaucgccaccaucugcuuccugaugcagaucgccauccuggugaccaccgugacccugcacuucaagcaguacgagugcgacagccccgccaacaaccaggugaugcccugcgagcccaucaucaucgagagaaacaucaccgagaucguguaccugaccaacaccaccaucgagaaggagaucugccccaagcugguggaguacagaaacuggagcaagccccagugcaagaucaccggcuucgcccccuucagcaaggacaacagcaucagacugagcgccggcggcgacaucugggugaccagagagcccuacgugagcugcgaccccggcaagugcuaccaguucgcccugggccagggcaccacccuggacaacaagcacagcaacgacaccauccacgacagaaccccccacagaacccugcugaugaacgagcugggcgugcccuuccaccugggcaccagacaggugugcaucgccuggagcagcagcagcugccacgacggcaaggccuggcugcacgugugcgugaccggcuacgacaagaacgccaccgccagcuucaucuacgacggcagacugguggacagcaucggcagcuggagccagaacauccugagaacccaggagagcgagugcgugugcaucaacggcaccugcaccguggugaugaccgacggcagcgccagcggcagagccgacaccaagauccuguucaucgaggagggcaagaucgugcacaucagcccccugagcggcagcgcccagcacguggaggagugcagcugcuaccccagauaccccggcgugagaugcaucugcagagacaacuggaagggcagcaacagacccgugguggacaucaacgugaaggacuacagcaucgacagcagcuacgugugcagcggccuggugggcgacacccccagaaacaacgacagaagcagcaacagcuacugcagaaaccccaacaacgagaagggcaaccacggcgugaagggcugggccuucgacgacggcaacgacguguggaugggcagaaccaucagcgaggacagcagaagcggcuacgagaccuucaaggugaucggcggcuggagcacccccaacagcaagcugcagaucaacagacaggugaucguggacagcgacaacagaagcggcuacagcggcaucuucagcguggagggcaagagcugcaucaacagaugcuucuacguggagcugaucagaggcagagagcaggagaccagagugugguggaccagcaacagcaucgugguguucugcggcaccagcggcaccuacggcaccggcagcuggcccgacggcgccgacaucaaccugaugcccaucuga

SEQ ID NO: 174179 - RNA, 1410 nt, Artificial Sequence; identical to SEQ ID NO: 174178
  derived and/or modified CDS sequence (opt4) from neuraminidase__InfluenzaA__AAO46492

SEQ ID NO: 174180 - RNA, 1410 nt, Artificial Sequence
  derived and/or modified CDS sequence (opt4) from neuraminidase__InfluenzaA__AAO88264
augaacaccaaccagagaaucaucaccaucggcaccgugugccugaucgugggcaucgugagccugcugcugcagaucggcaacaucgugagccuguggaucagccacagcauccagaccggcaagaagaacuacagcaagaucugcagcaagagcgugaucaccuacgagaacaacaccugggugaaccagaccuacgugaacaucagcaacaucaacaucgccgacggccagggcgugaacagcaucauccuggccggcaacagcagccugugccccaucagcggcugggccaucuacagcaaggacaacagcaucagaaucggcagcaagggcgacaucuucgugaucagagagcccuucaucagcugcagccaccuggagugcagaaccuucuuccugacccagggcgcccugcugaacgacagacacagcaacggcaccgugaaggacagaagccccuacagaacccugaugagcugccccaucggcgaggcccccagccccuacaacagcagauucgagagcguggccuggagcgccagcgccugccacgacggcaugggcuggcugaccaucggcaucagcggccccgacaacggcgccguggccgugcugaaguacaacggcaucaucaccgacaccaucaagagcuggagaaacaagauccugagaacccaggagagcgagugcgugugcaucaacggcagcugcuucaccaucaugaccgacggccccagcaacggccaggccagcuacaagaucuucaagauggagaagggcaagaucaucaagagcguggagcuggacgcccccaacuaccacuacgaggagugcagcugcuaccccgacaccggcaagguggugugcgugugcagcgacaacuggcacgccagcaacagacccugggugagcuucgaccagaaccuggacuaccagaucggcuacaucugcagcggcguguucggcgacaaccccagaagcaacgacggcagaggcaacugcggccccgugcugagcaacggcgccaacggcgugaagggcuucagcuucagauacggcaacggcguguggaucggcagaaccaagagcaucagcagcagaagcggcuucgagaugaucugggaccccaacggcuggaccgagaccgacagcagcuucagcaucaagcaggacgugaucgcccugaccgacuggagcggcuacagcggcagcuucgugcagcaccccgagcugaccggcaugaacugcaucagacccugcuucuggguggagcugaucagaggccagcccaaggagagcaccaucuggaccagcggcagcagcaucagcuucugcggcguggacagcgagaccgccagcuggagcuggcccgacggcgccgaccugcccuucaccaucgacaaguga

SEQ ID NO: 174181 - RNA, 1410 nt, Artificial Sequence
  derived and/or modified CDS sequence (opt4) from neuraminidase__InfluenzaA__AAQ10334
augaaccccaaccagaagaucaucaccaucggcagcgugagccugaccaucgccaccaucugcuuccugaugcagaucgccauccuggugaccaccgugacccugcacuucaagcaguacgagugcaaccccccccccaacaaccaggugaugcugugcgagcccaccaucaucgagagaaacaucaccgagaucguguaccugaccaacaccaccaucgagaaggagaucugccccaagcuggccgaguacagaaacuggagcaagccccagugcaagaucaccggcuucgcccccuucagcaaggacaacagcaucagacugagcgccggcggcgacaucugggugaccagagagcccuacgugagcugcgaccccggcaagugcuaccaguucgcccugggccagggcaccacccugaacaacagacacagcaacgacaccgugcacgacagaacccccuacagaacccugcugaugaacgagcugggcgugcccuuccaccugggcaccaagcaggugugcaucgccuggagcagcagcagcugccacgacggcaaggccuggcugcacgugugcgugaccggccacaacgagaacgccaccgccagcuucaucuacaacggcagacugguggacagcaucggcagcuggagcaagaacauccugagaacccaggagagcgagugcgugugcaucaacggcaccugcaccguggugaugaccgacggcagcgccagcggcagagccgacaccaagauccuguucaucgaggagggcaagaucgugcacaucagcccccugagcggcagcgcccagcacguggaggagugcagcugcuaccccagauaccccggcgugagaugcgugugcagagacaacuggaagggcagcaacagacccaucguggacaucaacgugaaggacuacagcaucgugagcagcuacgugugcagcggccuggugggcgacacccccagaaagaacgacagcagcagcagcagcuacugccugaaccccaacaacgaggagggcggccacggcgugaagggcugggccuucgacgacggcaacgacguguggaugggcagaaccaucagcgagaagcugagaagcggcuacgagaccuucaaggugaucggcggcuggagcaagcccaacagcaagcugcagaucaacagacaggugaucguggacagaggcaacagaagcggcuacagcggcaucuucagcguggagggcaagagcugcaucaacagaugcuucuacguggagcugaucagaggcagaaagcaggagaccgaggugugguggaccagcaacagcaucgugguguucugcggcaccagcggcaccuacggcaccggcagcuggcccgacggcgccgacaucaaccugaugcccaucuga

SEQ ID NO: 174182 - RNA, 1410 nt, Artificial Sequence; identical to SEQ ID NO: 174181
  derived and/or modified CDS sequence (opt4) from neuraminidase__InfluenzaA__AAQ10335

SEQ ID NO: 174183 - RNA, 1410 nt, Artificial Sequence
  derived and/or modified CDS sequence (opt4) from neuraminidase__InfluenzaA__AAQ10336
augaaccccaaccagaagaucaucaccaucggcagcgugagccugaccaucgccaccaucugcuuccugaugcagaucgccauccuggugaccaccgugacccugcacuucaagcaguacgagugcaaccccccccccaacaaccaggugaugcugugcgagcccaccaucaucgagagaaacaucaccgagaucguguaccugaccaacaccaccaucgagaaggagaucugccccaagcuggccgaguacagaaacuggagcaagccccagugcaagaucaccggcuucgcccccuucagcaaggacaacagcaucagacugagcgccggcggcgacaucugggugaccagagagcccuacgugagcugcgaccccggcaagugcuaccaguucgcccugggccagggcaccacccugaacaacagacacagcaacgacaccgugcacgacagaacccccuacagaacccugcugaugaacgagcugggcgugcccuuccaccugggcaccaagcaggugugcaucgccuggagcagcagcagcugccacgacggcaaggccuggcugcacgugugcgugaccggccacaacgagaacgccaccgccagcuucaucuacaacggcagacugguggacagcaucggcagcuggagcaagaacauccugagaacccaggagagcgagugcgugugcaucaacggcaccugcaccguggugaugaccgacggcagcgccagcggcagagccgacaccaagauccuguucaucgaggagggcaagaucgugcacaucagcccccugagcggcagcgcccagcacguggaggagugcagcugcuaccccagauaccccggcgugagaugcgugugcagagacaacuggaagggcagcaacagacccaucguggacaucaacgugaaggacuacagcaucgugagcagcuacgugugcagcggccuggugggcgacacccccagaaagaacgacagcagcagcagcagcuacugccugaaccccaacaacgaggagggcggccacggcgugaagggcugggccuucgacgacggcaacgacguguggaugggcagaaccaucagcgagaagcugagaagcggcuacgagaccuucaaggugaucggcggcuggagcaagcccaacagcaagcugcagaucaacagacaggugaucguggacagaggcaacagaagcggcuacagcggcaucuucagcguggagggcaagagcugcaucaacagaugcuucuacguggagcugaucagaggcagaaagcaggagaccgaggugugguggaccagcaacagcaucgugguguucugcggcaccagcggcaccuacggcaccggcagcuggcccgacggcgccgagaucaaccugaugcccaucuga

SEQ ID NO: 174184 - RNA, 1410 nt, Artificial Sequence; identical to SEQ ID NO: 174181
  derived and/or modified CDS sequence (opt4) from neuraminidase__InfluenzaA__AAQ10337

SEQ ID NO: 174185 - RNA, 1410 nt, Artificial Sequence
  derived and/or modified CDS sequence (opt4) from neuraminidase__InfluenzaA__AAQ10339
augaaccccaaccagaagaucaucaccaucggcagcgugagccugaccaucgccaccaucugcuuccugaugcagaucgccauccuggugaccaccgugacccugcacuucaagcaguacgagugcaacagcccccccaacaaccaggugaugcugugcgagcccaccaucaucgagagaaacaucaccgagaucguguaccugaccaacaccaccaucgagaaggagaucugccccaagcuggccgaguacagaaacuggagcaagccccagugcaagaucaccggcuucgcccccuucagcaaggacaacagcaucagacugagcgccggcggcgacaucugggugaccagagagcccuacgugagcugcgaccccgacaagugcuaccaguucgcccugggccagggcaccacccugaacaacagacacagcaacgacaccgugcacgacagaacccccuacagaacccugcugaugaacgagcugggcgugcccuuccaccugggcaccaagcaggugugcaucgccuggagcagcagcagcugccacgacggcaaggccuggcugcacgugugcgugaccggccacgacgagaacgccaccgccagcuucaucuacgacggcagacugguggacagcaucggcagcuggagcaagaagauccugagaacccaggagagcgagugcgugugcaucaacggcaccugcaccguggugaugaccgacggcagcgccagcggcagagccgacaccaagauccuguucaucgaggagggcaagaucgugcacaucagcccccugagcggcagcgcccagcacguggaggagugcagcugcuaccccagauaccccggcgugagaugcgugugcagagacaacuggaagggcagcaacagacccaucguggacaucaacgugaaggacuacagcaucgugagcagcuacgugugcagcggccuggugggcgacacccccagaaagaacgacagcagcagcagcagccacugccugaaccccaacaacgaggagggcggccacggcgugaagggcugggccuucgacgacggcaacgacguguggaugggcagaaccaucagcgagacccugagaagcggcuacgagaccuucaaggugaucgagggcuggagcaagcccaacagcaagcugcagaucaacagacaggugaucguggacagaggcaacagaagcggcuacagcggcaucuucagcguggagggcaagagcugcaucaacagaugcuucuacguggagcugaucagaggcagaaagcaggagaccgaggugugguggaccagcaacagcaucgugguguucugcggcaccagcggcaccuacggcaccggcagcuggcccgacggcgccgacaucaaccugaugcccaucuga

SEQ ID NO: 174186 - RNA, 1410 nt, Artificial Sequence
  derived and/or modified CDS sequence (opt4) from neuraminidase__InfluenzaA__AAQ10341
augaaccccaaccagaagaucaucaccaucggcagcgugagccugaccaucgccaccaucugcuuccugaugcagaucgccauccuggugaccaccgugacccugcacuucaagcaguacgagugcaacagcccccccaacaaccaggugaugcugugcgagcccaccaucaucgagagaaacaucaccgagaucguguaccugaccaacaccaccaucgagaaggagaucugccccaagcuggccgaguacagaaacuggagcaagccccagugcaagaucaccggcuucgcccccuucagcaaggacaacagcaucagacugagcgccggcggcgacaucugggugaccagagagcccuacgugagcugcgaccccgacaagugcuaccaguucgcccugggccagggcaccacccugaacaacagacacagcaacgacaccgugcacgacagaacccccuacagaacccugcugaugaacgagcugggcgugcccuuccaccugggcaccaagcaggugugcaucgccuggagcagcagcagcugccacgacggcaaggccuggcugcacgugugcgugaccggccacgacgagaacgccaccgccagcuucaucuacgacggcagacugguggacagcaucggcagcuggagcaagaagauccugagaacccaggagagcgagugcgugugcaucaacggcaccugcaccguggugaugaccgacggcagcgccagcggcagagccgacaccaagauccuguucaucgaggagggcaagaucgugcacaucagcccccugagcggcagcgcccagcacguggaggagugcagcugcuaccccagauaccccggcgugagaugcgugugcagagacaacuggaagggcagcaacagacccaucguggacaucaacgugaaggacuacagcaucgugagcagcuacgugugcagcggccuggugggcgacacccccagaaagaacgacagcagcagcagcagccacugccugaaccccaacaacgaggagggcggccacggcgugaagggcugggccuucgacgacggcaacgacguguggaugggcagaaccaucagcgagaagcugagaagcggcuacgagaccuucaaggugaucgagggcuggagcaagcccaacagcaagcugcagaucaacagacaggugaucguggacagaggcaacagaagcggcuacagcggcaucuucagcguggagggcaagagcugcaucaacagaugcuucuacguggagcugaucagaggcagaaagcaggagaccgaggugugguggaccagcaacagcaucgugguguucugcggcaccagcggcaccuacggcaccggcagcuggcccgacggcgccgacaucaaccugaugcccaucuga

SEQ ID NO: 174187 - RNA, 1410 nt, Artificial Sequence
  derived and/or modified CDS sequence (opt4) from neuraminidase__InfluenzaA__AAQ10343
augaaccccaaccagaagaucaucaccaucggcagcgugagccugaccaucgccaccaucugcuuccugaugcagaucgccauccuggugaccaccgugacccugcacuucaagcaguacgagugcagcagcccccccaacaaccaggugaugcugugcgagcccaccaucaucgagagaaacaucaccgagaucguguaccugaccaacaccaccaucgagaaggagaucugccccaagcuggccgaguacagaaacuggagcaagccccagugcaagaucaccggcuucgcccccuucagcaaggacaacagcaucagacugagcgccggcggcgacaucugggugaccagagagcccuacgugagcugcgaccccgacaagugcuaccaguucgcccugggccagggcaccacccugaacaacagacacagcaacgacaccgugcacgacagaacccccuacagaacccugcugaugaacgagcugggcgugcccuuccaccugggcaccaagcaggugugcaucgccuggagcagcagcagcugccacgacggcaaggccuggcugcacgugugcgugaccggccacgacgagaacgccaccgccagcuucaucuacgacggcagacugguggacagcaucggcagcuggagcaagaagauccugagaacccaggagagcgagugcgugugcaucaacggcaccugcaccguggugaugaccgacggcagcgccagcggcagagccgacaccaagauccuguucaucgaggagggcaagaucgugcacaucagcccccugagcggcagcgcccagcacguggaggagugcagcugcuaccccagauaccccggcgugagaugcgugugcagagacaacuggaagggcagcaacagacccaucguggacaucaacgugaaggacuacagcaucgugagcagcuacgugugcagcggccuggugggcgacacccccagaaagaacgacagcagcagcagcagccacugccugaaccccaacaacgaggagggcggccacggcgugaagggcugggccuucgacgacggcaacgacguguggaugggcagaaccaucagcgagaaguucagaagcggcuacgagaccuucaaggugaucgagggcuggagcaagcccaacagcaagcugcagaucaacagacaggugaucguggacagaggcaacagaagcggcuacagcggcaucuucagcguggagggcaagagcugcaucaacagaugcuucuacguggagcugaucagaggcagaaagcaggagaccgaggugugguggaccagcaacagcaucguggccuucugcggcaccagcggcaccuacggcaccggcagcuggcccgacggcgccgacaucaaccugaugcccaucuga

SEQ ID NO: 174188 - RNA, 1191 nt, Artificial Sequence
  derived and/or modified CDS sequence (opt4) from neuraminidase__InfluenzaA__AAQ10344
augaaccccaaccagaagaucaucaccaucggcagcgugagccugaccaucgccaccaucugcuuccugaugcagaucgccauccuggugaccaccgugacccugcacuucaagcaguacgagugcaacagcccccccaacaaccaggccaugcugugcgagcccaccaucaucgagagaaacaucaccgagaucguguaccugaccaacaccaccaucgagaaggagaucugccccaagcuggccgaguacagaaacuggagcaagccccagugcaagaucaccggcuucgcccccuucagcaaggacaacagcaucagacugagcgccggcggcgacaucugggugaccagagagcccuacgugagcugcgaccccgacaagugcuaccaguucgcccugggccagggcaccacccugaacaacagacacagcaacgacaccgugcacgacagaacccccuacagaacccugcugaugaacgagcugggcgugcccuuccaccugggcaccaagcaggugugcaucgccuggagcagcagcagcugccacgacggcaaggccuggcugcacgugugcgugaccggccacgacgagaacgccaccgccagcuucaucuacgacggcagacugguggacagcaucggcagcuggagcaagaagauccugagaacccaggagagcgagugcgugugcaucaacggcaccugcaccguggugaugaccgacggcagcgccagcggcagagccgacaccaagauccuguucaucgaggagggcaagaucgugcacaccagcaagcugagcggcagcgcccagcacguggaggagugcagcugcuaccccagauaccccggcgugagaugcgugugcagagacaacuggaagggcagcaacagacccaucguggacaucaacgugaaggacuacagcaucgugagcagcuacgugugcagcggccuggugggcgacacccccagaaagaacgacagcagcagcagcagccacugccugaaccccaacaacgaggagggcggccacggcgugaagggcugggccuucgacgacggcaacgacguguggaugggcagaaccaucagcgagaaguucagaagcggcuacgagaccuucaaggugaucgagggcuggagcaagcccaacagcaagcugcagaucaacagcaagagcuga

SEQ ID NO: 174189 - RNA, 1416 nt, Artificial Sequence
  derived and/or modified CDS sequence (opt4) from neuraminidase__InfluenzaA__AAR11366
augaaccccaaccagaagcuguucgcccugagcggcguggccaucgcccugagcgugcugaaccugcugaucggcaucagcaacgugggccugaacgugagccugcaccugaaggagaagggccccaagcaggaggagaaccugaccugcaccaccaucaaccagaacaacaccaccgugguggagaacaccuacgugaacaacaccaccaucaucaccaagggcaccgaccugaagacccccagcuaccugcugcugaacaagagccugugcaacguggagggcuggguggugaucgccaaggacaacgccgugagauucggcgagagcgagcagaucaucgugaccagagagcccuacgugagcugcgaccccaccggcugcaagauguacgcccugcaccagggcaccaccaucagaaacaagcacagcaacggcaccauccacgacagaaccgccuucagaggccugaucagcaccccccugggcaccccccccaccgugagcaacagcgacuucaugugcgugggcuggagcagcaccaccugccacgacggcaucgccagaaugaccaucugcauccagggcaacaacgacaacgccaccgccaccguguacuacaacagaagacugaccaccaccaucaagaccugggccagaaacauccugagaacccaggagagcgagugcgugugccacaacggcaccugcgccguggugaugaccgacggcagcgccagcagccaggccuacaccaaggugauguacuuccacaagggccugguggugaaggaggaggagcugagaggcagcgccagacacaucgaggagugcagcugcuacggccacaaccagaaggugaccugcgugugcagagacaacuggcagggcgccaacagacccaucaucgagaucgacaugaacacccuggagcacaccagcagauacgugugcaccggcauccugaccgacaccagcagacccggcgacaagagcagcggcgacugcagcaaccccaucaccggcagccccggcgcccccggcgugaagggcuucggcuuccugaacggcgacaacaccuggcugggcagaaccaucagccccagaagcagaagcggcuucgagaugcugaagauccccaacgccggcaccgaccccaacagcagaaucgccgagagacaggagaucguggacaacaacaacuggagcggcuacagcggcagcuucaucgacuacuggaacgacaacagcgagugcuacaaccccugcuucuacguggagcugaucagaggcagacccgaggaggccaaguacgugugguggaccagcaacagccugaucgcccugugcggcagccccuuccccgugggccccggcagcuuccccgacggcgcccagauccaguacuucagcuga

SEQ ID NO: 174190 - RNA, 1350 nt, Artificial Sequence
  derived and/or modified CDS sequence (opt4) from neuraminidase__InfluenzaA__AAS89005
augaaccccaacaagaagaucaucaccaucggcagcaucugcauggugaccggcauggugagccugaugcugcagaucggcaaccugaucagcaucugggugagccacagcauccacaccggcaaccagcagaaggccgagcccaucagcaacaccaacuuccugaccgagaaggccguggccagcgugaagcuggccggcaacagcagccugugccccaucaacggcugggccguguacagcaaggacaacagcaucagaaucggcagcaagggcgacguguucgugaucagagagcccuucaucagcugcagccaccuggagugcagaaccuucuuccugacccagggcgcccugcugaacgacaagcacagcaacggcaccgugaaggacagaagcccccacagaacccugaugagcugccccgugggcgaggcccccagccccuacaacagcagauucgagagcguggccuggagcgccagcgccugccacgacggcaccagcuggcugaccaucggcaucagcggccccgacagcggcgccguggccgugcugaaguacaacggcaucaucaccgacaccaucaagagcuggagaaacaacauccugagaacccaggagagcgagugcgccugcgugaacggcagcugcuucaccgugaugaccgacggccccagcaacggccaggccagccacaagaucuucaagauggagaagggcaagguggugaagagcguggagcuggacgcccccaacuaccacuacgaggagugcagcugcuaccccgacgccggcgagaucaccugcgugugcagagacaacuggcacggcagcaacagacccugggugagcuucaaccagaaccuggaguaccagaucggcuacaucugcagcggcguguucggcgacaaccccagacccaacgacggcaccggcagcugcggccccgugagcagcaacggcgccuacggcgugaagggcuucagcuucaaguacggcaacggcguguggaucggcagaaccaagagcaccaacagcagaagcggcuucgagaugaucugggaccccaacggcuggaucgagaccgacagcagcuucagcgugaagcaggacaucguggccaucaccgacuggagcggcuacagcggcagcuucgugcagcaccccgagcugaccggccuggacugcaucagacccugcuucuggguggagcugaucagaggcagacccaaggagagcaccaucuggaccagcggcagcagcaucagcuucugcggcgugaacagcgacaccgugggcuggagcuggcccgacggcgccgagcugcccuucaccaucgacaaguga

SEQ ID NO: 174191 - RNA, 1350 nt, Artificial Sequence
  derived and/or modified CDS sequence (opt4) from neuraminidase__InfluenzaA__AAS89006
augaaccccaacaagaagaucaucaccaucggcagcaucugcauggugaccggcauggugagccugaugcugcagaucggcaaccugaucagcaucugggugagccacagcauccacaccggcaaccagcacaaggccgagcccaucagcaacaccaacuuccugaccgagaaggccguggccagcgugaagcuggccggcaacagcagccugugccccaucaacggcugggccguguacagcaaggacaacagcaucagaaucggcagcaagggcgacguguucgugaucagagagcccuucaucagcugcagccaccuggagugcagaaccuucuuccugacccagggcgcccugcugaacgacaagcacagcaacggcaccgugaaggacagaagcccccacagaacccugaugagcugccccgugggcgaggcccccagccccuacaacagcagauucgagagcguggccuggagcgccagcgccugccacgacggcaccagcuggcugaccaucggcaucagcggccccgacaacggcgccguggccgugcugaaguacaacggcaucaucaccgacaccaucaagagcuggagaaacaacauccugagaacccaggagagcgagugcgccugcgugaacggcagcugcuucaccgugaugaccgacggccccagcaacggccaggccagccacaagaucuucaagauggagaagggcaagguggugaagagcguggagcuggacgcccccaacuaccacuacgaggagugcagcugcuaccccgacgccggcgagaucaccugcgugugcagagacaacuggcacggcagcaacagacccugggugagcuucaaccagaaccuggaguaccagaucggcuacaucugcagcggcguguucggcgacaaccccagacccaacgacggcaccggcagcugcggccccgugagcagcaacggcgccuacggcgugaagggcuucagcuucaaguacggcaacggcguguggaucggcagaaccaagagcaccaacagcagaagcggcuucgagaugaucugggaccccaacggcuggaccgagaccgacagcagcuucagcgugaagcaggacaucguggccaucaccgacuggagcggcuacagcggcagcuucgugcagcaccccgagcugaccggccuggacugcaucagacccugcuucuggguggagcugaucagaggcagacccaaggagagcaccaucuggaccagcggcagcagcaucagcuucugcggcgugaacagcgacaccgugggcuggagcuggcccgacggcgccgagcugcccuucaccaucgacaaguga

SEQ ID NO: 174192 - RNA, 1410 nt, Artificial Sequence
  derived and/or modified CDS sequence (opt4) from neuraminidase__InfluenzaA__AAT38822
augaaccccaaccagaagaucaucaccaucggcguggugaacaccacccugagcaccaucgcccuguucaucggcgugggcaaccugguguucaacaccgugauccacgagaagaucggcgaccaccagaucgugacccaccccaccaucaugacccccgaggugcccaacugcagcgacaccaucaucaccuacaacaacaccgugaucaacaacaucaccaccaccaucaucaccgaggccgagagacccuucaagagcccccugccccugugccccuucagaggcuucuuccccuuccacaaggacaacgccaucagacugggcgagaacaaggacgugaucgugaccagagagcccuacgugagcugcgacaacgacaacugcuggagcuucgcccuggcccagggcgcccugcugggcaccaagcacagcaacggcaccaucaaggacagaacccccuacagaagccugaucagauuccccaucggcaccgcccccgugcugggcaacuacaaggagaucugcaucgccuggagcagcagcagcugcuucgacggcaaggaguggaugcacgugugcaugaccggcaacgacaacgacgccagcgcccagaucaucuacggcggcagaaugaccgacagcaucaagagcuggagaaaggacauccugagaacccaggagagcgagugccagugcaucgacggcaccugcgugguggccgugaccgacggccccgccgccaacagcgccgaccacagaguguacuggaucagagagggcagaaucaucaaguacgagaacgugcccaagaccaagauccagcaccuggaggagugcagcugcuacguggacaucgacguguacugcaucugcagagacaacuggaagggcagcaacagacccuggaugagaaucaacaacgagaccauccuggagaccggcuacgugugcagcaaguuccacagcgacacccccagacccgccgaccccagcaucaugagcugcgacagccccagcaacgugaacggcggccccggcgugaagggcuucggcuucaaggccggcaacgacguguggcugggcagaaccgugagcaccagcggcagaagcggcuucgagaucaucaaggugaccgagggcuggaucaacagccccaaccacgugaagagcaucacccagacccuggugagcaacaacgacuggagcggcuacagcggcagcuucaucgugaaggccaaggacugcuuccagcccugcuucuacguggagcugaucagaggcagacccaacaagaacgacgacgugagcuggaccagcaacagcaucgugaccuucugcggccuggacaacgagcccggcagcggcaacuggcccgacggcagcaacaucggcuucaugcccaaguga

SEQ ID NO: 174193 - RNA, 1350 nt, Artificial Sequence; identical to SEQ ID NO: 174191
  derived and/or modified CDS sequence (opt4) from neuraminidase__InfluenzaA__AAV65827

SEQ ID NO: 174194 - RNA, 1410 nt, Artificial Sequence
  derived and/or modified CDS sequence (opt4) from neuraminidase__InfluenzaA__AAX11488
augaaccccaaccagaagaucaucaccaucggcagcgugagccugaccaucgccgccaucugcuuccugaugcagaucgccauccuggugaccaccgugacccugcacuucaagcagcacgagugcaacagcccccccaacaaccaggugaugcugugcgagcccaccaucaucgagagaaacaucaccgagaucguguaccugaccaacaccaccaucgagaaggagaucugccccaagcuggccgaguacagaaacuggagcaagccccagugcaacaucaccggcuucgcccccuucagcaaggacaacagcaucagacugagcgccggcggcgacaucugggugaccagagagcccuacgugagcugcgaccccgacaagugcuaccaguucgcccugggccagggcaccacccugaacaacggccacagcaacgacaccgugcacgacagaacccccuacagaacccugcugaugaacgagcugggcgugcccuuccaccugggcaccagacaggugugcaucgccuggagcagcagcagcugccacgacggcaaggccuggcugcacgugugcgugaccggcgacgacaagaacgccaccgccagcuucaucuacaacggcagacugguggacagcaucggcagcuggagcaagaagauccugagaacccaggagagcgagugcgugugcaucaacggcaccugcaccguggugaugaccgacggcagcgccagcggcaaggccgacaccaagauccuguucaucgaggagggcaagaucgugcacaucagcgcccugagcggcagcgcccagcacguggaggagugcagcugcuaccccagauaccccggcgugagaugcgugugcagagacaacuggaagggcagcaacagacccaucguggacaucaacgugaaggacuacagcaucgugagcagcuacgugugcagcggccuggugggcgacacccccagaaagaacgacagcuucagcagcagccacugccuggaccccaacaacgaggagggcggccacggcgugaagggcugggccuucgacgacggcaacgacguguggaugggcagaaccaucagcgagaagcugagaagcggcuacgagaccuucaaggugaucgagggcuggagcaagcccaacagcaagcugcagaucaacagacaggugaucguggagagaggcaacagaagcggcuacagcggcaucuucagcguggagggcaagagcugcaucaacagaugcuucuacguggagcugaucagaggcagaaaggaggagaccgaggugugguggaccagcaacagcaucgugguguucugcggcaccagcggcaccuacggcaccggcagcuggcccgacggcgccgacaucaaccugaugcccaucuga

SEQ ID NO: 174195 - RNA, 1410 nt, Artificial Sequence
  derived and/or modified CDS sequence (opt4) from neuraminidase__InfluenzaA__AAX11508
augaaccccaaccagaagaucaucaccaucggcagcgugagccugaccaucgccaccaucugcuuccugaugcagaucgccauccuggugaccaccgugacccugcacuucaagcagcacgagugcaacagcccccccaacaaccaggugaugcugugcgagcccaccaucaucgagagaaacaucaccgagaucguguaccugaccaacaccaccaucgagaaggagaucugccccaagcuggccgaguacagaaacuggagcaagccccagugcaacaucaccggcuucgcccccuucagcaaggacaacagcaucagacugagcgccggcggcgacaucugggugaccagagagcccuacgugagcugcgaccccgacaagugcuaccaguucgcccugggccagggcaccacccugaacaacggccacagcaacaacaccgugcacgacagaacccccuacagaacccugcugaugaacgagcugggcgugcccuuccaccugggcaccagacaggugugcaucgccuggagcagcagcagcugccacgacggcaaggccuggcugcacgugugcgugaccggcgacgacaagaacgccaccgccagcuucaucuacaacggcagacugguggacagcaucggcagcuggagcaagaagauccugagaacccaggagagcgagugcgugugcaucaacggcaccugcaccguggugaugaccgacggcagcgccagcggcaaggccgacaccaagauccuguucaucgaggagggcaagaucgugcacaucagcacccugagcggcagcgcccagcacguggaggagugcagcugcuaccccagauaccccggcgugagaugcgugugcagagacaacuggaagggcagcaacagacccaucguggacaucaacgugaaggacuacagcaucgugagcagcuacgugugcagcggccuggugggcgacacccccagaaagaacgacagcuucagcagcagccacugccuggaccccaacaacgaggagggcggccacggcgugaagggcugggccuucgacgacggcaacgacguguggaugggcagaaccaucagcgagaagcugagaagcggcuacgagaccuucaaggugaucgagggcuggagcaagcccaacagcaagcugcagaucaacagacaggugaucguggagagaggcaacagaagcggcuacagcggcaucuucagcguggagggcaagagcugcaucaacagaugcuucuacguggagcugaucagaggcagaaaggaggagaccgaggugugguggaccagcaacagcaucgugguguucugcggcaccagcggcaccuacggcaccggcagcuggcccgacggcgccgacaucaaccugaugcccaucuga

SEQ ID NO: 174196 - RNA, 1410 nt, Artificial Sequence
  derived and/or modified CDS sequence (opt4) from neuraminidase__InfluenzaA__AAX11538
augaaccccaaccagaagaucaucaccaucggcagcgugagccugaccaucgccaccaucugcuuccugaugcagaucgccauccuggugaccaccgugacccugcacuucaagcagcacgagugcaacagcccccccaacaaccaggugaugcugugcgagcccaccaucaucgagagaaacaucaccgagaucguguaccugaccaacaccaccaucgagaaggagaucugccccaagcuggccgaguacagaaacuggagcaagccccagugcaacaucaccggcuucgcccccuucagcaaggacaacagcaucagacugagcgccggcggcgacaucugggugaccagagagcccuacgugagcugcgaccccgacaagugcuaccaguucgcccugggccagggcaccacccugaacaacggccacagcaacgacaccgugcacgagagaacccccuacagaacccugcugaugaacgagcugggcgugcccuuccaccugggcaccagacaggugugcaucgccuggagcagcagcagcugccacgacggcaaggccuggcugcacgugugcgugaccggcgacgacaagaacgccaccgccagcuucaucuacaacggcagacugguggacagcaucggcagcuggagcaagaagauccugagaacccaggagagcgagugcgugugcaucaacggcaccugcaccguggugaugaccgacggcagcgccagcggcaaggccgacaccaagauccuguucaucgaggagggcaagaucgugcacaucagcacccugagcggcagcgcccagcacguggaggagugcagcugcuaccccagauaccccggcgugagaugcgugugcagagacaacuggaagggcagcaacagacccaucguggacaucaacgugaaggacuacagcaucgugagcagcuacgugugcagcggccuggugggcgacacccccagaaagaacgacagcagcagcagcagccacugccuggaccccaacaacgaggagggcggccacggcgugaagggcugggccuucgacgacggcaacgacguguggaugggcagaaccaucagcgagaagcugagaagcggcuacgagaccuucaaggugaucgagggcuggagcaagcccaacagcaagcugcagaucaacagacaggugaucguggagagaggcaacagaagcggcuacagcggcaucuucagcguggagggcaagagcugcaucaacagaugcuucuacguggagcugaucagaggcagaaaggaggagaccgaggugugguggaccagcaacagcaucgugguguucugcggcaccagcggcaccuacggcaccggcagcuggcccgacggcgccgacaucaaccugaugcccaucuga

SEQ ID NO: 174197 - RNA, 1410 nt, Artificial Sequence
  derived and/or modified CDS sequence (opt4) from neuraminidase__InfluenzaA__AAX11548
augaaccccaaccagaagaucaucaccaucggcagcgugagccugaccaucgccaccaucugcuuccugaugcagaucgccauccuggugaccaccgugacccugcacuucaagcagcacgagugcaacagcccccccaacaaccaggugaugcugugcgagcccaccaucaucgagagaaacaucaccgagaucguguaccugaccaacaccaccaucgagaaggagaucugccccaagcuggccgaguacagaaacuggagcaagccccagugcaacaucaccggcuucgcccccuucagcaaggacaacagcaucagacugagcgccggcggcgacaucugggugaccagagagcccuacgugagcugcgaccccgacaagugcuaccaguucgcccugggccagggcaccacccugaacaacggccacagcaacgacaccgugcacgacagaacccccuacagaacccugcugaugaacgagcugggcgugcccuuccaccugggcaccagacaggugugcaucgccuggagcagcagcagcugccacgacggcaaggccuggcugcacgugugcgugaccggcgacgacaagaacgccaccgccagcuucaucuacaacggcagacugguggacagcaucggcagcuggagcaagaagauccugagaacccaggagagcgagugcgugugcaucaacggcaccugcaccguggugaugaccgacggcagcgccagcggcaaggccgacaccaagauccuguucaucgaggagggcaagaucgugcacaucagcacccugagcggcagcgcccagcacguggaggagugcagcugcuaccccagauaccccggcgugagaugcgugugcagagacaacuggaagggcagcaacagacccaucguggacaucaacgugaaggacuacagcaucgugagcagcuacgugugcagcggccuggugggcgacacccccagaaagaacgacagcagcagcagcagccacugccuggaccccaacaacgaggagggcggccacggcgugaagggcugggccuucgacgacggcaacgacguguggaugggcagaaccaucagcgagaagcugagaagcggcuacgagaccuucaaggugaucgagggcuggagcaagcccaacagcaagcugcagaucaacagacaggugaucguggagagaggcaacagaagcggcuacagcggcaucuucagcguggagggcaagagcugcaucaacagaugcuucuacguggagcugaucagaggcagaaaggaggagaccgaggugugguggaccagcaacagcaucgugguguucugcggcaccagcggcaccuacggcaccggcagcuggcccgacggcgccgacaucaaccugaugcccaucuga

SEQ ID NO: 174198 - RNA, 1410 nt, Artificial Sequence; identical to SEQ ID NO: 174195
  derived and/or modified CDS sequence (opt4) from neuraminidase__InfluenzaA__AAX11558

SEQ ID NO: 174199 - RNA, 1410 nt, Artificial Sequence
  derived and/or modified CDS sequence (opt4) from neuraminidase__InfluenzaA__AAX11568
augaaccccaaccagaagaucaucaccaucggcagcgugagccugaccaucgccaccaucugcuuccugaugcagaucgccauccuggugaccaccgugacccugcacuucaagcagcacgagugcuacagcccccccaacaaccaggugaugcugugcgagcccaccaucaucgagagaaacaucaccgagaucguguaccugaccaacaccaccaucgagaaggagaucugccccaagcuggccgaguacagaaacuggagcaagccccagugcaacaucaccggcuucgcccccuucagcaaggacaacagcaucagacugagcgccggcggcgacaucugggugaccagagagcccuacgugagcugcgaccccgacaagugcuaccaguucgcccugggccagggcaccacccugaacaacggccacagcaacgacaccgugcacgacagaacccccuacagaacccugcugaugaacgagcugggcgugcccuuccaccugggcaccagacaggugugcaucgccuggagcagcagcagcugccacgacggcaaggccuggcugcacgugugcgugaccggcgacgacaagaacgccaccgccagcuucaucuacaacggcagacugguggacagcaucggcagcuggagcaagaagauccugagaacccaggagagcgagugcgugugcaucaacggcaccugcaccguggugaugaccgacggcagcgccagcggcaaggccgacaccaagauccuguucaucgaggagggcaagaucgugcacaucagcacccugagcggcagcgcccagcacguggaggagugcagcugcuaccccagauaccccggcgugagaugcgugugcagagacaacuggaagggcagcaacagacccaucguggacaucaacgugaaggacuacagcaucgugagcagcuacgugugcagcggccuggugggcgacacccccagaaagaacgacagcuucagcagcagccacugccuggaccccaacaacgaggagggcggccacggcgugaagggcugggccuucgacgacggcaacgacguguggaugggcagaaccaucagcgagaagcugagaagcggcuacgagaccuucaaggugaucgagggcuggagcaagcccaacagcaagcugcagaucaacagacaggugaucguggagagaggcaacagaagcggcuacagcggcaucuucagcguggagggcaagagcugcaucaacagaugcuucuacguggagcugaucagaggcagaaaggaggagaccgaggugugguggaccagcaacagcaucgugguguucugcggcaccagcggcaccuacggcaccggcagcuggcccgacggcgccgacaucaaccugaugcccaucuga

SEQ ID NO: 174200 - RNA, 1410 nt, Artificial Sequence; identical to SEQ ID NO: 174195
  derived and/or modified CDS sequence (opt4) from neuraminidase__InfluenzaA__AAX11578

SEQ ID NO: 174201 - RNA, 1410 nt, Artificial Sequence
  derived and/or modified CDS sequence (opt4) from neuraminidase__InfluenzaA__AAX11588
augaaccccaaccagaagaucaucaccaucggcagcgugagccugaccaucgccgccaucugcuuccugaugcagaucgccauccuggugaccaccgugacccugcacuucaagcagcacgagugcaacagcccccccaacaaccaggugaugcugugcgagcccaccaucaucgagagaaacaucaccgagaucguguaccugaccaacaccaccaucgagaaggagaucugccccaagcuggccgaguacagaaacuggagcaagccccagugcaacaucaccggcuucgcccccuucagcaaggacaacagcaucagacugagcgccggcggcgacaucugggugaccagagagcccuacgugagcugcgaccccgacaagugcuaccaguucgcccugggccagggcaccacccugaacaacggccacagcaacgacaccgugcacgacagaacccccuacagaacccugcugaugaacgagcugggcgugcccuuccaccugggcaccagacaggugugcaucgccuggagcagcagcagcugccacgacggcaaggccuggcugcacgugugcgugaccggcgacgacaagaacgccaccgccagcuucaucuacaacggcagacugguggacagcaucggcagcuggagcaagaagauccugagaacccaggagagcgagugcaucugcaucaacggcaccugcaccguggugaugaccgacggcagcgccagcggcaaggccgacaccaagauccuguucaucgaggagggcaagaucgugcacaucagcacccugagcggcagcgcccagcacguggaggagugcagcugcuaccccagauaccccggcgugagaugcgugugcagagacaacuggaagggcagcaacagacccaucguggacaucaacgugaaggacuacagcaucgugagcagcuacgugugcagcggccuggugggcgacacccccagaaagaacgacagcuucagcagcagccacugccuggaccccaacaacgaggagggcggccacggcgugaagggcugggccuucgacgacggcaacgacguguggaugggcagaaccaucagcgagaagcugagaagcggcuacgagaccuucaaggugaucgagggcuggagcaagcccaacagcaagcugcagaucaacagacaggugaucguggagagaggcaacagaagcggcuacagcggcaucuucagcguggagggcaagagcugcaucaacagaugcuucuacguggagcugaucagaggcagaaaggagaagaccgaggugugguggaccagcaacagcaucgugguguucugcggcaccagcggcaccuacggcaccggcagcuggcccgacggcgccgacaucaaccugaugcccaucuga

SEQ ID NO: 174202 - RNA, 1410 nt, Artificial Sequence; identical to SEQ ID NO: 174197
  derived and/or modified CDS sequence (opt4) from neuraminidase__InfluenzaA__AAX11598

SEQ ID NO: 174203 - RNA, 1410 nt, Artificial Sequence; identical to SEQ ID NO: 174197
  derived and/or modified CDS sequence (opt4) from neuraminidase__InfluenzaA__AAX11608

SEQ ID NO: 174204 - RNA, 1410 nt, Artificial Sequence
  derived and/or modified CDS sequence (opt4) from neuraminidase__InfluenzaA__AAX11618
augaaccccaaccagaagaucaucaccaucggcagcgugagccugaccaucgccaccaucugcuuccugaugcagaucgccauccuggugaccaccgugacccugcacuucaagcagcacgagugcaacagcccccccaacaaccaggugaugcugugcgagcccaccaucaucgagagaaacaucaccgagaucguguaccugaccaacaccaccaucgagaaggagaucugccccaagcuggccgaguacagaaacuggagcaagccccagugcaacaucaccggcuucgcccccuucagcaaggacaacagcaucagacugagcgccggcggcgacaucugggugaccagagagcccuacgugagcugcgaccccgacaagugcuaccaguucgcccugggccagggcaccacccugaacaacggccacagcaacgacaccgugcacgacagaacccccuacagaacccugcugaugaacgagcugggcgugcccuuccaccugggcaccagacaggugugcaucgccuggagcagcagcagcugccacgacggcaaggccuggcugcacgugugcgugaccggcgacgacaagaacgccaccgccagcuucaucuacaacggcagacugguggacagcaucggcagcuggagcaagaagauccugagaacccaggagagcgagugcgugugcaucaacggcaccugcaccguggugaugaccgacggcagcgccagcggcaaggccgacaccaagauccuguucaucgaggagggcaagaucgugcacaucagcgcccugagcggcagcgcccagcacguggaggagugcagcugcuaccccagauaccccggcgugagaugcgugugcagagacaacuggaagggcagcaacagacccaucguggacaucaacgugaaggacuacagcaucgugagcagcuacgugugcagcggccuggugggcgacacccccagaaagaacgacagcagcagcagcagccacugccuggaccccaacaacgaggagggcggccacggcgugaagggcugggccuucgacgacggcaacgacguguggaugggcagaaccaucagcgagaagcugagaagcggcuacgagaccuucaaggugaucgagggcuggagcaagcccaacagcaagcugcagaucaacagacaggugaucguggagagaggcaacagaagcggcuacagcggcaucuucagcguggagggcaagagcugcaucaacagaugcuucuacguggagcugaucagaggcagaaaggaggagaccgaggugugguggaccagcaacagcaucgugguguucugcggcaccagcggcaccuacggcaccggcagcuggcccgacggcgccgacaucaaccugaugcccaucuga

SEQ ID NO: 174205 - RNA, 1410 nt, Artificial Sequence
  derived and/or modified CDS sequence (opt4) from neuraminidase__InfluenzaA__AAX12744
augaaccccaaccagaagaucaucaccaucggcagcgugagccugaccaucgccaccaucugcuuccugaugcagaucgccauccuggugaccaccgugacccugcacuucaagcagcacgagugcaacagcccccccaacaaccaggugaugcugugcgagcccaccaucaucgagagaaacaucaccgagaucguguaccugaccaacaccaccaucgagaaggagaucugccccaagcuggccgaguacagaaacuggagcaagccccagugcaacaucaccggcuucgcccccuucagcaaggacaacagcaucagacugagcgccggcggcgacaucugggugaccagagagcccuacgugagcugcgaccccgacaagugcuaccaguucgcccugggccagggcaccacccugaacaacggccacagcaacgacaccgugcacgacagaacccccuacagaacccugcugaugaacgagcugggcgugcccuuccaccugggcaccagacaggugugcaucgccuggagcagcagcagcugccacgacggcaaggccuggcugcacgugugcgugaccggcgacgacaagaacgccaccgccagcuucaucuacaacggcagacugguggacagcaucggcagcuggagcaagaagauccugagaacccaggagagcgagugcgugugcaucaacggcaccugcaccguggugaugaccgacggcagcgccagcggcaaggccgacaccaagauccuguucaucgaggagggcaagaucgugcacaucagcacccugagcggcagcgcccagcacguggaggagugcagcugcuaccccagauaccccggcgugagaugcgugugcagagacaacuggaagggcagcaacagacccaucguggacaucaacgugaaggacuacagcaucgugagcagcuacgugugcagcggccuggugggcgacacccccagaaagaacgacagcuucagcagcagccacugccuggaccccaacaacgaggagggcggccacggcgugaagggcugggccuucgacgacggcaacgacguguggaugggcagaaccaucagcgagaagcugagaagcggcuacgagaccuucaaggugaucgagggcuggagcaagcccaacagcaagcugcagaucaacagacaggugaucguggagagaggcaacagaagcggcuacagcggcaucuucagcguggagggcaagagcugcaucaacagaugcuucuacguggagcugaucagaggcagaaaggaggagaccgaggugugguggaccagcaacagcaucgugguguucugcggcaccagcggcaccuacggcaccggcagcuggcccgacggcgccgacaucaaccugaugcccaucuga

SEQ ID NO: 174206 - RNA, 1410 nt, Artificial Sequence; identical to SEQ ID NO: 174197
  derived and/or modified CDS sequence (opt4) from neuraminidase__InfluenzaA__AAX12754

SEQ ID NO: 174207 - RNA, 1410 nt, Artificial Sequence
  derived and/or modified CDS sequence (opt4) from neuraminidase__InfluenzaA__AAX12774
augaaccccaaccagaagaucaucaccaucggcagcgugagccugaccaucgccaccaucugcuuccugaugcagaucgccauccuggugaccaccgugacccugcacuucaagcaguacgagugcaacagcccccccaacaaccaggugaugcugugcgagcccgccaucaucgagagaaacaucaccgagaucguguaccugaccaacaccaccaucgagaaggagaucugccccaagcuggccgaguacagaaacuggagcaagccccagugcaacaucaccggcuucgcccccuucagcaaggacaacagcaucagacugagcgccggcggcgacaucugggugaccagagagcccuacgugagcugcgaccccgacaagugcuaccaguucgcccugggccagggcaccacccugaacaacggccacagcaacgacaccgugcacgacagaacccccuacagaacccugcugaugaacgagcugggcgugcccuuccaccugggcaccagacaggugugcaucgccuggagcagcagcagcugccacgacggcaaggccuggcugcacgugugcgugaccggcgacgacaagaacgccaccgccagcuucaucuacaacggcagacugguggacagcaucggcagcuggagcaagaagauccugagaacccaggagagcgagugcgugugcaucaacggcaccugcaccguggugaugaccgacggcagcgccagcggcaaggccgacaccaagauccuguucaucgaggagggcaagaucgugaacaucagcacccugagcggcagcgcccagcacguggaggagugcagcugcuaccccagauaccccggcgugagaugcgugugcagagacaacuggaagggcagcaacagacccaucguggacaucaacgugaaggacuacagcaucgugagcagcuacgugugcagcggccuggugggcgacacccccagaaagaacgacagcuucagcagcagccacugccuggaccccaacaacgaggagggcggccacggcgugaagggcugggccuucgacgacggcaacgacguguggaugggcagaaccaucagcgagaagcugagaagcggcuacgagaccuucaaggugaucgagggcuggagcaagcccaacagcaagcugcagaucaacagacaggugaucguggagagaggcaacagaagcggcuacagcggcaucuucagcguggagggcaagagcugcaucaacagaugcuucuacguggagcugaucagaggcagaaaggaggagaccgaggugugguggaccagcaacagcaucgugguguucugcggcaccagcggcaccuacggcaccggcagcuggcccgacggcgccgacaucaaccugaugcccaucuga

SEQ ID NO: 174208 - RNA, 1410 nt, Artificial Sequence
  derived and/or modified CDS sequence (opt4) from neuraminidase__InfluenzaA__AAX12804
augaaccccaaccagaagaucaucaccaucggcagcgugagccugaccaucgccaccaucugcuuccugaugcagaucgccauccuggugaccaccgugacccugcacuucaagcaguacgagugcaacagcccccccaacaaccaggugaugcugugcgagcccaccaucaucgagagaaacaucaccgagaucguguaccugaccaacaccaccaucgagaaggagaucugccccaagcuggccgaguacagaaacuggagcaagccccagugcaacaucaccggcuucgcccccuucagcaaggacaacagcaucagacugagcgccggcggcgacaucugggugaccagagagcccuacgugagcugcgaccccgacaagugcuaccaguucgcccugggccagggcaccacccugaacaacggccacagcaacgacaccgugcacgacagaacccccuacagaacccugcugaugaacgagcugggcgugcccuuccaccugggcaccagacaggugugcaucgccuggagcagcagcagcugccacgacggcaaggccuggcugcacgugugcgugaccggcgacgacgagaacgccaccgccagcuucaucuacaacggcagacugguggacagcaucggcagcuggagcaagaagauccugagaacccaggagagcgagugcgugugcaucaacggcaccugcaccguggugaugaccgacggcagcgccagcggcaaggccgacaccaagauccuguucaucgaggagggcaagaucgugcacaucagcacccugagcggcagcgcccagcacguggaggagugcagcugcuaccccagauaccccggcgugagaugcgugugcagagacaacuggaagggcagcaacagacccaucguggacaucaacgugaaggacuacagcaucgugagcagcuacgugugcagcggccuggugggcgacacccccagaaagaacgacaacuucagcagcagccacugccuggaccccaacaacgaggagggcggccacggcgugaagggcugggccuucgacgacggcaacgacguguggaugggcagaaccaucagcgagaagcugagaagcggcuacgagaccuucaaggugaucgagggcuggagcaagcccaacagcaagcugcagaccaacagacaggugaucguggagagaggcaacagaagcggcuacagcggcaucuucagcguggagggcaagagcugcaucaacagaugcuucuacguggagcugaucagaggcagaaaggaggagaccgaggugugguggaccagcaacagcaucgugguguucugcggcaccagcggcaccuacggcaccggcagcuggcccgacggcgccgacaucaaccugaugcccaucuga

SEQ ID NO: 174209 - RNA, 1410 nt, Artificial Sequence
  derived and/or modified CDS sequence (opt4) from neuraminidase__InfluenzaA__AAX12814
augaaccccaaccagaagaucaucaccaucggcagcgugagccugaccaucgccaccaucugcuuccugaugcagaucgccauccuggugaccaccgugacccugcacuucaagcaguacgagugcaacagcccccccaacaaccaggugaugcugugcgagcccgccaucaucgagagaaacaucaccgagaucguguaccugaccaacaccaccaucgagaaggagaucugccccaagcuggccgaguacagaaacuggagcaagccccagugcaacaucaccggcuucgcccccuucagcaaggacaacagcaucagacugagcgccggcggcgacaucugggugaccagagagcccuacgugagcugcgaccccgacaagugcuaccaguucgcccugggccagggcaccacccugaacaacggccacagcaacgacaccgugcacgacagaacccccuacagaacccugcugaugaacgagcugggcgugcccuuccaccugggcaccagacaggugugcaucgccuggagcagcagcagcugccacgacggcaaggccuggcugcacgugugcgugaccggcgacgacgagaacgccaccgccagcuucaucuacaacggcagacugguggacagcaucggcagcuggagcaagaagauccugagaacccaggagagcgagugcgugugcaucaacggcaccugcaccguggugaugaccgacggcagcgccagcggcaaggccgacaccaagauccuguucaucgaggagggcaagaucgugaacaucagcacccugagcggcagcgcccagcacguggaggagugcagcugcuaccccagauaccccggcgugagaugcgugugcagagacaacuggaagggcagcaacagacccaucguggacaucaacgugaaggacuacagcaucgugagcagcuacgugugcagcggccuggugggcgacacccccagaaagaacgacagcuucagcagcagccacugccuggaccccaacaacgaggagggcggccacggcgugaagggcugggccuucgacgacggcaacgacguguggaugggcagaaccaucagcgagaagcugagaagcggcuacgagaccuucaaggugaucgagggcuggagcaagcccaacagcaagcugcagaucaacagacaggugaucguggagagaggcaacagaagcggcuacagcggcaucuucagcguggagggcaagagcugcaucaacagaugcuucuacguggagcugaucagaggcagaaaggaggagaccgaggugugguggaccagcaacagcaucgugguguucugcggcaccagcggcaccuacggcaccggcagcuggcccgacggcgccgacaucaaccugaugcccaucuga

SEQ ID NO: 174210 - RNA, 1410 nt, Artificial Sequence
  derived and/or modified CDS sequence (opt4) from neuraminidase__InfluenzaA__AAX34064
augaaccccaaccagaagaucaucaccaucggcagcgugagccugaccaucgccaccaucugcuuccugaugcagaucgccauccuggugaccaccgugacccugcacuucaagcagcacgagugcaacagcccccccaacaaccaggugaugcugugcgagcccaccaucaucgagagaaacaucaccgagaucguguaccugaccaacaccaccaucgagagagagaucugccccaagcuggccgaguacagaaacuggagcaagccccagugcaacaucaccggcuucgcccccuucagcaaggacaacagcaucagacugagcgccggcggcgacaucugggugaccagagagcccuacgugagcugcgaccccgacaagugcuaccaguucgcccugggccagggcaccacccugaacaacggccacagcaacgacaccgugcacgacagaacccccuacagaacccugcugaugaacgagcugggcgugcccuuccaccugggcaccagacaggugugcaucgccuggagcagcagcagcugccacgacggcaaggccuggcugcacgugugcgugaccggcgacgacaagaacgccaccgccagcuucaucuacaacggcagacugguggacagcaucggcagcuggagcaagaagauccugagaacccaggagagcgagugcgugugcaucaacggcaccugcaccguggugaugaccgacggcagcgccagcggcaaggccgacaccaagauccuguucaucgaggagggcaagaucgugcacaucagcacccugagcggcagcgcccagcacguggaggagugcagcugcuaccccagauaccccggcgugagaugcgugugcagagacaacuggaagggcagcaacagacccaucguggacaucaacgugaaggacuacagcaucgugagcagcuacgugugcagcggccuggugggcgacacccccagaaagaacgacagcagcagcagcagccacugccuggaccccaacaacgaggagggcggccacggcgugaagggcugggccuucgacgacggcaacgacguguggaugggcagaaccaucagcgagaagcugagaagcggcuacgagaccuucaaggugaucgagggcuggagcaagcccaacagcaagcugcagaucaacagacaggugaucguggagagaggcaacagaagcggcuacagcggcaucuucagcguggagggcaagagcugcaucaacagaugcuucuacguggagcugaucagaggcagaaaggaggagaccgaggugugguggaccagcaacagcaucgugguguucugcggcaccagcggcaccuacggcaccggcagcuggcccgacggcgccgacaucaaccugaugcccaucuga

SEQ ID NO: 174211 - RNA, 1410 nt, Artificial Sequence
  derived and/or modified CDS sequence (opt4) from neuraminidase__InfluenzaA__AAX35824
augaaccccaaccagaagaucaucaccaucggcagcgugagccugaccaucgccaccaucugcuuccugaugcagaucgccauccuggugaccaccgugacccugcacuucaagcaguacgagugcaacagcccccccaacaaccaggugaugcugugcgagcccaccaucaucgagagaaacaucaccgagaucguguaccuggccaacaccaccaucgagaaggagaucugccccaagcuggccgaguacagaaacuggagcaagccccagugcaacaucaccggcuucgcccccuucagcaaggacaacagcaucagacugagcgccggcggcgacaucugggugaccagagagcccuacgugagcugcgaccccgacaagugcuaccaguucgcccugggccagggcaccacccugaacaacggccacagcaacgacaccgugcacgacagaacccccuacagaacccugcugaugaacgagcugggcgugcccuuccaccugggcaccagacaggugugcaucgccuggagcagcagcagcugccacgacggcaaggccuggcugcacgugugcgugaccggcgacgacaagaacgccaccgccagcuucaucuacaacggcagacugguggacagcaucggcagcuggagcaagaagauccugagaacccaggagagcgagugcgugugcaucaacggcaccugcaccguggugaugaccgacggcagcgccagcggcaaggccgacaccaagauccuguucaucgaggagggcaagaucauccacaucagcacccugagcggcagcgcccagcacguggaggagugcagcugcuaccccagauaccccggcgugagaugcgugugcagagacaacuggaagggcagcaacagacccaucguggacaucaacgugaaggacuacagcaucgugagcagcuacgugugcagcggccuggugggcgacacccccagaaagaacgacagcagcagcagcagccacugccuggaccccaacaacgaggagggcggccacggcgugaagggcugggccuucgacgacggcaacgacguguggaugggcagaaccaucagcgagaagcugagaagcggcuacgagaccuucaaggugaucgagggcuggagcaagcccaacagcaagcugcagaucaacagacaggugaucguggagagaggcaacagaagcggcuacagcggcaucuucagcguggagggcaagagcugcaucaacagaugcuucuacguggagcugaucagaggcagaaaggaggagaccgaggugugguggaccagcaacagcaucgugguguucugcggcaccagcggcaccuacggcaccggcagcuggcccgacggcgccgacaucaaccugaugcccaucuga

SEQ ID NO: 174212 - RNA, 1410 nt, Artificial Sequence; identical to SEQ ID NO: 174195
  derived and/or modified CDS sequence (opt4) from neuraminidase__InfluenzaA__AAX35834

SEQ ID NO: 174213 - RNA, 1410 nt, Artificial Sequence
  derived and/or modified CDS sequence (opt4) from neuraminidase__InfluenzaA__AAX35844
augaaccccaaccagaagaucaucaccaucggcagcgugagccugaccaucgccaccaucugcuuccugaugcagaucgccauccuggugaccaccgugacccugcacuucaagcaguacgagugcaacagcccccccaacaaccaggugaugcugugcgagcccaccaucaucgagagaaacaucaccgagaucguguaccugaccaacaccaccaucgagaaggagaucugccccaagcuggccgaguacagaaacuggagcaagccccagugcaacaucaccggcuucgcccccuucagcaaggacaacagcaucagacugagcgccggcggcgacaucugggugaccagagagcccuacgugagcugcgaccccgacaagugcuaccaguucgcccugggccagggcaccacccugaacaacggccacagcaacgacaccgugcacgacagaacccccuacagaacccugcugaugaacgagcugggcgugcccuuccaccugggcaccagacaggugugcaucgccuggagcagcagcagcugccacgacggcaaggccuggcugcacgugugcgugaccggcgacgacgagaacgccaccgccagcuucaucuacaacggcagacugguggacagcaucggcagcuggagcaagaagauccugagaacccaggagagcgagugcgugugcaucaacggcaccugcaccguggugaugaccgacggcagcgccagcggcaaggccgacaccaagauccuguucaucgaggagggcaagaucgugcacaucagcacccugagcggcagcgcccagcacguggaggagugcagcugcuaccccagauaccccggcgugagaugcgugugcagagacaacuggaagggcagcaacagacccaucguggacaucaacgugaaggacuacagcaucgugagcagcuacgugugcagcggccuggugggcgacacccccagaaagaacgacagcuucagcaacagccacugccuggaccccaacaacgaggagggcggccacggcgugaagggcugggccuucgacgacggcaacgacguguggaugggcagaaccaucagcgagaagcugagaagcggcuacgagaccuucaaggugaucgagggcugguucaagcccaacagcaagcugcagaucaacagacaggugaucguggagagaggcaacagaagcggcuacagcggcaucuucagcguggagggcaagagcugcaucaacagaugcuucuacguggagcugaucagaggcagaaaggaggagaccgaggugugguggaccagcaacagcaucgugguguucugcggcaccagcggcaccuacggcaccggcagcuggcccgacggcgccgacaucaaccugaugcccaucuga

SEQ ID NO: 174214 - RNA, 1410 nt, Artificial Sequence
  derived and/or modified CDS sequence (opt4) from neuraminidase__InfluenzaA__AAX35854
augaaccccaaccagaagaucaucaccaucggcagcgugagccugaccaucgccaccaucugcuuccugaugcagaucgccauccuggugaccaccgugacccugcacuucaagcaguacgagugcaacagcccccccaacaaccaggugaugcugugcgagcccaccaucaucgagagaaacaucaccgagaucguguaccugaccaacaccaccaucgagaaggagaucugccccaagcuggccgaguacagaaacuggagcaagccccagugcaacaucaccggcuucgcccccuucagcaaggacaacagcaucagacugagcgccggcggcgacaucugggugaccagagagcccuacgugagcugcgaccccgacaagugcuaccaguucgcccugggccagggcaccacccugaacaacggccacagcaacgacaccgugcacgacagaacccccuacagaacccugcugaugaacgagcugggcgugcccuuccaccugggcaccagacaggugugcaucgccuggagcagcagcagcugccacgacggcaaggccuggcugcacgugugcgugaccggcgacgacgagaacgccaccgccagcuucaucuacaacggcagacugguggacagcaucggcagcuggagcaagaagauccugagaacccaggagagcgagugcgugugcaucaacggcaccugcaccguggugaugaccgacggcagcgccagcggcaaggccgacaccaagauccuguucaucgaggagggcaagaucgugcacaucagcacccugagcggcagcgcccagcacguggaggagugcagcugcuaccccagauaccccggcgugagaugcgugugcagagacaacuggaagggcagcaacagacccaucguggacaucaacgugaaggacuacagcaucgugagcagcuacgugugcagcggccuggugggcgacacccccagaaagaacgacagcuucagcagcagccacugccuggaccccaacaacgaggagggcggccacggcgugaagggcugggccuucgacgacggcaacgacguguggaugggcagaaccaucagcgagaagcugagaagcggcuacgagaccuucaaggugaucgagggcuggagcaagcccaacagcaagcugcagaucaacagacaggugaucguggagagaggcaacagaagcggcuacagcggcaucuucagcguggagggcaagagcugcaucaacagaugcuucuacguggagcugaucagaggcagaaaggaggagaccgaggugugguggaccagcaacagcaucgugguguucugcggcaccagcggcaccuacggcaccggcagcuggcccgacggcgccgacaucaaccugaugcccaucuga

SEQ ID NO: 174215 - RNA, 1410 nt, Artificial Sequence
  derived and/or modified CDS sequence (opt4) from neuraminidase__InfluenzaA__AAX35864
augaaccccaaccagaagaucaucaccaucggcagcgugagccugaccaucgccaccaucugcuuccugaugcagaucgccauccuggugaccaccgugacccugcacuucaagcaguacgagugcaacagcccccccaacaaccaggugaugcugugcgagcccgccaucaucgagagaaacaucaccgagaucguguaccugaccaacaccaccaucgagaaggagaucugccccaagcuggccgaguacagaaacuggagcaagccccagugcaacaucaccggcuucgcccccuucagcaaggacaacagcaucagacugagcgccggcggcgacaucugggugaccagagagcccuacgugagcugcgaccccgacaagugcuaccaguucgcccugggccagggcaccacccugaacaacggccacagcaacgacaccgugcacgacagaacccccuacagaacccugcugaugaacgagcugggcgugcccuuccaccugggcaccagacaggugugcaucgccuggagcagcagcagcugccacgacggcaaggccuggcugcacgugugcgugaccggcgacgacgagaacgccaccgccagcuucaucuacaacggcagacugguggacagcaucggcagcuggagcaagaacauccugagaacccaggagagcgagugcgugugcaucaacggcaccugcaccguggugaugaccgacggcagcgccagcggcaaggccgacaccaagauccuguucaucgaggagggcaagaucgugaacaucagcacccugagcggcagcgcccagcacguggaggagugcagcugcuaccccagauaccccggcgugagaugcgugugcagagacaacuggaagggcagcaacagacccaucguggacaucaacgugaaggacuacagcaucgugagcagcuacgugugcagcggccuggugggcgacacccccagaaagaacgacagcuucagcagcagccacugccuggaccccaacaacgaggagggcggccacggcgugaagggcugggccuucgacgacggcaacgacguguggaugggcagaaccaucagcgagaagcugagaagcggcuacgagaccuucaaggugaucgagggcuggagcaagcccaacagcaagcugcagaucaacagacaggugaucguggagagaggcaacagaagcggcuacagcggcaucuucagcguggagggcaagagcugcaucaacagaugcuucuacguggagcugaucagaggcagaaaggaggagaccgaggugugguggaccagcaacagcaucgugguguucugcggcaccagcggcaccuacggcaccggcagcuggcccgacggcgccgacaucaaccugaugcccaucuga

SEQ ID NO: 174216 - RNA, 1410 nt, Artificial Sequence
  derived and/or modified CDS sequence (opt4) from neuraminidase__InfluenzaA__AAX47538
augaaccccaaccagaagaucaucaccaucggcagcgugagccugaccaucgccaccaucugcuuccugaugcagaucgccauccuggugaccaccgugacccugcacuucaagcaguacgagugcaacagcccccccaacaaccaggugaugcugugcgagcccgccaucaucgagagaaacaucaccgagaucguguaccugaccaacaccaccaucgaggaggagaucugccccaagcuggccgaguacagaaacuggagcaagccccagugcaacaucaccggcuucgcccccuucagcaaggacaacagcaucagacugagcgccggcggcgacaucugggugaccagagagcccuacgugagcugcgaccccgacaagugcuaccaguucgcccugggccagggcaccacccugaacaacggccacagcaacgacaccgugcacgacagaacccccuacagaacccugcugaugaacgagcugggcgugcccuuccaccugggcaccagacaggugugcaucgccuggagcagcagcagcugccacgacggcaaggccuggcugcacgugugcgugaccggcgacgacaagaacgccaccgccagcuucaucuacaacggcagacugguggacagcaucggcagcuggagcaagaagauccugagaacccaggagagcgagugcgugugcaucaacggcaccugcaccguggugaugaccgacggcagcgccagcggcaaggccgacaccaagauccuguucaucgaggagggcaagaucgugaacaucagcacccugagcggcagcgcccagcacguggaggagugcagcugcuaccccagauaccccggcgugagaugcgugugcagagacaacuggaagggcagcaacagacccaucguggacaucaacgugaaggacuacagcaucgugagcagcuacgugugcagcggccuggugggcgacacccccagaaagaacgacagcuucagcagcagccacugccuggaccccaacaacgaggagggcggccacggcgugaagggcugggccuucgacgacggcaacgacguguggaugggcagaaccaucagcgagaagcugagaagcggcuacgagaccuucaaggugaucgagggcuggagcaagcccaacagcaagcugcagaucaacagacaggugaucguggagagaggcaacagaagcggcuacagcggcaucuucagcguggagggcaagagcugcaucaacagaugcuucuacguggagcugaucagaggcagaaaggaggagaccgaggugugguggaccagcaacagcaucgugguguucugcggcaccagcggcaccuacggcaccggcagcuggcccgacggcgccgacaucaaccugaugcccaucuga

SEQ ID NO: 174217 - RNA, 1410 nt, Artificial Sequence; identical to SEQ ID NO: 174195
  derived and/or modified CDS sequence (opt4) from neuraminidase__InfluenzaA__AAX56383

SEQ ID NO: 174218 - RNA, 1410 nt, Artificial Sequence
  derived and/or modified CDS sequence (opt4) from neuraminidase__InfluenzaA__AAX56393
augaaccccaaccagaagaucaucaccaucggcagcgugagccugaccaucgccaccaucugcuuccugaugcagaucgccauccuggugaccaccgugacccugcacuucaagcagcacgagugcaacagcccccccaacaaccaggugaugcugugcgagcccaccaucaucgagagaaacaucaccgagaucguguaccugaccaacaccaccaucgagaaggagaucugccccaagcuggccgaguacagaaacuggagcaagccccagugcaacaucaccggcuucgcccccuucagcaaggacaacagcaucagacugagcgccggcggcgacaucugggugaccagagagcccuacgugagcugcgaccccgacaagugcuaccaguucgcccugggcaagggcaccacccugaacaacggccacagcaacaacaccgugcacgacagaacccccuacagaacccugcugaugaacgagcugggcgugcccuuccaccugggcaccagacaggugugcaucgccuggagcagcagcagcugccacgacggcaaggccuggcugcacgugugcgugaccggcgacgacaagaacgccaccgccagcuucaucuacaacggcagacugguggacagcaucggcagcuggagcaagaagauccugagaacccaggagagcgagugcgugugcaucaacggcaccugcaccguggugaugaccgacggcagcgccagcggcaaggccgacaccaagauccuguucaucgaggagggcaagaucgugcacaucagcacccugagcggcagcgcccagcacguggaggagugcagcugcuaccccagauaccccggcgugagaugcgugugcagagacaacuggaagggcagcaacagacccaucguggacaucaacgugaaggacuacagcaucgugagcagcuacgugugcagcggccuggugggcgacacccccagaaagaacgacagcuucagcagcagccacugccuggaccccaacaacgaggagggcggccacggcgugaagggcugggccuucgacgacggcaacgacguguggaugggcagaaccaucagcgagaagcugagaagcggcuacgagaccuucaaggugaucgagggcuggagcaagcccaacagcaagcugcagaucaacagacaggugaucguggagagaggcaacagaagcggcuacagcggcaucuucagcguggagggcaagagcugcaucaacagaugcuucuacguggagcugaucagaggcagaaaggaggagaccgaggugugguggaccagcaacagcaucgugguguucugcggcaccagcggcaccuacggcaccggcagcuggcccgacggcgccgacaucaaccugaugcccaucuga

SEQ ID NO: 174219 - RNA, 1410 nt, Artificial Sequence; identical to SEQ ID NO: 174195
  derived and/or modified CDS sequence (opt4) from neuraminidase__InfluenzaA__AAX56413

SEQ ID NO: 174220 - RNA, 1410 nt, Artificial Sequence; identical to SEQ ID NO: 174197
  derived and/or modified CDS sequence (opt4) from neuraminidase__InfluenzaA__AAX56423

SEQ ID NO: 174221 - RNA, 1410 nt, Artificial Sequence; identical to SEQ ID NO: 174195
  derived and/or modified CDS sequence (opt4) from neuraminidase__InfluenzaA__AAX56433

SEQ ID NO: 174222 - RNA, 1410 nt, Artificial Sequence; identical to SEQ ID NO: 174214
  derived and/or modified CDS sequence (opt4) from neuraminidase__InfluenzaA__AAX56443

SEQ ID NO: 174223 - RNA, 1410 nt, Artificial Sequence
  derived and/or modified CDS sequence (opt4) from neuraminidase__InfluenzaA__AAX56473
augaaccccaaccagaagaucaucaccaucggcagcgugagccugaccaucgccaccaucugcuuccugaugcagaucgccauccuggugaccaccgugacccugcacuucaagcaguacgagugcaacagcccccccaacaaccaggugaugcugugcgagcccaccaucaucgagagaaacaucaccgagaucguguaccugaccaacaccaccaucgagaaggagaucugccccaagcuggccgaguacagaaacuggagcaagccccagugcaacaucaccggcuucgcccccuucagcaaggacaacagcaucagacugagcgccggcggcgacaucugggugaccagagagcccuacgugagcugcgaccccgacaagugcuaccaguucgcccugggccagggcaccacccugaacaacggccacagcaacgacaccgugcacgacagaacccccuacagaacccugcugaugaacgagcugggcgugcccuuccaccugggcaccagacaggugugcaucgccuggagcagcagcagcugccacgacggcaaggccuggcugcacgugugcgugaccggcgacgacgagaacgccaccgccagcuucaucuacaacggcagacugguggacagcaucggcagcuggagcaagaagauccugagaacccaggagagcgagugcgugugcaucaacggcaccugcaccguggugaugaccgacggcagcgccagcggcaaggccgacaccaagauccuguucaucgaggagggcaagaucgugcacaucagcacccugagcggcagcgcccagcacguggaggagugcagcugcuaccccagauaccccggcgugagaugcgugugcagagacaacuggaagggcagcaacagacccaucguggacaucaacgugaaggacuacagcaucgugagcagcuacgugugcagcggccuggugggcgacacccccagaaagaacgacagcuucagcagcagccacugccuggaccccaacaacgaggagggcggccacggcgugaagggcugggccuucgacgacggcaacgacguguggaugggcagaaccaucagcgagaagcugagaagcggcuacgagaccuucaaggugaucgagggcuggagcaagcccaacagcaagcugcagaucaacagacaggugaucguggagagaggcaacagaagcggcuacagcggcaucuucagcguggagggcaagaacugcaucaacagaugcuucuacguggagcugaucagaggcagaaaggaggagaccgaggugugguggaccagcaacagcaucgugguguucugcggcaccagcggcaccuacggcaccggcagcuggcccgacggcgccgacaucaaccugaugcccaucuga

SEQ ID NO: 174224 - RNA, 1410 nt, Artificial Sequence
  derived and/or modified CDS sequence (opt4) from neuraminidase__InfluenzaA__AAX56483
augaaccccaaccagaagaucaucaccaucggcagcgugagccugaccaucgccaccaucugcuuccugaugcagaucgccauccuggugaccaccgugacccugcacuucaagcaguacgagugcgacagcccccccaacaaccaggugaugcugugcgagcccaccaucaucgagagaaacaucaccgagaucguguaccugaccaacaccaccaucgagaaggagaucugccccaagcuggccgaguacagaaacuggagcaagccccagugcaacaucaccggcuucgcccccuucagcaaggacaacagcaucagacugagcgccggcggcgacaucugggugaccagagagcccuacgugagcugcgaccccgacaagugcuaccaguucgcccugggccagggcaccacccugaacaacggccacagcaacgacaccgugcacgacagaacccccuacagaacccugcugaugaacgagcugggcgugcccuuccaccugggcaccagacaggugugcaucgccuggagcagcagcagcugccacgacggcaaggccuggcugcacgugugcgugaccggcgacgacgagaacgccaccgccagcuucaucuacaacggcagacugguggacagcaucggcagcuggagcaagaagauccugagaacccaggagagcgagugcgugugcaucaacggcaccugcaccguggugaugaccgacggcagcgccagcggcaaggccgacaccaagauccuguucaucgaggagggcaagaucgugcacaucagcacccugagcggcagcgcccagcacguggaggagugcagcugcuaccccagauaccccggcgugagaugcgugugcagagacaacuggaagggcagcaacagacccaucguggacaucaacgugaaggacuacagcaucgugagcagcuacgugugcagcggccuggugggcgacacccccagaaagaacgacagcuucagcagcagccacugccuggaccccaacaacgaggagggcggccacggcgugaagggcugggccuucgacgacggcaacgacguguggaugggcagaaccaucagcgagaagcugagaagcggcuacgagaccuucaaggugaucgagggcuggagcaagcccaacagcaagcugcagaucaacagacaggugaucguggagagaggcaacagaagcggcuacagcggcaucuucagcguggagggcaagagcugcaucaacagaugcuucuacguggagcugaucagaggcagaaaggaggagaccgaggugugguggaccagcaacagcaucgugguguucugcggcaccagcggcaccuacggcaccggcagcuggcccgacggcgccgacaucaaccugaugcccaucuga

SEQ ID NO: 174225 - RNA, 1410 nt, Artificial Sequence; identical to SEQ ID NO: 174224
  derived and/or modified CDS sequence (opt4) from neuraminidase__InfluenzaA__AAX56503

SEQ ID NO: 174226 - RNA, 1410 nt, Artificial Sequence
  derived and/or modified CDS sequence (opt4) from neuraminidase__InfluenzaA__AAX56513
augaaccccaaccagaagaucaucaccaucggcagcgugagccugaccaucgccaccaucugcuuccugaugcagaucgccauccuggugaccaccgugacccugcacuucaagcaguacgagugcaacagcccccccaacaaccaggugaugcugugcgagcccaccaucaucgagagaaacaucaccgagaucguguaccugaccaacaccaccaucgagaaggagaucugccccaagcuggccgaguacagaaacuggagcaagccccagugcaacaucaccggcuucgcccccuucagcaaggacaacagcaucagacugagcgccggcggcgacaucugggugaccagagagcccuacgugagcugcgaccccgacaagugcuaccaguucgcccugggccagggcaccacccugaacaacggccacagcaacgacaccgugcacgacagaacccccuacagaacccugcugaugaacgagcugggcgugcccuuccaccugggcaccagacaggugugcaucgccuggagcagcagcagcugccacgacggcaaggccuggcugcacgugugcgugaccggcgacgacgagaacgccaccgccagcuucaucuacaacggcagacugguggacagcaucggcagcuggagcaagaagauccugagaacccaggagagcgagugcgugugcaucaacggcaccugcaccguggugaugaccgacggcagcgccagcggcaaggccgacaccaagauccuguucaucgaggagggcaagaucgugcacaucagcacccugagcggcagcgcccagcacguggaggagugcagcugcuaccccagauaccccggcgugagaugcgugugcagagacaacuggaagggcagcaacagacccaucguggacaucaacgugaaggacuacagcaucgugagcagcuacgugugcagcggccuggugggcgacacccccagaaagaacgacagcuucagcagcagccacugccuggaccccaacaacgaggagggcggccacggcgugaagggcugggccuucgacgacggcaacgacguguggaugggcagaaccaucagcgagaagcugagaagcggcuacgagaccuucaaggugaucgagggcuggagcaagcccaacagcaagcugcagaccaacagacaggugaucguggagagaggcaacagaagcggcuacagcggcaucuucagcguggagggcaagagcugcaucaacagaugcuucuacguggagcugaucagaggcagaaaggaggagaccgaggugugguggaccagcaacagcaucgugguguucugcggcaccagcggcaccuacggcaccggcagcuggcccgacggcgccgacaucaaccugaugcccaucuga

SEQ ID NO: 174227 - RNA, 1413 nt, Artificial Sequence
  derived and/or modified CDS sequence (opt4) from neuraminidase__InfluenzaA__AAX56533
augaaccccaaccagaagaucaucaccaucggcagcaucagcguggccaucggcaucaucagccugauccugcagaucggcaacaucaucagcaucugggccagccacagcauccagaccggcagccagaacuacaccggcaucugcaaccagagaaucaucaccuacgagaacagaaccugggugaaccagaccuacgugaacaucaacaacaccaacgugguggccggcaaggacaagaccagcaugacccuggccggcaacagcagccugugccccaucagaggcugggccaucuacaccaaggacaacagcaucagaaucggcagcaagggcgacguguucgugaucagagagcccuucaucagcugcagccaccuggagugcagaaccuucuuccugacccagggcgcccugcugaacgacaagcacagcaacggcaccaucaaggacagaagccccuucagagcccugaugagcugcccccugggcgaggcccccagccccuacaacagcagauucgagagcguggccuggagcgccagcgccugccacgacggccugggcuggcugaccaucggcaucagcggccccgacaacggcgccguggccgugcugaaguacaacggcaucaucaccgagaccaucaagagcuggaagaagcagauccugagaacccaggagagcgagugcgugugcgugaacggcagcugcuucaccaucaugaccgacggccccagcaacagagccgccagcuacagaaucuucaagaucgagaagggcagagugaccaagagcaucgagcuggacgcccccaacuaccacuacgaggagugcagcugcuaccccgacaccggcaccgugaugugcgugugcagagacaacuggcacggcagcaacagacccugggugagcuucaaccagaaccuggacuaccagaucggcuacaucugcagcggcguguucggcgacaaccccagacccaaggacggcgagggcagcugcaaccccgugaccguggacggcgccgacggcgugaagggcuucagcuacagauacggcaacggcguguggaucggcagaaccaagagcaacagacugagaaagggcuucgagaugaucugggaccccaacggcuggaccgacaccgacagcgacuucagcaugaagcaggacgugguggccaugaacgacuggagcggcuacagcggcagcuucgugcagcaccccgagcugaccggccuggacugcaugagacccugcuucuggguggagcuggugagaggccugcccagagagaacaccaccaucuggaccagcggcagcagcaucagcuucugcggcgugaacagcgagaccgccaacuggagcuggcccgacggcgccgagcugcccuucaccaucgacaaguga

SEQ ID NO: 174228 - RNA, 1410 nt, Artificial Sequence
  derived and/or modified CDS sequence (opt4) from neuraminidase__InfluenzaA__AAX56543
augaaccccaaccagaagaucaucaccaucggcagcgugagccugaccaucgccaccaucugcuuccugaugcagaucgccauccuggugaccaccgugacccugcacuucaagcaguacgagugcaacagcccccccaacaaccaggugaugcugugcgagcccaccaucaucgagagaaacaucaccgagaucguguaccugaccaacaccaccaucgagaaggagaucugccccaagcuggccgaguacagaaacuggagcaagccccagugcaacaucaccggcuucgcccccuucagcaaggacaacagcaucagacugagcgccagcggcgacaucugggugaccagagagcccuacgugagcugcgaccccgacaagugcuaccaguucgcccugggccagggcaccacccugaacaacggccacagcaacgacaccgugcacgacagaacccccuacagaacccugcugaugaacgagcugggcgugcccuuccaccugggcaccaagcaggugugcaucgccuggagcagcagcagcugccacgacggcaaggccuggcugcacgugugcgugaccggcgacgacgagaacgccaccgccagcuucaucuacaacggcagacugguggacagcaucggcagcuggagcaagaagauccugagaacccaggagagcgagugcgugugcaucaacggcaccugcaccguggugaugaccgacggcagcgccagcggcaaggccgacaccaagauccuguucaucgaggagggcaagaucgugcacaccagcagccugagcggcagcgcccagcacguggaggagugcagcugcuaccccagauaccccggcgugagaugcgugugcagagacaacuggaagggcagcaacagacccaucguggacaucaacgugaaggacuacagcaucgugagcagcuacgugugcagcggccuggugggcgacacccccagaaagaacgacagcagcagcagcagccacugccuggaccccaacaacgaggagggcggccacggcgugaagggcugggccuucgacgacggcaacgacguguggaugggcagaaccaucagcgaggagcugagaagcggcuacgagaccuucaaggugaucgagggcuggagcaagcccaacagcaagcugcagaucaacagacaggugaucguggacagaggcaacagaagcggcuacagcggcaucuucagcguggagggcaagagcugcaucaacagaugcuucuacguggagcugaucagaggcagaaagcaggagaccgaggugcuguggaccagcaacagcaucgugguguucugcggcaccagcggcaccuacggcaccggcagcuggcccgacggcgccgacaucaaccugaugcccaucuga

SEQ ID NO: 174229 - RNA, 1410 nt, Artificial Sequence; identical to SEQ ID NO: 174121
  derived and/or modified CDS sequence (opt4) from neuraminidase__InfluenzaA__AAX56553

SEQ ID NO: 174230 - RNA, 1410 nt, Artificial Sequence
  derived and/or modified CDS sequence (opt4) from neuraminidase__InfluenzaA__AAX56563
augaaccccaaccagaagaucaucaccaucggcagcgugagccugaccaucgccgccaucugcuuccugaugcagaucgccauccuggugaccaccgugacccugcacuucaagcagcacgagugcaacagcccccccaacaaccaggugaugcugugcgagcccaccaucaucgagagaaacaucaccgagaucguguaccugaccaacaccaccaucgagaaggagaucugccccaagcuggccgaguacagaaacuggagcaagccccagugcaacaucaccggcuucgcccccuucagcaaggacaacagcaucagacugagcgccggcggcgacaucugggugaccagagagcccuacgugagcugcgaccccgacaagugcuaccaguucgcccugggccagggcaccacccugaacaacggccacagcaacgacaccgugcacgacagaacccccuacagaacccugcugaugaacgagcugggcgugcccuuccaccugggcaccagacaggugugcaucgccuggagcagcagcagcugccacgacggcaaggccuggcugcacgugugcgugaccggcgacgacaagaacgccaccgccagcuucaucuacaacggcagacugguggacagcaucggcagcuggagcaagaagauccugagaacccaggagagcgagugcgugugcaucaacggcaccugcaccguggugaugaccgacggcagcgccagcggcaaggccgacaccaagauccuguucaucgaggagggcaagaucgugcacaucagcgcccugagcggcagcgcccagcacguggaggagugcagcugcuaccccagauaccccggcgugagaugcgugugcagagacaacuggaagggcagcaacagacccaucguggacaucaacgugaaggacuacagcaucgugagcagcuacgugugcagcggccuggugggcgacacccccagaaagaacgacagcuucagcagcagccacugccuggaccccaacaacgaggagggcggccacggcgugaagggcugggccuucgacgacggcaacgacguguggaugggcagaaccaucagcgagaagcugagaagcggcuacgagaccuucaaggugaucgagggcuggagcaagcccaacagcaagcugcagaucaacagacaggugaucguggagagagacaacagaagcggcuacagcggcaucuucagcguggagggcaagagcugcaucaacagaugcuucuacguggagcugaucagaggcagaaaggaggagaccgaggugugguggaccagcaacagcaucgugguguucugcggcaccagcggcaccuacggcaccggcagcuggcccgacggcgccgacaucaaccugaugcccaucuga

SEQ ID NO: 174231 - RNA, 1410 nt, Artificial Sequence
  derived and/or modified CDS sequence (opt4) from neuraminidase__InfluenzaA__AAX56573
augaaccccaaccagaagaucaucaccaucggcagcgugagccugaccaucgccaccaucugcuuccugaugcagaucgccauccuggugaccaccgugacccugcacuucaagcaguacgagugcaacagcccccccaacaaccaggugaugcugugcgagcccgccaucaucgagagaaacaucaccgagaucguguaccugaccaacaccaccaucgagaaggagaucugccccaagcuggccgaguacagaaacuggagcaagccccagugcaacaucaccggcuucgcccccuucagcaaggacaacagcaucagacugagcgccggcggcgacaucugggugaccagagagcccuacgugagcugcgaccccgacaagugcuaccaguucgcccugggccagggcaccacccugaacaacggccacagcaacgacaccgugcacgacagaacccccuacagaacccugcugaugaacgagcugggcgugcccuuccaccugggcaccagacaggugugcaucgccuggagcagcagcagcugccacgacggcaaggccuggcugcacgugugcgugaccggcgacgacgagaacgccaccgccagcuucaucuacaacggcagacugguggacagcaucggcagcuggagcaagaagauccugagaacccaggagagcgagugcgugugcaucaacggcaccugcaccguggugaugaccgacggcagcgccagcggcaaggccgacaccaagauccuguucaucgaggagggcaagaucgugcacaucagcacccugagcggcagcgcccagcacguggaggagugcagcugcuaccccagauaccccggcgugagaugcgugugcagagacaacuggaagggcagcaacagacccaucguggacaucaacgugaaggacuacagcaucgugagcagcuacgugugcagcggccuggugggcgacacccccagaaagaacgacagcuucagcagcagccacugccuggaccccaacaacgaggagggcggccacggcgugaagggcugggccuucgacgacggcaacgacguguggaugggcagaaccaucagcgagaagcugagaagcggcuacgagaccuucaaggugaucgagggcuggagcaagcccaacagcaagcugcagaucaacagacaggugaucguggagagaggcaacagaagcggcuacagcggcaucuucagcguggagggcaagagcugcaucaacagaugcuucuacguggagcugaucagaggcagaaaggaggagaccgaggugugguggaccagcaacagcaucgugguguucugcggcaccagcggcaccuacggcaccggcagcuggcccgacggcgccgacaucaaccugaugcccaucuga

SEQ ID NO: 174232 - RNA, 1410 nt, Artificial Sequence
  derived and/or modified CDS sequence (opt4) from neuraminidase__InfluenzaA__AAX56583
augaaccccaaccagaagaucaucaccaucggcagcgugagccugaccaucgccaccaucugcuuccugaugcagaucgccauccuggugaccaccgugacccugcacuucaagcaguacgagugcaacagcccccccaacaaccaggugaugcugugcgagcccaccaucaucgagagaaacaucaccgagaucguguaccugaccaacaccaccaucgagaaggagaucugccccaagcuggccgaguacagaaacuggagcaagccccagugcaacaucaccggcuucgcccccuucagcaaggacaacagcaucagacugagcgccggcggcgacaucugggugaccagagagcccuacgugagcugcgaccccgacaagugcuaccaguucgcccugggccagggcaccacccugaacaacggccacagcaacgacaccgugcacgacagaacccccuacagaacccugcugaugaacgagcugggcgugcccuuccaccugggcaccagacaggugugcaucgccuggagcagcagcagcugccacgacggcaaggccuggcugcacgugugcgugaccggcgacgacgagaacgccaccgccagcuucaucuacaacggcagacugguggacagcaucggcagcuggagcaagaagauccugagaacccaggagagcgagugcgugugcaucaacggcaccugcaccguggugaugaccgacggcagcgccagcggcaaggccgacaccaagauccuguucaucgaggagggcaagaucgugcacaucagcacccugagcggcagcgcccagcacguggaggagugcagcugcuaccccagauaccccggcgugagaugcgugugcagagaccacuggaagggcagcaacagacccaucguggacaucaacgugaaggacuacagcaucgugagcagcuacgugugcagcggccuggugggcgacacccccagaaagaacgacagcuucagcagcagccacugccuggaccccaacaacgaggagggcggccacggcgugaagggcugggccuucgacgacggcaacgacguguggaugggcagaaccaucagcgagaagcugagaagcggcuacgagaccuucaaggugaucgagggcuggagcaagcccaacagcaagcugcagaccaacagacaggugaucguggagagaggcaacagaagcggcuacagcggcaucuucagcguggagggcaagagcugcaucaacagaugcuucuacguggagcugaucagaggcagaaaggaggagaccgaggugugguggaccagcaacagcaucgugguguucugcggcaccagcggcaccuacggcaccggcagcuggcccgacggcgccgacaucaaccugaugcccaucuga

SEQ ID NO: 174233 - RNA, 1410 nt, Artificial Sequence
  derived and/or modified CDS sequence (opt4) from neuraminidase__InfluenzaA__AAX56593
augaaccccaaccagaagaucaucaccaucggcagcgugagccugaccaucgccaccaucugcuuccugaugcagaucgccauccuggugaccaccgugacccugcacuucaagcaguacgagugcaacagcccccccaacaaccaggugaugcugugcgagcccgccaucaucgagagaaacaucaccgagaucguguaccugaccaacaccaccaucgagaaggagaucugccccaagcuggccgaguacagaaacuggagcaagccccagugcaacaucaccggcuucgcccccuucagcaaggacaacagcaucagacugagcgccggcggcgacaucugggugaccagagagcccuacgugagcugcgaccccgacaagugcuaccaguucgcccugggccagggcaccacccugaacaacggccacagcaacgacaccgugcacgacagaacccccuacagaacccugcugaugaacgagcugggcgugcccuuccaccugggcaccagacaggugugcaucgccuggagcagcagcagcugccacgacggcaaggccuggcugcacgugugcgugaccggcgacgacgagaacgccaccgccagcuucaucuacaacggcagacugguggacagcaucggcagcuggagcaagaagauccugagaacccaggagagcgagugcgugugcaucaacggcaccugcaccguggugaugaccgacggcagcgccagcggcaaggccgacaccaagauccuguucaucgaggagggcaagaucgugaacaucagcacccugagcggcagcgcccagcacguggaggagugcagcugcuaccccagauaccccggcgugagaugcgugugcagagacaacuggaagggcagcaacagacccaucguggacaucaacgugaaggacuacagcaucgugagcagcuacgugugcagcggccuggugggcgacacccccagaaagaacgacagcuucagcagcagccacugccuggaccccaacaacgaggagggcggccacggcgugaagggcugggccuucgacgacggcaacgacguguggaugggcagaaccaucagcgagaaguucagaagcggcuacgagaccuucaaggugaucgagggcuggagcaagcccaacagcaagcugcagaucaacagacaggugaucguggagagaggcaacagaagcggcuacagcggcaucuucagcguggagggcaagagcugcaucaacagaugcuucuacguggagcugaucagaggcagaaaggaggagaccgaggugugguggaccagcaacagcaucgugguguucugcggcaccagcggcaccuacggcaccggcagcuggcccgacggcgccgacaucaaccugaugcccaucuga

SEQ ID NO: 174234 - RNA, 1410 nt, Artificial Sequence
  derived and/or modified CDS sequence (opt4) from neuraminidase__InfluenzaA__AAX56603
augaaccccaaccagaagaucaucaccaucggcagcgugagccugaccaucgccgccaucugcuuccugaugcagaucgccauccuggugaccaccgugacccugcacuucaagcagcacgagugcaacagcccccccaacaaccaggugaugcugugcgagcccaccaucaucgagagaaacaucaccgagaucguguaccugaccaacaccaccaucgagaaggagaucugccccaagcuggccgaguacagaaacuggagcaagccccagugcaacaucaccggcuucgcccccuucagcaaggacaacagcaucagacugagcgccggcggcgacaucugggugaccagagagcccuacgugagcugcgaccccgacaagugcuaccaguucgcccugggccagggcaccacccugaacaacggccacagcaacgacaccgcccacgacagaacccccuacagaacccugcugaugaacgagcugggcgugcccuuccaccugggcaccagacaggugugcaucgccuggagcagcagcagcugccacgacggcaaggccuggcugcacgugugcgugaccggcgacgacaagaacgccaccgccagcuucaucuacaacggcagacugguggacagcaucggcagcuggagcaagaagauccugagaacccaggagagcgagugcgugugcaucaacggcaccugcaccguggugaugaccgacggcagcgccagcggcaaggccgacaccaagauccuguucaucgaggagggcaagaucgugcacaucagcacccugagcggcagcgcccagcacguggaggagugcagcugcuaccccagauaccccggcgugagaugcgugugcagagacaacuggaagggcagcaacagacccaucguggacaucaacgugaaggacuacagcaucgugagcagcuacgugugcagcggccuggugggcgacacccccagaaagaacgacagcuucagcagcagccacugccuggaccccaacaacgaggagggcggccacggcgugaagggcugggccuucgacgacggcaacgacguguggaugggcagaaccaucagcgagaagcugagaagcggcuacgagaccuucaaggugaucgagggcuggagcaagcccaacagcaagcugcagaucaacagacaggugaucguggagagaggcaacagaagcggcuacagcggcaucuucagcguggagggcaagagcugcaucaacagaugcuucuacguggagcugaucagaggcagaaaggaggagaccgaggugugguggaccagcaacagcaucgugguguucugcggcaccagcggcaccuacggcaccggcagcuggcccgacggcgccgacaucaaccugaugcccaucuga

SEQ ID NO: 174235 - RNA, 1410 nt, Artificial Sequence; identical to SEQ ID NO: 174205
  derived and/or modified CDS sequence (opt4) from neuraminidase__InfluenzaA__AAX57647

SEQ ID NO: 174236 - RNA, 1410 nt, Artificial Sequence; identical to SEQ ID NO: 174195
  derived and/or modified CDS sequence (opt4) from neuraminidase__InfluenzaA__AAX57657

SEQ ID NO: 174237 - RNA, 1410 nt, Artificial Sequence; identical to SEQ ID NO: 174233
  derived and/or modified CDS sequence (opt4) from neuraminidase__InfluenzaA__AAX57667

SEQ ID NO: 174238 - RNA, 1410 nt, Artificial Sequence; identical to SEQ ID NO: 174214
  derived and/or modified CDS sequence (opt4) from neuraminidase__InfluenzaA__AAX57677

SEQ ID NO: 174239 - RNA, 1410 nt, Artificial Sequence
  derived and/or modified CDS sequence (opt4) from neuraminidase__InfluenzaA__AAX57687
augaaccccaaccagaagaucaucaccaucggcagcgugagccugaccaucgccaccaucugcuuccugaugcagaucgccauccuggugaccaccgugacccugcacuucaagcaguacgagugcaacagcccccccaacaaccaggugaugcugugcgagcccgccaucaucgagagaaacaucaccgagaucguguaccugaccaacaccaccaucgagaaggagaucugccccaagcuggccgaguacagaaacuggagcaagccccagugcaacaucaccggcuucgcccccuucagcaaggacaacagcaucagacugagcgccggcggcgacaucugggugaccagagagcccuacgugagcugcgaccccgacaagugcuaccaguucgcccugggccagggcaccacccugaacaacggccacagcaacgacaccgugcacgacagaacccccuacagaacccugcugaugaacgagcugggcgugcccuuccaccugggcaccagacaggugugcaucgccuggagcagcagcagcugccacgacggcaaggccuggcugcacgugugcgugaccggcgacgacgagaacgccaccgccagcuucaucuacgacggcagacugguggacagcaucggcagcuggagcaagaagauccugagaacccaggagagcgagugcgugugcaucaacggcaccugcaccguggugaugaccgacggcagcgccagcggcaaggccgacaccaagauccuguucaucgaggagggcaagaucgugaacaucagcacccugagcggcagcgcccagcacguggaggagugcagcugcuaccccagauaccccggcgugagaugcgugugcagagacaacuggaagggcagcaacagacccaucguggacaucaacgugaaggacuacagcaucgugagcagcuacgugugcagcggccuggugggcgacacccccagaaagaacgacagcuucagcagcagccacugccuggaccccaacaacgaggagggcggccacggcgugaagggcugggccuucgacgacggcaacgacguguggaugggcagaaccaucagcgagaagcugagaagcggcuacgagaccuucaaggugaucgagggcuggagcaagcccaacagcaagcugcagaucaacagacaggugaucguggagagaggcaacagaagcggcuacagcggcaucuucagcguggagggcaagagcugcaucaacagaugcuucuacguggagcugaucagaggcagaaaggaggagaccgaggugugguggaccagcaacagcaucgugguguucugcggcaccagcggcaccuacggcaccggcagcuggcccgacggcgccgacaucaaccugaugcccaucuga

SEQ ID NO: 174240 - RNA, 1410 nt, Artificial Sequence
  derived and/or modified CDS sequence (opt4) from neuraminidase__InfluenzaA__AAX57697
augaaccccaaccagaagaucaucaccaucggcagcgugagccugaccaucgccaccaucugcuuccugaugcagaucgccauccuggugaccaccgugacccugcacuucaagcaguacgagugcaacagcccccccaacaaccaggugaugcugugcgagcccaccaucaucgagagaaacaucaccgagaucguguaccugaccaacaccaccaucgagaaggagaucugccccaagcuggccgaguacagaaacuggagcaagccccagugcaacaucaccggcuucgcccccuucagcaaggacaacagcaucagacugagcgccggcggcgacaucugggugaccagagagcccuacgugagcugcgaccccgacaagugcuaccaguucgcccugggccagggcaccacccugaacaacggccacagcaacgacaccgugcacgacagaacccccuacagaacccugcugaugaacgagcugggcgugcccuuccaccugggcaccagacaggugugcaucgccuggagcagcagcagcugccacgacggcaaggccuggcugcacgugugcgugaccggcgacgacgagaacgccaccgccagcuucaucuacaacggcagacugguggacagcaucggcagcuggagcaagaagauccugagaacccaggagagcgagugcgugugcaucaacggcaccugcaccguggugaugaccgacggcagcgccagcggcaaggccgacaccaagauccuguucaucgaggagggcaagaucgugcacaucagcacccugagcggcagcgcccagcacguggaggagugcagcugcuaccccagauaccccggcgugagaugcgugugcagagacaacuggaagggcagcaacagacccaucguggacaucaacgugaaggaccacagcaucgugagcagcuacgugugcagcggccuggugggcgacacccccagaaagaacgacagcuucagcagcagccacugccuggaccccaacaacgaggagggcggccacggcgugaagggcugggccuucgacgacggcaacgacguguggaugggcagaaccaucagcgagaagcugagaagcggcuacgagaccuucaaggugaucgagggcuggagcaagcccaacagcaagcugcagaucaacagacaggugaucguggagagaggcaacagaagcggcuacagcggcaucuucagcguggagggcaagagcugcaucaacagaugcuucuacguggagcugaucagaggcagaaaggaggagaccgaggugugguggaccagcaacagcaucgugguguucugcggcaccagcggcaccuacggcaccggcagcuggcccgacggcgccgacaucaaccugaugcccaucuga

SEQ ID NO: 174241 - RNA, 1410 nt, Artificial Sequence
  derived and/or modified CDS sequence (opt4) from neuraminidase__InfluenzaA__AAX57707
augaaccccaaccagaagaucaucaccaucggcagcgugagccugaccaucgccgccaucugcuuccugaugcagaucgccauccuggugaccaccgugacccugcacuucaagcagcacgagugcaacagcccccccaacaaccaggugaugcugugcgagcccaccaucaucgagagaaacaucaccgagaucguguaccugaccaacaccaccaucgagaaggagaucugccccaagcuggccgaguacagaaacuggagcaagccccagugcaacaucaccggcuucgcccccuucagcaaggacaacagcaucagacugagcgccggcggcgacaucugggugaccagagagcccuacgugagcugcgaccccgacaagugcuaccaguucgcccugggccagggcaccacccugaacaacggccacagcaacgacaccgugcacgacagaacccccuacagaacccugcugaugaacgagcugggcgugcccuuccaccugggcaccagacaggugugcaucgccuggagcagcagcagcugccacgacggcaaggccuggcugcacgugugcgugaccggcgacgacaagaacgccaccgccagcuucaucuacaacggcagacugguggacagcaucggcagcuggagcaagaagauccugagaacccaggagagcgagugcgugugcaucaacggcaccugcaccguggugaugaccgacggcagcgccagcggcaaggccgacaccaagauccuguucaucgaggagggcaagaucgugcacaucagcacccugagcggcagcgcccagcacguggaggagugcagcugcuaccccagauaccccggcgugagaugcgugugcagagacaacuggaagggcagcaacagacccaucguggacaucaacgugaaggacuacagcaucgugagcagcuacgugugcagcggccuggugggcgacacccccagaaagaacgacagauucagcagcagccacugccuggaccccaacaacgaggagggcggccacggcgugaagggcugggccuucgacgacggcaacgacguguggaugggcagaaccaucagcgagaagcugagaagcggcuacgagaccuucaaggugaucgagggcuggagcaagcccaacagcaagcugcagaucaacagacaggugaucguggagagaggcaacagaagcggcuacagcggcaucuucagcguggagggcaagagcugcaucaacagaugcuucuacguggagcugaucagaggcagaaaggaggagaccgaggugugguggaccagcaacagcaucgugguguucugcggcaccagcggcaccuacggcaccggcagcuggcccgacggcgccgacaucaaccugaugcccaucuga

SEQ ID NO: 174242 - RNA, 1410 nt, Artificial Sequence; identical to SEQ ID NO: 174214
  derived and/or modified CDS sequence (opt4) from neuraminidase__InfluenzaA__AAX57717

SEQ ID NO: 174243 - RNA, 1410 nt, Artificial Sequence; identical to SEQ ID NO: 174233
  derived and/or modified CDS sequence (opt4) from neuraminidase__InfluenzaA__AAX57726

SEQ ID NO: 174244 - RNA, 1410 nt, Artificial Sequence; identical to SEQ ID NO: 174233
  derived and/or modified CDS sequence (opt4) from neuraminidase__InfluenzaA__AAX57737

SEQ ID NO: 174245 - RNA, 1410 nt, Artificial Sequence; identical to SEQ ID NO: 174121
  derived and/or modified CDS sequence (opt4) from neuraminidase__InfluenzaA__AAX57747

SEQ ID NO: 174246 - RNA, 1410 nt, Artificial Sequence; identical to SEQ ID NO: 174121
  derived and/or modified CDS sequence (opt4) from neuraminidase__InfluenzaA__AAX57757

SEQ ID NO: 174247 - RNA, 1410 nt, Artificial Sequence
  derived and/or modified CDS sequence (opt4) from neuraminidase__InfluenzaA__AAX57767
augaaccccaaccagaagaucaucaccaucggcagcgugagccugaccaucgccaccaucugcuuccugaugcagaucgccauccuggugaccaccgugacccugcacuucaagcaguacgagugcaaccccccccccaacaaccaggugaugcugugcgagcccaccaucaucgagagaaacaucaccgagaucguguaccugaccaacaccaccaucgagaaggagaucugccccaagcuggccgaguacagaaacuggagcaagccccagugcaacaucaccggcuucgcccccuucagcaaggacaacagcaucagacugagcgccggcggcgacaucugggugaccagagagcccuacgugagcugcgaccccgacaagugcuaccaguucgcccugggccagggcaccacccugaacaacggccacagcaacgacaccgugcacgacagaacccccuacagaacccugcugaugaacgagcugggcgugcccuuccaccugggcaccaagcaggugugcaucgccuggagcagcagcagcugccacgacggcaaggccuggcugcacgugugcgugaccggcgacgacgagaacgccaccgccagcuucaucuacaacggcagacugguggacagcaucggcagcuggagcaagaagauccugagaacccaggagagcgagugcgugugcaucaacggcaccugcaccguggugaugaccgacggcagcgccagcggcaaggccgacaccaagauccuguucaucgaggagggcaagaucgugcacaccagccugcugagcggcagcgcccagcacguggaggagugcagcugcuaccccagauaccccggcgugagaugcgugugcagagacaacuggaagggcagcaacagacccaucguggacaucaacgugaaggacuacagcaucgugagcagcuacgugugcagcggccuggugggcgacacccccagaaagaacgacagcagcagcagcagccacugccuggaccccaacaacgaggagggcggccacggcgugaagggcugggccuucgacgacggcaacgacguguggaugggcagaaccaucagcgagaagcugagaagcggcuacgagaccuucaaggugaucgagggcuggagcaagcccaacagcaagcugcagaucaacagacaggugaucguggacagaggcaacagaagcggcuacagcggcaucuucagcguggagggcaagagcugcaucaacagaugcuucuacguggagcugaucagaggcagaaagcaggagaccgaggugcuguggaccagcaacagcaucgugguguucugcggcaccagcggcaccuacggcaccggcagcuggcccgacggcgccgacaucaaccugaugcccaucuga

SEQ ID NO: 174248 - RNA, 1410 nt, Artificial Sequence
  derived and/or modified CDS sequence (opt4) from neuraminidase__InfluenzaA__AAX57777
augaaccccaaccagaagaucaucaccaucggcagcgugagccugaucaucgccaccaucugcuuccugaugcagaucgccauccuggugaccaccgugacccugcacuucaagcaguacgagugcaacagcccccccaacaaccaggugaugcugugcgagcccaccaucaucgagagaaacaucaccgagaucguguaccugaccaacaccaccaucgagaaggagaucugccccaagcuggccgaguacagaaacuggagcaagccccagugcaacaucaccggcuucgcccccuucagcaaggacaacagcaucagacugagcgccggcggcgacaucugggugaccagagagcccuacgugagcugcgaccccgacaagugcuaccaguucgcccugggccagggcaccacccugaacaacggccacagcaacgacaccgugcacgacagaacccccuacagaacccugcugaugaacgagcugggcgugcccuuccaccugggcaccaagcaggugugcaucgccuggagcagcagcagcugccacgacggcaaggccuggcugcacgugugcgugaccggcgacgacgagaacgccaccgccagcuucaucuacaacggcagacugguggacagcaucggcagcuggagcaagaagauccugagaacccaggagagcgagugcgugugcaucaacggcaccugcaccguggugaugaccgacggcagcgccagcggcaaggccgacaccaagauccuguucaucgaggagggcaagaucgugcacaccagcagccugagcggcagcgcccagcacguggaggagugcagcugcuaccccagauaccccggcgugagaugcgugugcagagacaacuggaagggcagcaacagacccaucguggacaucaacgugaaggacuacagcaucgugagcagcuacgugugcagcggccuggugggcgacacccccagaaagaacgacagcagcagcagcagccacugccuggaccccaacaacgaggagggcggccacggcgugaagggcugggccuucgacgacggcaacgacguguggaugggcagaaccaucagcgagaagcugagaagcggcuacgagaccuucaaggugaucgagggcuggagcaagcccaacagcaagcugcagaucaacagacaggugaucguggacagaggcaacagaagcggcuacagcggcaucuucagcguggagggcaagagcugcaucaacagaugcuucuacguggagcugaucagaggcagaaagcaggagaccgaggugcuguggaccagcaacagcaucgugguguucugcggcaccagcggcaccuacggcaccggcagcuggcccgacggcgccgacaucaaccugaugcccaucuga

SEQ ID NO: 174249 - RNA, 1410 nt, Artificial Sequence
  derived and/or modified CDS sequence (opt4) from neuraminidase__InfluenzaA__AAX57787
augaaccccaaccagaagaucaucaccaucggcagcgugagccugaccaucgccaccaucugcuuccugaugcagaucgccauccuggugaccaccgugacccugcacuucaagcaguacgagugcaacagcccccccaacaaccaggugaugcugugcgagcccgccaucaucgagagaaacaucaccgagaucguguaccugaccaacaccaccaucgagaaggagaucugccccaagcuggccgaguacagaaacuggagcaagccccagugcaacaucaccggcuucgcccccuucagcaaggacaacagcaucagacugagcgccggcggcgacaucugggugaccagagagcccuacgugagcugcgaccccgacaagugcuaccaguucgcccugggccagggcaccacccugaacaacggccacagcaacgacaccgugcacgacagaacccccuacagaacccugcugaugaacgagcugggcgugcccuuccaccugggcaccagacaggugugcaucgccuggagcagcagcagcugccacgacggcaaggccuggcugcacgugugcgugaccggcgacgacgagaacgccaccgccagcuucaucuacaacggcagacugguggacagcaucggcagcuggagcaagaagauccugagaacccaggagagcgagugcgugugcaucaacggcaccugcaccguggugaugaccgacggcagcgccagcggcaaggccaacaccaagauccuguucaucgaggagggcaagaucgugaacaucagcacccugagcggcagcgcccagcacguggaggagugcagcugcuaccccagauaccccggcgugagaugcgugugcagagacaacuggaagggcagcaacagacccaucguggacaucaacgugaaggacuacagcaucgugagcagcuacgugugcagcggccuggugggcgacacccccagaaagaacgacagcuucagcagcagccacugccuggaccccaacaacgaggagggcggccacggcgugaagggcugggccuucgacgacggcaacgacguguggaugggcagaaccaucagcgagaaguucagaagcggcuacgagaccuucaaggugaucgagggcuggagcaagcccaacagcaagcugcagaucaacagacaggugaucguggagagaggcaacagaagcggcuacagcggcaucuucagcguggagggcaagagcugcaucaacagaugcuucuacguggagcugaucagaggcagaaaggaggagaccgaggugugguggaccagcaacagcaucgugguguucugcggcaccagcggcaccuacggcaccggcagcuggcccgacggcgccgacaucaaccugaugcccaucuga

SEQ ID NO: 174250 - RNA, 1410 nt, Artificial Sequence; identical to SEQ ID NO: 174121
  derived and/or modified CDS sequence (opt4) from neuraminidase__InfluenzaA__AAX57797

SEQ ID NO: 174251 - RNA, 1410 nt, Artificial Sequence; identical to SEQ ID NO: 174121
  derived and/or modified CDS sequence (opt4) from neuraminidase__InfluenzaA__AAX57807

SEQ ID NO: 174252 - RNA, 1410 nt, Artificial Sequence
  derived and/or modified CDS sequence (opt4) from neuraminidase__InfluenzaA__AAX57817
augaaccccaaccagaagaucaucaccaucggcagcgugagccugaccaucgccaccaucugcuuccugaugcagaucgccauccuggugaccaccgugacccugcacuucaagcaguacgagugcaacagcccccccaacaaccaggugaugcugugcgagcccaccaucaucgagagaaacaucaccgagaucguguaccugaccaacaccaccaucgagaaggagaucugccccaagcuggccgaguacagaaacuggagcaagccccagugcaacaucaccggcuucgcccccuucagcaaggacaacagcaucagacugagcgccggcggcgacaucugggugaccagagagcccuacgugagcugcgaccccgacaagugcuaccaguucgcccugggccagggcaccacccugaacaacggccacagcaacgacaccgugcacgacagaacccccuacagaacccugcugaugaacgagcugggcgugcccuuccaccugggcaccaagcaggugugcaucgccuggagcagcagcagcugccacgacggcaaggccuggcugcacgugugcgugaccggcgacgacgagaacgccaccgccagcuucaucuacaacggcagacugguggacagcaucagcagcuggagcaagaagauccugagaacccaggagagcgagugcgugugcaucaacggcaccugcaccguggugaugaccgacggcagcgccagcggcaaggccgacaccaagauccuguucaucgaggagggcaagaucgugcacaccagcagccugagcggcagcgcccagcacguggaggagugcagcugcuaccccagauaccccggcgugagaugcgugugcagagacaacuggaagggcagcaacagacccaucguggacaucaacgugaaggacuacagcaucgugagcagcuacgugugcagcggccuggugggcgacacccccagaaagaacgacagcagcagcagcagccacugccuggaccccaacaacgaggagggcggccacggcgugaagggcugggccuucgacgacggcaacgacguguggaugggcagaaccaucagcgagaagcugagaagcggcuacgagaccuucaaggugaucgagggcuggagcaagcccaacagcaagcugcagaucaacagacaggugaucguggacagaggcaacagaagcggcuacagcggcaucuucagcguggagggcaagagcugcaucaacagaugcuucuacguggagcugaucagaggcagaaagcaggagaccgaggugcuguggaccagcaacagcaucgugguguucugcggcaccagcggcaccuacggcaccggcagcuggcccgacggcgccgacaucaaccugaugcccaucuga

SEQ ID NO: 174253 - RNA, 1410 nt, Artificial Sequence; identical to SEQ ID NO: 174121
  derived and/or modified CDS sequence (opt4) from neuraminidase__InfluenzaA__AAX57837

SEQ ID NO: 174254 - RNA, 1410 nt, Artificial Sequence
  derived and/or modified CDS sequence (opt4) from neuraminidase__InfluenzaA__AAX57847
augaaccccaaccagaagaucaucaccaucggcagcgugagccugaccaucgccaccaucugcuuccugaugcagaucgccauccuggugaccaccgugacccugcacuucaagcaguacgagugcaacagcccccccaacaaccaggugaugcugugcgagcccaccaucaucgagagaaacaucaccgagaucguguaccugaccaacaccaccaucgagaaggagaucugccccaagcuggccgaguacagaaacuggagcaagccccagugcaacaucaccggcuucgcccccuucagcaaggacaacagcaucagacugagcgccggcggcgacaucugggugaccagagagcccuacgugagcugcgaccccgacaagugcuaccaguucgcccugggccagggcaccacccugaacaacggccacagcaacgacaccgugcacgacagaacccccuacagaacccugcugaugaacgagcugggcgugcccuuccaccugggcaccaagcaggugugcaucgccuggagcagcagcagcugccacgacggcaaggccuggcugcacgugugcgugaccggcgacgacgagaacgccaccgccagcuucaucuacaacggcagacugguggacagcaucggcagcuggagcaagaagauccugagaacccaggagagcgagugcgugugcaucaacggcaccugcaccguggugaugaccgacggcagcgccagcggcaaggccgacaccaagauccuguucaucgaggagggcaagaucgugcacaccagccugcugagcggcagcgcccagcacguggaggagugcagcugcuaccccagauaccccggcgugagaugcgugugcagagacaacuggaagggcagcaacagacccaucguggacaucaacgugaaggacuacagcaucgugagcagcuacgugugcagcggccuggugggcgacacccccagaaagaacgacagcagcagcagcagccacugccuggaccccaacaacgaggagggcggccacggcgugaagggcugggccuucgacgacggcaacgacguguggaugggcagaaccaucagcgagaagcugagaagcggcuacgagaccuucaaggugaucgagggcuggagcaagcccaacagcaagcugcagaucaacagacaggugaucguggacagaggcaacagaagcggcuacagcggcaucuucagcguggagagcaagagcugcaucaacagaugcuucuacguggagcugaucagaggcagaaagcaggagaccgaggugcuguggaccagcaacagcaucgugguguucugcggcaccagcggcaccuacggcaccggcagcuggcccgacggcgccgacaucaaccugaugcccaucuga

SEQ ID NO: 174255 - RNA, 1410 nt, Artificial Sequence
  derived and/or modified CDS sequence (opt4) from neuraminidase__InfluenzaA__AAX57857
augaaccccaaccagaagaucaucaccaucggcagcgugagccugaccaucgccaccaucugcuuccugaugcagaucgccauccuggugaccaccgugacccugcacuucaagcaguacgagugcaacagcccccccaacaaccaggugaugcugugcgagcccaccaccaucgagagaaacaucaccgagaucguguaccugaccaacaccaccaucgagaaggagaucugccccaagcuggccgaguacagaaacuggagcaagccccagugcaacaucaccggcuucgcccccuucagcaaggacaacagcaucagacugagcgccggcggcgacaucugggugaccagagagcccuacgugagcugcgaccccgacaagugcuaccaguucgcccugggccagggcaccacccugaacaacggccacagcaacgacaccgugcacgacagaacccccuacagaacccugcugaugaacgagcugggcgugcccuuccaccugggcaccaagcaggugugcaucgccuggagcagcagcagcugccacgacggcaaggccuggcugcacgugugcgugaccggcgacgacgagaacgccaccgccagcuucaucuacaacggcagacugguggacagcaucggcagcuggagcaagaagauccugagaacccaggagagcgagugcgugugcaucaacggcaccugcaccguggugaugaccgacggcagcgccagcggcaaggccgacaccaagauccuguucaucgaggagggcaagaucgugcacaccagcagccugagcggcagcgcccagcacguggaggagugcagcugcuaccccagauaccccggcgugagaugcgugugcagagacaacuggaagggcagcaacagacccaucguggacaucaacgugaaggacuacagcaucgugagcagcuacgugugcagcggccuggugggcgacacccccagaaagaacgacagcagcagcagcagccacugccuggaccccaacaacgaggagggcggccacggcgugaagggcugggccuucgacgacggcaacgacguguggaugggcagaaccaucagcgagaagcugagaagcggcuacgagaccuucaaggugaucgagggcuggagcaagcccaacagcaagcugcagaucaacagacaggugaucguggacagaggcaacagaagcggcuacagcggcaucuucagcguggagggcaagagcugcaucaacagaugcuucuacguggagcugaucagaggcagaaagcaggagaccgaggugcuguggaccagcaacagcaucgugguguucugcggcaccagcggcaccuacggcaccggcagcuggcccgacggcgccgacaucaaccugaugcccaucuga

SEQ ID NO: 174256 - RNA, 1410 nt, Artificial Sequence; identical to SEQ ID NO: 174121
  derived and/or modified CDS sequence (opt4) from neuraminidase__InfluenzaA__AAX57867

SEQ ID NO: 174257 - RNA, 1410 nt, Artificial Sequence
  derived and/or modified CDS sequence (opt4) from neuraminidase__InfluenzaA__AAX57877
augaaccccaaccagaagaucaucaccaucggcagcgugagccugaccaucgccaccaucugcuuccugaugcagaucgccauccuggugaccaccgugacccugcacuucaagcaguacgagugcaacagcccccccaacaaccaggugaugcugugcgagcccaccaucaucgagagaaacaucaccgagaucguguaccugaccaacaccaccaucgagaaggagaucugccccaagcuggccgaguacagaaacuggagcaagccccagugcaacaucaccggcuucgcccccuucagcaaggacaacagcaucagacugagcgccggcggcgacaucugggugaccagagagcccuacgugagcugcgaccccgacaagugcuaccaguucgcccugggccagggcaccacccugaacaacggccacagcaacgacaccgugcacgacagaacccccuacagaacccugcugaugaacgagcugggcgugcccuuccaccugggcaccaagcaggugugcaucgccuggagcagcagcagcugccacgacggcaaggccuggcugcacgugugcgugaccggcgacgacgagaacgccaccgccagcuucaucuacaacggcagacugguggacagcaucggcagcuggagcaagaagauccugagaacccaggagagcgagugcgugugcaucaacggcaccugcaccguggugaugaccgacggcagcgccagcggcaaggccgacaccaagauccuguucaucgaggagggcaagaucgugcacaccagcagccugagcggcagcgcccagcacguggaggagugcagcugcuaccccagauaccccggcgugagaugcgugugcagagacaacuggaagggcagcaacagacccaucguggacaucaacgugaaggacuacagcaucgugagcagcuacgugugcagcggccuggugggcgacacccccagaaagaacgacagcagcagcagcagccacugccuggaccccaacaacgaggagggcggccacggcgugaagggcugggccuucgacgacggcaacgacguguggaugggcagaaccaucagcgagaagcugagaagcggcuacgagaccuucaaggugaucgagggcuggagcaagcccaacagcaagcugcagaucaacagacaggugaucguggacagaggcaacagaagcggcuacagcggcaucuucagcguggagggcaagagcugcaucaacagaugcuucuacguggagcugaucagaggcagaaagcaggagaccgaggugcuguggaccagcaacagcaucgugguguucugcggcaccagcggcaccuacggcaccggcagcuggcccgacggcgccgacaucaaccugaugcacaucuga

SEQ ID NO: 174258 - RNA, 1410 nt, Artificial Sequence; identical to SEQ ID NO: 174121
  derived and/or modified CDS sequence (opt4) from neuraminidase__InfluenzaA__AAX57887

SEQ ID NO: 174259 - RNA, 1410 nt, Artificial Sequence
  derived and/or modified CDS sequence (opt4) from neuraminidase__InfluenzaA__AAX57897
augaaccccaaccagaagaucaucaccaucggcagcgugagccugaccaucgccaccaucugcuuccugaugcagaucgccauccuggugaccaccgugacccugcacuucaagcaguacgagugcaacagcccccccaacaaccaggugaugcugugcgagcccaccaucaucgagagaaacaucaccgagaucguguaccugaccaacaccaccaucgagaaggagaucugccccaagcuggccgaguacagaaacuggagcaagccccagugcaacaucaccggcuucgcccccuucagcaaggacaacagcaucagacugagcgccggcggcgacaucugggugaccagagagcccuacgugagcugcgaccccgacaagugcuaccaguucgcccugggccagggcaccacccugaacaacggccacagcaacgacaccgugcacgacagaacccccuacagaacccugcugaugaacgagcugggcgugcccuuccaccugggcaccaagcaggugugcaucgccuggagcagcagcagcugccacgacggcaaggccuggcugcacgugugcgugaccggcgacgacgagaacgccaccgccagcuucaucuacaacggcagacugguggacagcaucggcagcuggagcaagaagauccugagaacccaggagagcgagugcgugugcaucaacggcaccugcaccguggugaugaccgacggcagcgccagcggcaaggccgacaccaagauccuguucaucgaggagggcaagaucgugcacaccagcagccugagcggcagcgcccagcacguggaggagugcagcugcuaccccagauaccccggcgugagaugcgugugcagagacaacuggaagggcagcaacagacccaucguggacaucaacgugaaggacuacagcaucgugagcagcuacgugugcagcggccuggugggcgacacccccagaaagaacgacagcagcagcagcagccacugccuggaccccaacaacgaggagggcggccacggcgugaagggcugggccuucgacagcggcaacgacguguggaugggcagaaccaucagcgagaagcugagaagcggcuacgagaccuucaaggugaucgagggcuggagcaagcccaacagcaagcugcagaucaacagacaggugaucguggacagaggcaacagaagcggcuacagcggcaucuucagcguggagggcaagagcugcaucaacagaugcuucuacguggagcugaucagaggcagaaagcaggagaccgaggugcuguggaccagcaacagcaucgugguguucugcggcaccagcggcaccuacggcaccggcagcuggcccgacggcgccgacaucaaccugaugcccaucuga

SEQ ID NO: 174260 - RNA, 1410 nt, Artificial Sequence
  derived and/or modified CDS sequence (opt4) from neuraminidase__InfluenzaA__AAX57907
augaaccccaaccagaagaucaucaccaucggcagcgugagccugaccaucgccaccaucugcuuccugaugcagaucgccauccuggugaccaccgugacccugcacuucaagcaguacgagugcaacagcccccccaacaaccaggugaugcugugcgagcccaccaucaucgagagaaacaucaccgagaucguguaccugaccaacaccaccaucgagaaggagaucugccccaagcuggccgaguacagaaacuggagcaagccccagugcaacaucaccggcuucgcccccuucagcaaggacaacagcaucagacugagcgccggcggcgacaucugggugaccagagagcccuacgugagcugcgaccccgacaagugcuaccaguucgcccugggccagggcaccacccugaacaacggccacagcaacgacaccgugcacgacagaacccccuacagaacccugcugaugaacgagcugggcgugcccuuccaccugggcaccaagcaggugugcaucgccuggagcagcagcagcugccacgacggcaaggccuggcugcacgugugcgugaccggcgacgacgagaacgccaccgccagcuucaucuacaacggcagacugguggacagcaucggcagcuggagcaagaagauccugagaacccaggagagcgagugcgugugcaucaacggcaccugcaccguggugaugaccgacggcagcgccagcggcaaggccgacaccaagauccuguucaucgaggagggcaagaucgugcacaccagcagccugagcggcagcgcccagcacguggaggagugcagcugcuaccccagauaccccggcgugagaugcgugugcagagacaacuggaagggcagcaacagacccaucguggacaucaacgugaaggacuacagcaucgugagcagcuacgugugcagcggccuggugggcgacacccccagaaagaacgacagcagcagcagcagccacugccuggaccccaacaacgaggagggcggccacggcgugaagggcugggccuucgacgacggcaacgacguguggaugggcagaaccaucagcgagaagcugagaagcggcuacgagaccuucaaggugaucgagggcuggagcaagcccaacagcaagcugcagaugaacagacaggugaucguggacagaggcaacagaagcggcuacagcggcaucuucagcguggagggcaagagcugcaucaacagaugcuucuacguggagcugaucagaggcagaaagcaggagaccgaggugcuguggaccagcaacagcaucgugguguucugcggcaccagcggcaccuacggcaccggcagcuggcccgacggcgccgacaucaaccugaugcccaucuga

SEQ ID NO: 174261 - RNA, 1410 nt, Artificial Sequence; identical to SEQ ID NO: 174121
  derived and/or modified CDS sequence (opt4) from neuraminidase__InfluenzaA__AAX57917

SEQ ID NO: 174262 - RNA, 1410 nt, Artificial Sequence; identical to SEQ ID NO: 174121
  derived and/or modified CDS sequence (opt4) from neuraminidase__InfluenzaA__AAX57927

SEQ ID NO: 174263 - RNA, 1410 nt, Artificial Sequence
  derived and/or modified CDS sequence (opt4) from neuraminidase__InfluenzaA__AAX57937
augaaccccaaccagaagaucaucaccaucggcagcgugagccugaccaucgccaccaucugcuuccugaugcagaucgccauccuggugaccaccgugacccugcacuucaagcaguacgagugcaacagcccccccaacaaccaggugaugcugugcgagcccaccaucaucgagagaaacaucaccgagaugguguaccugaccaacaccaccaucgagaaggagaucugccccaagcuggccgaguacagaaacuggagcaagccccagugcaacaucaccggcuucgcccccuucagcaaggacaacagcaucagacugagcgccggcggcgacaucugggugaccagagagcccuacgugagcugcgaccccgacaagugcuaccaguucgcccugggccagggcaccacccugaacaacggccacagcaacgacaccgugcacgacagaacccccuacagaacccugcugaugaacgagcugggcgugcccuuccaccugggcaccaagcaggugugcaucgccuggagcagcagcagcugccacgacggcaaggccuggcugcacgugugcgugaccggcgacgacgagaacgccaccgccagcuucaucuacaacggcagacugguggacagcaucggcagcuggagcaagaagauccugagaacccaggagagcgagugcgugugcaucaacggcaccugcaccguggugaugaccgacggcagcgccagcggcaaggccgacaccaagauccuguucaucgaggagggcaagaucgugcacaccagccugcugagcggcagcgcccagcacguggaggagugcagcugcuaccccagauaccccggcgugagaugcgugugcagagacaacuggaagggcagcaacagacccaucguggacaucaacgugaaggacuacagcaucgugagcagcuacgugugcagcggccuggugggcgacacccccagaaagaacgacagcagcagcagcagccacugccuggaccccaacaacgaggagggcggccacggcgugaagggcugggccuucgacgacggcaacgacguguggaugggcagaaccaucagcgagaagcugagaagcggcuacgagaccuucaaggugaucgagggcuggagcaagcccaacagcaagcugcagaucaacagacaggugaucguggacagaggcaacagaagcggcuacagcggcaucuucagcguggagggcaagagcugcaucaacagaugcuucuacguggagcugaucagaggcagaaagcaggagaccgaggugcuguggaccagcaacagcaucgugguguucugcggcaccagcggcaccuacggcaccggcagcuggcccgacggcgccgacaucaaccugaugagaaucuga

SEQ ID NO: 174264 - RNA, 1410 nt, Artificial Sequence
  derived and/or modified CDS sequence (opt4) from neuraminidase__InfluenzaA__AAX57947
augaaccccaaccagaagaucaucaccaucggcagcgugagccugaccaucgccaccaucugcuuccugaugcagaucgccauccuggugaccaccgugacccugcacuucaagcaguacgagugcaacagcccccccaacaaccaggugaugcugugcgagcccaccaucaucgagagaaacaucaccgagaucguguaccugaccaacaccaccaucgagaaggagaucugccccaagcuggccgaguacagaaacuggagcaagccccagugcaacaucaccggcuucgcccccuucagcaaggacaacagcaucagacugagcgccggcggcgacaucugggugaccagagagcccuacgugagcugcgaccccgacaagugcuaccaguucgcccugggccagggcaccacccugaacaacggccacagcaacgacaccgugcacgacagaacccccuacagaacccugcugaugaacgagcugggcgugcccuuccaccugggcaccagacaggugugcaucgccuggagcagcagcagcugccacgacggcaaggccuggcugcacgugugcgugaccggcgacgacgagaacgccaccgccagcuucaucuacaacggcagacugguggacagcaucggcagcuggagcagaaagauccugagaacccaggagagcgagugcgugugcaucaacggcaccugcaccguggugaugaccgacggcagcgccagcggcaaggccgacaccaagauccuguucaucgaggagggcaagaucgugcacaucagcacccugagcggcagcgcccagcacguggaggagugcagcugcuaccccagauaccccggcgugagaugcgugugcagagacaacuggaagggcagcaacagacccaucguggacaucaacgugaaggacuacagcaucgccagcagcuacaugugcagcggccuggugggcgacacccccagaaagaacgacagcuucagcagcagccacugccuggaccccaacaacgaggagggcggccacggcgugaagggcugggccuucgacgacggcaacgacguguggaugggcagaaccaucagcgagaagcugagaagcggcuacgagaccuucaaggugaucgagggcuggagcaagcccaacagcaagcugcagaucaacagacaggugaucguggagagaggcaacagaagcggcuacagcggcaucuucagcguggagggcaagagcugcaucaacagaugcuucuacguggagcugaucagaggcagaaaggaggagaccgaggugugguggaccagcaacagcaucgugguguucugcggcaccagcggcaccuacggcaccggcagcuggcccgacggcgccgacaucaaccugaugcccaucuga

SEQ ID NO: 174265 - RNA, 1410 nt, Artificial Sequence; identical to SEQ ID NO: 174205
  derived and/or modified CDS sequence (opt4) from neuraminidase__InfluenzaA__AAX76626

SEQ ID NO: 174266 - RNA, 1410 nt, Artificial Sequence
  derived and/or modified CDS sequence (opt4) from neuraminidase__InfluenzaA__AAX76646
augaaccccaaccagaagaucaucaccaucggcagcgugagccugaccaucgccaccaucugcuuccugaugcagaucgccauccuggugaccaccgugacccugcacuucaagcagcacgagugcaacagcccccccaacaaccaggugaugcugugcgagcccaccaucaucgagagaaacaucaccgagaucguguaccugaccaacaccaccaucgagaaggagaucugccccaagcuggccgaguacagaaacuggagcaagccccagugcaacaucaccggcuucgcccccuucagcaaggacaacagcaucagacugagcgccggcggcgacaucugggugaccagagagcccuacgugagcugcgaccccgacaagugcuaccaguucgcccugggccagggcaccacccugaacaacggccacagcaacaacaccgugcacgacagaacccccuacagaacccugcugaugaacgagcugggcgugcccuuccaccugggcaccagacaggugugcaucgccuggagcagcagcggcugccacgacggcaaggccuggcugcacgugugcgugaccggcgacgacaagaacgccaccgccagcuucaucuacaacggcagacugguggacagcaucggcagcuggagcaagaagauccugagaacccaggagagcgagugcgugugcaucaacggcaccugcaccguggugaugaccgacggcagcgccagcggcaaggccgacaccaagauccuguucaucgaggagggcaagaucgugcacaucagcacccugagcggcagcgcccagcacguggaggagugcagcugcuaccccagauaccccggcgugagaugcgugugcagagacaacuggaagggcagcaacagacccaucguggacaucaacgugaaggacuacagcaucgugagcagcuacgugugcagcggccuggugggcgacacccccagaaagaacgacagcuucagcagcagccacugccuggaccccaacaacgaggagggcggccacggcgugaagggcugggccuucgacgacggcaacgacguguggaugggcagaaccaucagcgagaagcugagaagcggcuacgagaccuucaaggugaucgagggcuggagcaagcccaacagcaagcugcagaucaacagacaggugaucguggagagaggcaacagaagcggcuacagcggcaucuucagcguggagggcaagagcugcaucaacagaugcuucuacguggagcugaucagaggcagaaaggaggagaccgaggugugguggaccagcaacagcaucgugguguucugcggcaccagcggcaccuacggcaccggcagcuggcccgacggcgccgacaucaaccugaugcccaucuga

SEQ ID NO: 174267 - RNA, 1410 nt, Artificial Sequence; identical to SEQ ID NO: 174195
  derived and/or modified CDS sequence (opt4) from neuraminidase__InfluenzaA__AAX76656

SEQ ID NO: 174268 - RNA, 1410 nt, Artificial Sequence; identical to SEQ ID NO: 174240
  derived and/or modified CDS sequence (opt4) from neuraminidase__InfluenzaA__AAX76666

SEQ ID NO: 174269 - RNA, 1410 nt, Artificial Sequence; identical to SEQ ID NO: 174121
  derived and/or modified CDS sequence (opt4) from neuraminidase__InfluenzaA__AAX76696

SEQ ID NO: 174270 - RNA, 1410 nt, Artificial Sequence
  derived and/or modified CDS sequence (opt4) from neuraminidase__InfluenzaA__AAX76736
augaaccccaaccagaagaucaucaccaucggcagcgugagccugaccaucgccaccaucugcuuccugaugcagaucgccauccuggugaccaccgugacccugcacuucaagcaguacgagugcaacagcccccccaacaaccaggugaugcugugcgagcccaccaucaucgagagaaacaucaccgagaucguguaccugaccaacaccaccaucgagaaggagaucugccccaagcugagcgaguacagaaacuggagcaagccccagugcaacaucaccggcuucgcccccuucagcaaggacaacagcaucagacugagcgccggcggcgacaucugggugaccagagagcccuacgugagcugcgaccccgacaagugcuaccaguucgcccugggccagggcaccacccugaacaacggccacagcaacgacaccgugcacgacagaacccccuacagaacccugcugaugaacgagcugggcgugcccuuccaccugggcaccaagcaggugugcaucgccuggagcagcagcagcugccacgacggcaaggccuggcugcacgugugcgugaccggcgacgacgagaacgccaccgccagcuucaucuacaacggcagacugguggacagcaucggcagcuggagcaagaagauccugagaacccaggagagcgagugcgugugcaucaacggcaccugcaccguggugaugaccgacggcagcgccagcggcaaggccgacaccaagauccuguucaucgaggagggcaagaucgugcacaucagcacccugagcagaagcgcccagcacguggaggagugcagcugcuaccccagauaccccggcgugagaugcgugugcagagacaacuggaagggcagcaacagacccaucguggacaucaacgugaaggaccacagcaucgugagcagcuacgugugcagcggccuggugggcgacacccccagaaagaacgacagcuucagcagcagccacugccuggaccccaacaacgaggagggcggccacggcgugaagggcugggccuucgacgacggcaacgacguguggaugggcagaaccaucagcgagaagcugagaagcggcuacgagaccuucaaggugaucgagggcuggagcaagcccaacagcaagcugcagaucaacagacaggugaucguggagagaggcaacagaagcggcuacagcggcaucuucagcguggagggcaagagcugcaucaacagaugcuucuacguggagcugaucagaggcagaaaggaggagaccgaggugugguggaccagcaacagcaucgugguguucugcggcaccagcggcaccuacggcaccggcagcuggcccgacggcgccgacaucaaccugaugcccaucuga

SEQ ID NO: 174271 - RNA, 1410 nt, Artificial Sequence
  derived and/or modified CDS sequence (opt4) from neuraminidase__InfluenzaA__AAX76766
augaaccccaaccagaagaucaucaccaucggcagcgugagccugaccaucgccaccaucugcuuccugaugcagaucgccauccuggugaccaccgugacccugcacuucaagcagcacgagugcaacagcccccccaacaaccaggugaugcugugcgagcccaccaucaucgagagaaacaucaccgagaucguguaccugaccaacaccaccaucgagaaggagaucugccccaagcuggccgaguacagaaacuggagcaagccccagugcaacaucaccggcuucgcccccuucagcaaggacaacagcaucagacugagcgugggcggcgacaucugggugaccagagagcccuacgugagcugcgaccccgacaagugcuaccaguucgcccugggccagggcaccacccugaacaacggccacagcaacgacaccgugcacgacagaacccccuacagaacccugcugaugaacgagcugggcgugcccuuccaccugggcaccagacaggugugcaucgccuggagcagcagcagcugccacgacggcaaggccuggcugcacgugugcgugaccggcgacgacaagaacgccaccgccagcuucaucuacaacggcagacugguggacagcaucggcagcuggagcaagaagauccugagaacccaggagagcgagugcgugugcaucaacggcaccugcaccguggugaugaccgacggcagcgccagcggcaaggccgacaccaagauccuguucaucgaggagggcaagaucgugcacaucagcacccugagcggcagcgcccagcacguggaggagugcagcugcuaccccagauaccccggcgugagaugcgugugcagagacaacuggaagggcagcaacagacccaucguggacaucaacgugaaggacuacagcaucgugagcagcuacgugugcagcggccuggugggcgacacccccagaaagaacgacagcuucagcagcagccacugccuggaccccaacaacgaggagggcggccacggcgugaagggcugggccuucgacgacggcaacgacguguggaugggcagaaccaucagcgagaagcugagaagcggcuacgagaccuucaaggugaucgagggcuggagcaagcccaacagcaagcugcagaucaacagacaggugaucguggagagaggcaacagaagcggcuacagcggcaucuucagcguggagggcaagagcugcaucaacagaugcuucuacguggagcugaucagaggcagaaaggaggagaccgaggugugguggaccagcaacagcaucgugguguucugcggcaccagcggcaccuacggcaccggcagcuggcccgacggcgccgacaucaaccugaugcccaucuga

SEQ ID NO: 174272 - RNA, 1410 nt, Artificial Sequence; identical to SEQ ID NO: 174197
  derived and/or modified CDS sequence (opt4) from neuraminidase__InfluenzaA__AAY18089

SEQ ID NO: 174273 - RNA, 1410 nt, Artificial Sequence
  derived and/or modified CDS sequence (opt4) from neuraminidase__InfluenzaA__AAY18099
augaaccccaaccagaagaucaucaccaucggcagcgugagccugaccaucgccaccaucugcuuccugaugcagaucgccauccuggugaccaccgugacccugcacuucaagcagcacgagugcaacagcccccccaacaaccaggugaugcugugcgagcccaccaucaucgagagaaacaucaccgagaucguguaccugaccaacaccaccaucgagaaggagaucugccccaagcuggccgaguacagaaacuggagcaagccccagugcaacaucaccggcuucgcccccuucagcaaggacaacagcaucagacugagcgccggcggcgacaucugggugaccagagagcccuacgugagcugcgaccccgacaagugcuaccaguucgcccugggccagggcaccacccugaacaacggccacagcaacaacaccgugcacgacagaacccccuacagaacccugcugaugaacgagcugggcgugcccuuccaccugggcaccagacaggugugcaucgccuggagcagcagcagcugccacgacggcaaggccuggcugcacgugugcgugaccggcgacgacaagaacgccaccgccagcuucaucuacaacggcagacugguggacagcaucggcagcuggagcaagaagauccugagaacccaggagagcgagugcgugugcaucaacggcaccugcaccguggugaugaccgacggcagcgccagcggcaaggccgacaccaagauccuguucguggaggagggcaagaucgugcacaucagcacccugagcggcagcgcccagcacguggaggagugcagcugcuaccccagauaccccggcgugagaugcgugugcagagacaacuggaagggcagcaacagacccaucguggacaucaacgugaaggacuacagcaucgugagcagcuacgugugcagcggccuggugggcgacacccccagaaagaacgacagcuucagcagcagccacugccuggaccccaacaacgaggagggcggccacggcgugaagggcugggccuucgacgacggcaacgacguguggaugggcagaaccaucagcgagaagcugagaagcggcuacgagaccuucaaggugaucgagggcuggagcaagcccaacagcaagcugcagaucaacagacaggugaucguggagagaggcaacagaagcggcuacagcggcaucuucagcguggagggcaagagcugcaucaacagaugcuucuacguggagcugaucagaggcagaaaggaggagaccgaggugugguggaccagcaacagcaucgugguguucugcggcaccagcggcaccuacggcaccggcagcuggcccgacggcgccgacaucaaccugaugcccaucuga

SEQ ID NO: 174274 - RNA, 1410 nt, Artificial Sequence
  derived and/or modified CDS sequence (opt4) from neuraminidase__InfluenzaA__AAY18109
augaaccccaaccagaagaucaucaccaucggcagcgugagccugaccaucgccaccaucugcuuccugaugcagaucgccauccuggugaccacccugacccugcacuucaagcaguacgagugcaacagcccccccaacaaccaggugaugcugugcgagcccgccaucaucgagagaaacaucaccgagaucguguaccugaccaacaccaccaucgagaaggagaagugccccaagcuggccgaguacagaaacuggagcaagccccagugcaacaucaccggcuucgcccccuucagcaaggacaacagcaucagacugagcgccggcggcgacaucugggugaccagagagcccuacgugagcugcgaccccgacaagugcuaccaguucgcccugggccagggcaccacccugaacaacggccacagcaacgacaccgugcacgacagaacccccuacagaacccugcugaugaacgagcugggcgugcccuuccaccugggcaccagacaggugugcaucgccuggagcagcagcagcugccacgacggcaaggccuggcugcacgugugcgugaccggcgacgacgagaacgccaccgccagcuucaucuacaacggcagacugguggacagcaucggcagcuggagcaagaagauccugagaacccaggagagcgagugcgugugcaucaacggcaccugcaccguggugaugaccgacggcagcgccagcggcaaggccgacaccaagauccuguucaucgaggagggcaagaucgugaacaucagcacccugagcggcagcgcccagcacguggaggagugcagcugcuaccccagauaccccggcgugagaugcgugugcagagacaacuggaagggcagcaacagacccaucguggacaucaacgugaaggacuacagcaucgugagcagcuacgugugcagcggccuggugggcgacacccccagaaagaacgacagcuucagcagcagccacugccuggaccccaacaacgaggagggcggccacggcgugaagggcugggccuucgacgacggcaacgacguguggaugggcagaaccaucagcgagaagcugagaagcggcuacgagaccuucaaggugaucgagggcuggagcaagcccaacagcaagcugcagaucaacagacaggugaucguggagagaggcaacagaagcggcuacagcggcaucuucagcguggagggcaagagcugcaucaacagaugcuucuacguggagcugaucagaggcagaaaggaggagaccgaggugugguggaccagcaacagcaucgugguguucugcggcaccagcggcaccuacggcaccggcagcuggcccgacggcgccgacaucaaccugaugcccaucuga

SEQ ID NO: 174275 - RNA, 1410 nt, Artificial Sequence; identical to SEQ ID NO: 174233
  derived and/or modified CDS sequence (opt4) from neuraminidase__InfluenzaA__AAY18119

SEQ ID NO: 174276 - RNA, 1410 nt, Artificial Sequence
  derived and/or modified CDS sequence (opt4) from neuraminidase__InfluenzaA__AAY18129
augaaccccaaccagaagaucaucaccaucggcagcgugagccugaccaucgccaccaucugcuuccugaugcagaucaccauccuggugaccaccgugacccugcacuucaagcaguacgagugcaacagcccccccaacaaccaggugaugcugugcgagcccaccaucaucgagagaaacaucaccgagaucguguaccugaccaacaccaccaucgagaaggagaucugccccaagcuggccgaguacagaaacuggagcaagccccagugcaacaucaccggcuucgcccccuucagcaaggacaacagcaucagacugagcgccggcggcgacaucugggugaccagagagcccuacgugagcugcgaccccgacaagugcuaccaguucgcccugggccagggcaccacccugaacaacggccacagcaacgacaccgugcacgacagaacccccuacagaacccugcugaugaacgagcugggcgugcccuuccaccugggcaccagacaggugugcaucgccuggagcagcagcagcugccacgacggcaaggccuggcugcacgugugcgugaccggcgacgacaagaacgccaccgccagcuucaucuacaacggcagacugguggacagcaucggcagcuggagcaagaagauccugagaacccaggagagcgagugcgugugcaucaacggcaccugcaccguggugaugaccgacggcagcgccagcggcaaggccgacaccaagauccuguucaucgaggagggcaagaucauccacaucagcacccugagcggcagcgcccagcacguggaggagugcagcugcuaccccagauaccccggcgugagaugcgugugcagagacaacuggaagggcagcaacagacccaucguggacaucaacgugaaggacuacagcaucgugagcagcuacgugugcagcggccuggugggcgacacccccagaaagaacgacagcagcagcagcagccacugccuggaccccaacaacgaggagggcggccacggcgugaagggcugggccuucgacgacggcaacgacguguggaugggcagaaccaucagcgagaagcugagaagcggcuacgagaccuucaaggugaucgagggcuggagcaagagcaacagcaagcugcagaucaacagacaggugaucguggagagaggcaacagaagcggcuacagcggcaucuucagcguggagggcaagagcugcaucaacagaugcuucuacguggagcugaucagaggcagaaaggaggagaccgaggugugguggaccagcaacagcaucgugguguucugcggcaccagcggcaccuacggcaccggcagcuggcccgacggcgccgacaucaaccugaugcccaucuga

SEQ ID NO: 174277 - RNA, 1410 nt, Artificial Sequence
  derived and/or modified CDS sequence (opt4) from neuraminidase__InfluenzaA__AAY18139
augaaccccaaccagaagaucaucaccaucggcagcgugagccugaccaucgccaccaucugcuuccugaugcagaucgccauccuggugaccaccgugacccugcacuucaagcagcacgagugcaacagcccccccaacaaccaggugaugcugugcgagcccaccaucaucgagagaaacaucaccgagaucguguaccugaccaacaccaccaucgagagagagaucugccccaagcuggccgaguacagaaacuggagcaagccccagugcaacaucaccggcuucgcccccuucagcaaggacaacagcaucagacugagcgccggcggcgacaucugggugaccagagagcccuacgugagcugcgaccccgacaagugcuaccaguucgcccugggccagggcaccacccugaacaacagacacagcaacgacaccgugcacgacagaacccccuacagaacccugcugaugaacgagcugggcgugcccuuccaccugggcaccagacaggugugcaucgccuggagcagcagcagcugccacgacggcaaggccuggcugcacgugugcgugaccggcgacgacaagaacgccaccgccagcuucaucuacaacggcagacugguggacagcaucggcagcuggagcaagaagauccugagaacccaggagagcgagugcgugugcaucaacggcaccugcaccguggugaugaccgacggcagcgccagcggcaaggccgacaccaagauccuguucaucgaggagggcaagaucgugcacaucagcacccugagcggcagcgcccagcacguggaggagugcagcugcuaccccagauaccccggcgugagaugcgugugcagagacaacuggaagggcagcaacagacccaucguggacaucaacgugaaggacuacagcaucgugagcagcuacgugugcagcggccuggugggcgacacccccagaaagaacgacagcagcagcagcagccacugccuggaccccaacaacgaggagggcggccacggcgugaagggcugggccuucgacgacggcaacgacguguggaugggcagaaccaucagcgagaagcugagaagcggcuacgagaccuucaaggugaucgagggcuggagcaagcccaacagcaagcugcagaucaacagacaggugaucguggagagaggcaacagaagcggcuacagcggcaucuucagcguggagggcaagagcugcaucaacagaugcuucuacguggagcugaucagaggcagaaaggaggagaccgaggugugguggaccagcaacagcaucgugguguucugcggcaccagcggcaccuacggcaccggcagcuggcccgacggcgccgacaucaaccugaugcccaucuga

SEQ ID NO: 174278 - RNA, 1410 nt, Artificial Sequence
  derived and/or modified CDS sequence (opt4) from neuraminidase__InfluenzaA__AAY18149
augaaccccaaccagaagaucaucaccaucggcagcgugagccugaccaucgccaccaucugcuuccugaugcagaucgccauccuggugaccaccgugacccugcacuucaagcagcacgagugcaacagcccccccaacaaccaggugaugcugugcgagcccaccaucaucgagagaaacaucaccgagaucguguaccugaccaacaccaccaucgagaaggagaucugccccaagcuggccgaguacagaaacuggagcaagccccagugcaacaucaccggcuucgcccccuucagcaaggacaacagcaucagacugagcgccggcggcgacaucugggugaccagagagcccuacgugagcugcgaccccgacaagugcuaccaguucgcccugggccagggcaccacccugaacaacggccacagcaacgacaccgugcacgacagaacccccuacagaacccugcugaugaacgagcugggcgugcccuuccaccugggcaccagacaggugugcaucgccuggagcagcagcagcugccacgacggcaaggccuggcugcacgugugcgugaccggcgacgacaagaacgccaccgccagcuucaucuacaacggcagacugguggacagcaucggcagcuggagcaagaagauccugagaacccaggagagcgagugcgugugcaucaacggcaccugcaccguggugaugaccgacggcagcgccagcggcaaggccgacaccaagauccuguucaucgaggagggcaagaucgugcacaucagcacccugagcggcagcgcccagcacguggaggagugcagcugcuaccccagauaccccggcgugagaugcgugugcagagacaacuggaagggcagcaacagacccaccguggacaucaacgugaaggacuacagcaucgugagcagcuacgugugcagcggccuggugggcgacacccccagaaagaacgacagcagcagcagcagccacugccuggaccccaacaacgaggagggcggccacggcgugaagggcugggccuucgacgacggcaacgacguguggaugggcagaaccaucagcgagaagcugagaagcggcuacgagaccuucaaggugaucgagggcuggagcaagcccaacagcaagcugcagaucaacagacaggugaucguggagagaggcaacagaagcggcuacagcggcaucuucagcguggagggcaagagcugcaucaacagaugcuucuacguggagcugaucagaggcagaaaggaggagaccgaggugugguggaccagcaacagcaucgugguguucugcggcaccagcggcaccuacggcaccggcagcuggcccgacggcgccgacaucaaccugaugcccaucuga

SEQ ID NO: 174279 - RNA, 1410 nt, Artificial Sequence
  derived and/or modified CDS sequence (opt4) from neuraminidase__InfluenzaA__AAY18159
augaaccccaaccagaagaucaucaccaucggcagcgugagccugaucaucgccaccaucugcuuccugaugcagaucgccauccuggugaccaccgugacccugcacuucaagcaguacgagugcaacagcccccccaacaaccaggugaugcugugcgagcccaccaucaucgagagaaacaucaccgagaucguguaccugaccaacaccaccaucgagaaggagaucugccccaagcuggccgaguacagaaacuggagcaagccccagugcaacaucaccggcuucgcccccuucagcaaggacaacagcaucagacugagcgccggcggcgacaucugggugaccagagagcccuacgugagcugcgaccccgacaagugcuaccaguucgcccugggccagggcaccacccugaacaacggccacagcaacgacaccgugcacgacagaacccccuacagaacccugcugaugaacgagcugggcgugcccuuccaccugggcaccaagcaggugugcaucgccuggagcagcagcagcugccacgacggcaaggccuggcugcacgugugcgugaccggcgacgacgagaacgccaccgccagcuucaucuacaacggcagacugguggacagcaucggcagcuggagcaagaagauccugagaacccaggagagcgagugcgugugcaucaacggcaccugcaccguggugaugaccgacggcagcgccagcggcaaggccgacaccaagauccuguucaucgaggagggcaagaucgugcacaccagcagccugagcggcagcgcccagcacguggaggagugcagcugcuaccccagauaccccggcgugagaugcgugugcagagacaacuggaagggcagcaacagacccaucguggacaucaacgugaaggacuacagcaucgugagcagcuacgugugcagcggccuggugggcgacacccccagaaagaacgacagcagcagcagcagccacugccuggaccccaacaacgaggagggcggccacggcgugaagggcugggccuucgacgacggcaacgacguguggaugggcagaaccaucagcgagaagcugagaagcggcuacgagaccuucaaggugaucgagggcuggagcaagcccaacagcaagcugcagaucaacagacaggugaucguggacagaggcaacagaagcggcuacagcggcaucuucagcguggagggcaagaacugcaucaacagaugcuucuacguggagcugaucagaggcagaaagcaggagaccgaggugcuguggaccagcaacagcaucgugguguucugcggcaccagcggcaccuacggcaccggcagcuggcccgacggcgccgacaucaaccugaugcccaucuga

SEQ ID NO: 174280 - RNA, 1410 nt, Artificial Sequence; identical to SEQ ID NO: 174121
  derived and/or modified CDS sequence (opt4) from neuraminidase__InfluenzaA__AAY18179

SEQ ID NO: 174281 - RNA, 1410 nt, Artificial Sequence; identical to SEQ ID NO: 174121
  derived and/or modified CDS sequence (opt4) from neuraminidase__InfluenzaA__AAY18189

SEQ ID NO: 174282 - RNA, 1410 nt, Artificial Sequence
  derived and/or modified CDS sequence (opt4) from neuraminidase__InfluenzaA__AAY18199
augaaccccaaccagaagaucaucaccaucggcagcgugagccugaccaucagcaccaucugcuucuucaugcagaucgccauccugaucaccaccgugacccugcacuucaagcaguacgaguucaacagcccccccaacaaccaggugaugcugugcgagcccaccaucaucgagagaaacaucaccgagaucguguaccugaccaacaccaccaucgagaaggagaucugccccaagcuggccgaguacagaaacuggagcaagccccagugcaacaucaccggcuucgcccccuucagcaaggacaacagcaucagacugagcgccggcggcgacaucugggugaccagagagcccuacgugagcugcgaccccgacaagugcuaccaguucgcccugggccagggcaccacccugaacaacgugcacagcaacgacaccgugcacgacagaacccccuacagaacccugcugaugaacgagcugggcgugcccuuccaccugggcaccaagcaggugugcaucgccuggagcagcagcagcugccacgacggcaaggccuggcugcacgugugcgugaccggcgacgacgagaacgccaccgccagcuucaucuacaacggcagacugguggacagcaucgugagcuggagcaagaagauccugagaacccaggagagcgagugcgugugcaucaacggcaccugcaccguggugaugaccgacggcagcgccagcggcaaggccgacaccaagauccuguucaucgaggagggcaagaucgugcacaccagcacccugagcggcagcgcccagcacguggaggagugcagcugcuaccccagauaccccggcgugagaugcgugugcagagacaacuggaagggcagcaacagacccaucguggacaucaacaucaaggacuacagcaucgugagcagcuacgugugcagcggccuggugggcgacacccccagaaagaacgacagcagcagcagcagccacugccuggaccccaacaacgaggagggcggccagggcgugaagggcugggccuucgacgacggcaacgacguguggaugggcagaaccaucagcgagaagcugcacagcggcuacgagaccuucaaggugaucgagggcuggagcaaccccaacagcaagcugcagaucaacagacaggugaucguggacagaggcaacagaagcggcuacagcggcaucuucagcguggagggcaagagcugcaucaacagaugcuucuacguggagcugaucagaggcagaaagcaggagaccgaggugcuguggaccagcaacagcaucgugguguucugcggcaccagcggcaccuacggcaccggcagcuggcccgacggcgccgacaucaaccugaugcccaucuga

SEQ ID NO: 174283 - RNA, 1410 nt, Artificial Sequence; identical to SEQ ID NO: 174224
  derived and/or modified CDS sequence (opt4) from neuraminidase__InfluenzaA__AAY18588

SEQ ID NO: 174284 - RNA, 1410 nt, Artificial Sequence; identical to SEQ ID NO: 174205
  derived and/or modified CDS sequence (opt4) from neuraminidase__InfluenzaA__AAY18614

SEQ ID NO: 174285 - RNA, 1410 nt, Artificial Sequence
  derived and/or modified CDS sequence (opt4) from neuraminidase__InfluenzaA__AAY27846
augaaccccaaccagaagaucaucaccaucggcagcgugagccugaccaucgccgccaucugcuuccugaugcagaucgccauccuggugaccaccgugacccugcacuucaagcagcacgagugcaacagcccccccaacaaccaggugaugcugugcgagcccaccaucaucgagagaaacaucaccgagaucguguaccugaccaacaccaccaucgagaaggagaucugccccaagcuggccgaguacagaaacuggagcaagccccagugcaacaucaccggcuucgcccccuucagcaaggacaacagcaucagacugagcgccggcggcgacaucugggugaccagagagcccuacgugagcugcgaccccgacaagugcuaccaguucgcccugggccagggcaccacccugaacaacggccacagcaacgacaccgugcacgacagaacccccuacagaacccugcugaugaacgagcugggcgugcccuuccaccugggcaccagacaggugugcaucgccuggagcagcagcagcugccacgacggcaaggccuggcugcacgugugcgugaccggcgacgacaagaacgccaccgccagcuucaucuacaacggcagacugguggacagcaucggcagcuggagcaagaagauccugagaacccaggagagcgagugcgugugcaucaacggcaccugcaccguggugaugaccgacggcagcgccagcggcaaggccgacaccaagauccuguucaucgaggagggcaagaucgugcacaucagcacccugagcggcagcgcccagcacguggaggagugcagcugcuaccccagauaccccggcgugagaugcgugugcagagacaacuggaagggcagcaacagacccaucguggacaucaacgugaaggacuacagcaucgugagcagcuacgugugcagcggccuggugggcgacacccccagaaagaacgacagcuucagcagcagccacugccuggaccccaacaacgaggagggcggccacggcgugaagggcugggccuucgacgacggcaacgacguguggaugggcagaaccaucagcgagaagcugagaagcggcuacgagaccuucaaggugaucgagggcuggagcaagcccaacagcaagcugcagaucaacagacaggugaucguggagagaggcaacagaagcggcuacagcggcaucuucagcguggagggcaagagcugcaucaacagaugcuucuacguggagcugaucagaggcagaaaggaggagaccgaggugugguggaccagcaacagcaucgugguguucugcggcaccagcggcaccuacggcaccggcagcuggcccgacggcgccgacaucaaccugaugcccaucuga

SEQ ID NO: 174286 - RNA, 1410 nt, Artificial Sequence
  derived and/or modified CDS sequence (opt4) from neuraminidase__InfluenzaA__AAY27856
augaaccccaaccagaagaucaucaccaucggcagcgugagccugaccaucgccaccaucugcuuccugaugcagaucgccauccuggugaccaccgugacccugcacuucaagcagcacgagugcaacagcccccccaacaaccaggugaugcugugcgagcccaccaucaucgagagaaacaucaccgagaucguguaccugaccaacaccaccaucgagaaggagaucugccccaagcuggccgaguacagaaacuggagcaagccccagugcaacaucaccggcuucgcccccuucagcaaggacaacagcaucagacugagcgccggcggcgacaucugggugaccagagagcccuacgugagcugcgaccccggcaagugcuaccaguucgcccugggccagggcaccacccugaacaacggccacagcaacgacaccgugcacgacagaacccccuacagaacccugcugaugaacgagcugggcgugcccuuccaccugggcaccagacaggugugcaucgccuggagcagcagcagcugccacgacggcaaggccuggcugcacgugugcgugaccggcgacgacaagaacgccaccgccagcuucaucuacaacggcagacugguggacagcaucggcagcuggagcaagaagauccugagaacccaggagagcgagugcgugugcaucaacggcaccugcaccguggugaugaccgacggcagcgccagcggcaaggccgacaccaagauccuguucaucgaggagggcaagaucgugcacaucagcacccugagcggcagcgcccagcacguggaggagugcagcugcuaccccagauaccccggcgugagaugcgugugcagagacaacuggaagggcagcaacagacccaucguggacaucaacgugaaggacuacagcaucgugagcagcuacgugugcagcggccuggugggcgacacccccagaaagaacgacagcagcagcagcagccacugccuggaccccaacaacgaggagggcggccacggcgugaagggcugggccuucgacgacggcaacgacguguggaugggcagaaccaucagcgagaagcugagaagcggcuacgagaccuucaaggugaucgagggcuggagcaagcccaacagcaagcugcagaucaacagacaggugaucguggagagaggcaacagaagcggcuacagcggcaucuucagcguggagggcaagagcugcaucaacagaugcuucuacguggagcugaucagaggcagaaaggaggagaccgaggugugguggaccagcaacagcaucgugguguucugcggcaccagcggcaccuacggcaccggcagcuggcccgacggcgccgacaucaaccugaugcccaucuga

SEQ ID NO: 174287 - RNA, 1410 nt, Artificial Sequence; identical to SEQ ID NO: 174197
  derived and/or modified CDS sequence (opt4) from neuraminidase__InfluenzaA__AAY27866

SEQ ID NO: 174288 - RNA, 1410 nt, Artificial Sequence
  derived and/or modified CDS sequence (opt4) from neuraminidase__InfluenzaA__AAY27962
augaaccccaaccagaagaucaucaccaucggcagcgugagccugaccaucgccaccaucugcuuccugaugcagaucgccauccuggugaccaccgugacccugcacuucaagcaguacgagugcaacagcccccccaacaaccaggugaugcugugcgagcccaccaucaucgagagaaacaucaccgagaucguguaccugaccaacaccaccaucgagaaggagaucugccccaagcuggccgaguacagaaacuggagcaagccccagugcaacaucaccggcuucgcccccuucagcaaggacaacagcaucagacugagcgccggcggcgacaucugggugaccagagagcccuacgugagcugcgaccccgacaagugcuaccaguucgcccugggccagggcaccacccugaacaacggccacagcaacgacaccgugcacgacagaacccccuacagaacccugcugaugaacgagcugggcgugcccuuccaccugggcaccagacaggugugcaucgccuggagcagcagcagcugccacgacggcaaggccuggcugcacgugugcgugaccggcgacgacgagaacgccaccgccagcuucaucuacaacggcagacugguggacagcaucggcagcuggagcaagaagauccugagaacccaggagagcgagugcgugugcaucaacggcaccugcaccguggugaugaccgacggcagcgccagcggcaaggccgacaccaagauccuguucaucgaggagggcaagaucgugcacaucagcacccugagcggcagcgcccagcacguggaggagugcagcugcuaccccagauaccccggcgugagaugcgugugcagagacaacuggaagggcagcaacagacccaucguggacaucaacgugaaggacuacagcaucgugagcagcuacgugugcagcggccuggugggcgacacccccagaaagaacgacagcuucagcagcagccacugccuggaccccaacaacgaggagggcggccacggcgugaagggcugggccuucgacgacggcaacaacguguggaugggcagaaccaucagcgagaagcugagaagcggcuacgagaccuucaaggugaucgagggcuggagcaagcccaacagcaagcugcagaccaacagacaggugaucguggagagaggcaacagaagcggcuacagcggcaucuucagcguggagggcaagagcugcaucaacagaugcuucuacguggagcugaucagaggcagaaaggaggagaccgaggugugguggaccagcaacagcaucgugguguucugcggcaccagcggcaccuacggcaccggcagcuggcccgacggcgccgacaucaaccugaugcccaucuga

SEQ ID NO: 174289 - RNA, 1410 nt, Artificial Sequence
  derived and/or modified CDS sequence (opt4) from neuraminidase__InfluenzaA__AAY27997
augaaccccaaccagaagaucaucaccaucggcagcgugagccugaccaucgccaccaucugcuuccugaugcagaucgccauccuggugaccaccgugacccugcacuucaagcagcacgagugcaacagcccccccaacaaccaggugaugcugugcgagcccaccaucaucgagagaaacaucaccgagaucguguaccugaccaacaccaccaucgagaaggagaucugccccaagcuggccgaguacagaaacuggagcaagccccagugcaacaucaccggcuucgcccccuucagcaaggacaacagcaucagacugagcgccggcggcgacaucugggugaccagagagcccuacgugagcugcgaccccgacaagugcuaccaguucgcccugggccagggcaccacccugaacaacggccacagcaacaacaccgugcacgacagaacccccuacagaacccugcugaugaacgagaugggcgugcccuuccaccugggcaccagacaggugugcaucgccuggagcagcagcagcugccacgacggcaaggccuggcugcacgugugcgugaccggcgacgacaagaacgccaccgccagcuucaucuacaacggcagacugguggacagcaucggcagcuggagcaagaagauccugagaacccaggagagcgagugcgugugcaucaacggcaccugcaccguggugaugaccgacggcagcgccagcggcaaggccgacaccaagauccuguucaucgaggagggcaagaucgugcacaucagcacccugagcggcagcgcccagcacguggaggagugcagcugcuaccccagauaccccggcgugagaugcgugugcagagacaacuggaagggcagcaacagacccaucguggacaucaacgugaaggacuacagcaucgugagcagcuacgugugcagcggccuggugggcgacacccccagaaagaacgacagcuucagcagcagccacugccuggaccccaacaacgaggagggcggccacggcgugaagggcugggccuucgacgacggcaacgacguguggaugggcagaaccaucagcgagaagcugagaagcggcuacgagaccuucaaggugaucgagggcuggagcaagcccaacagcaagcugcagaucaacagacaggugaucguggagagaggcaacagaagcggcuacagcggcaucuucagcguggagggcaagagcugcaucaacagaugcuucuacguggagcugaucagaggcagaaaggaggagaccgaggugugguggaccagcaacagcaucgugguguucugcggcaccagcggcaccuacggcaccggcagcuggcccgacggcgccgacaucaaccugaugcccaucuga

SEQ ID NO: 174290 - RNA, 1410 nt, Artificial Sequence; identical to SEQ ID NO: 174195
  derived and/or modified CDS sequence (opt4) from neuraminidase__InfluenzaA__AAY28007

SEQ ID NO: 174291 - RNA, 1410 nt, Artificial Sequence; identical to SEQ ID NO: 174240
  derived and/or modified CDS sequence (opt4) from neuraminidase__InfluenzaA__AAY28017

SEQ ID NO: 174292 - RNA, 1410 nt, Artificial Sequence; identical to SEQ ID NO: 174195
  derived and/or modified CDS sequence (opt4) from neuraminidase__InfluenzaA__AAY28268

SEQ ID NO: 174293 - RNA, 1410 nt, Artificial Sequence
  derived and/or modified CDS sequence (opt4) from neuraminidase__InfluenzaA__AAY28278
augaaccccaaccagaagaucaucaccaucggcagcgugagccugaccaucgccaccaucugcuuccugaugcagaucgccauccuggugaccaccgugacccugcacuucaagcaguacgagugcaacagcccccccaacaaccaggugaugcugugcgagcccaccaucaucgagagaaacaucaccgagaucguguaccugaccaacaccaccaucgagaaggagaucugccccaagcuggccgaguacagaaacuggagcaagccccagugcaagaucaccggcuucgcccccuucagcaaggacaacagcaucagacugagcgccggcggcgacaucugggugaccagagagcccuacgugagcugcgaccccgacaagugcuaccaguucgcccugggccagggcaccacccugaacaacagacacagcaacgacaccgugcacgacagaacccccuacagaacccugcugaugaacgagcugggcgugcccuuccaccugggcaccaagcaggugugcaucgccuggagcagcagcagcugccacgacggcaaggccuggcugcacgugugcgugaccggccacgacgagaacgccaccgccagcuucaucuacgacggcagacugguggacagcaucggcagcuggagcaagaagauccugagaacccaggagagcgagugcgugugcaucaacggcaccugcaccguggugaugaccgacggcagcgccagcggcagagccgacaccaagauccuguucaucgaggagggcaagaucgugcacaccagcaagcugagcggcagcgcccagcacguggaggagugcagcugcuaccccagauaccccggcgugagaugcgugugcagagacaacuggaagggcagcaacagacccaucguggacaucaacgugaaggacuacagcaucgugagcagcuacgugugcagcggccuggugggcgacacccccagaaagaacgacagcagcagcagcagccacugccuggaccccaacaacgaggagggcggccacggcgugaagggcugggccuucgacgacggcaacgacguguggaugggcagaaccaucagcgagaagagcagaagcggcuacgagaccuucaaggugaucgagggcuggagcaagcccaacagcaagcugcagaucaacagacaggugaucguggagagaggcaacagaagcggcuacagcggcaucuucagcguggagggcaagagcugcaucaacagaugcuucuacguggagcugaucagaggcagaaagcccgagaccgaggugugguggaccagcaacagcaucgugguguucugcggcaccagcggcaccuacggcaccggcagcuggcccgacggcgccgacaucaaccugaugcccaucuga

SEQ ID NO: 174294 - RNA, 1410 nt, Artificial Sequence; identical to SEQ ID NO: 174209
  derived and/or modified CDS sequence (opt4) from neuraminidase__InfluenzaA__AAY28288

SEQ ID NO: 174295 - RNA, 1410 nt, Artificial Sequence
  derived and/or modified CDS sequence (opt4) from neuraminidase__InfluenzaA__AAY28298
augaaccccaaccagaagaucaucaccaucggcagcgugagccugaccaucgccaccaucugcuuccugaugcagaucgccauccuggugaccaccgugacccugcacuucaagcagcacgagugcaacagcccccccaacaaccaggugaugcugugcgagcccaccaucaucgagagaaacaucaccgagaucguguaccugaccaacaccaccaucgagaaggagaucugccccaagcuggccgaguacagaaacuggagcaagccccagugcaacaucaccggcuucgcccccuucagcaaggacaacagcaucagacugagcgccggcggcgacaucugggugaccagagagcccuacgugagcugcgaccccgacaagugcuaccaguucgcccugggccagggcaccacccugaacaacggccacagcaacgacaccgugcacgacagaacccccuacagaacccugcugaugaacgagcugggcgugcccuuccaccugggcaccagacaggugugcaucgccuggagcagcagcagcugccacgacggcaaggccuggcugcacgugugcgugaccggcgacgacaagaacgccaccgccagcuucaucuacaacggcagacugguggacagcaucggcagcuggagcaagaagauccugagaacccaggagagcgagugcgugugcaucaacggcaccugcaccguggugaugaccgacggcagcgccagcggcaaggccgacaccaagauccuguucaucgaggagggcaagaucgugcacaucagcacccugagcggcagcgcccagcacguggaggagugcagcugcuaccccagauaccccggcgugagaugcgugugcagagacaacuggaagggcagcaacagacccaucguggacaucaacgugaaggacuacagcaucgugagcagcuacgugugcagcggccuggugggcgacacccccagaaagaacgacagcagcagcagcagccacugccuggaccccaacaacgaggagggcggccacggcgugaagggcugggccuucgacgacggcaacgacguguggaugggcagaaccaucagcgagaagcugagaagcggcuacgagaccuucaaggugaucgagggcuggagcagacccaacagcaagcugcagaucaacagacaggugaucguggagagaggcaacagaagcggcuacagcggcaucuucagcguggagggcaagagcugcaucaacagaugcuucuacguggagcugaucagaggcagaaaggaggagaccgaggugugguggaccagcaacagcaucgugguguucugcggcaccagcggcaccuacggcaccggcagcuggcccgacggcgccgacaucaaccugaugcccaucuga

SEQ ID NO: 174296 - RNA, 1410 nt, Artificial Sequence; identical to SEQ ID NO: 174226
  derived and/or modified CDS sequence (opt4) from neuraminidase__InfluenzaA__AAY28308

SEQ ID NO: 174297 - RNA, 1410 nt, Artificial Sequence
  derived and/or modified CDS sequence (opt4) from neuraminidase__InfluenzaA__AAY28318
augaaccccaaccagaagaucaucaccaucggcagcgugagccugaccaucgccaccaucugcuuccugaugcagaucgccauccuggugaccaccgugacccugcacuucaagcaguacgagugcaacagcccccccaacaaccaggugaugcugugcgagcccaccaucaucgagagaaacaucaccgagaucguguaccugaccaacaccaccaucgagaaggagaucugccccaagcuggccgaguacagaaacuggagcaagccccagugcaacaucaccggcuucgcccccuucagcaaggacaacagcaucagacugagcgccggcggcgacaucugggugaccagagagcccuacgugagcugcgaccccgacaagugcuaccaguucgcccugggccagggcaccacccugaacaacggccacagcaacgacaccgugcacgacagaacccccuacagaacccugcugaugaacgagcugggcgugcccuuccaccugggcaccagacaggugugcaucgccuggagcagcagcagcugccacgacggcaaggccuggcugcacgugugcgugaccggcgacgacgagaacgccaccgccagcuucaucuacaacggcagacugguggacagcaucggcagcuggagcaagaagauccugagaacccaggagagcgagugcgugugcaucaacggcaccugcgccguggugaugaccgacggcagcgccagcggcaaggccgacaccaagauccuguucaucgaggagggcaagaucgugcacaucagcacccugagcggcagcgcccagcacguggaggagugcagcugcuaccccagauaccccggcgugagaugcgugugcagagacaacuggaagggcagcaacagacccaucguggacaucaacgugaaggacuacagcaucgugagcagcuacgugugcagcggccuggugggcgacacccccagaaagaacgacagcuucagcagcagccacugccuggaccccaacaacgaggagggcggccacggcgugaagggcugggccuucgacgacggcaacgacguguggaugggcagaaccaucagcgagaagcugagaagcggcuacgagaccuucaaggugaucgagggcuggagcaagcccaacagcaagcugcagaccaacagacaggugaucguggagagaggcaacagaagcggcuacagcggcaucuucagcguggagggcaagagcugcaucaacagaugcuucuacguggagcugaucagaggcagaaaggaggagaccgaggugugguggaccagcaacagcaucgugguguucugcggcaccagcggcaccuacggcaccggcagcuggcccgacggcgccgacaucaaccugaugcccaucuga

SEQ ID NO: 174298 - RNA, 1410 nt, Artificial Sequence
  derived and/or modified CDS sequence (opt4) from neuraminidase__InfluenzaA__AAY28338
augaaccccaaccagaagaucaucaccaucggcagcgugagccugaccaucgccaccaucugcuuccugaugcagaucgccauccuggugaccaccgugacccugcacuucaagcaguacgagugcaacagcccccccaacaaccaggugaugcugugcgagcccgccaucaucgagagaaacaucaccgagaucguguaccugaccaacaccaccaucgagaaggagaucagacccaagcuggccgaguacagaaacuggagcaagccccagugcaacaucaccggcuucgcccccuucagcaaggacaacagcaucagacugagcgccggcggcgacaucugggugaccagagagcccuacgugagcugcgaccccgacaagugcuaccaguucgcccugggccagggcaccacccugaacaacggccacagcaacgacaccgugcacgacagaacccccuacagaacccugcugaugaacgagcugggcgugcccuuccaccugggcaccagacaggugugcaucgccuggagcagcagcagcugccacgacggcaaggccuggcugcacgugugcgugaccggcgacgacgagaacgccaccgccagcuucaucuacaacggcagacugguggacagcaucggcagcuggagcaagaagauccugagaacccaggagagcgagugcgugugcaucaacggcaccugcaccguggugaugaccgacggcagcgccagcggcaaggccgacaccaagauccuguucaucgaggagggcaagaucgugaacaucagcacccugagcggcagcgcccagcacguggaggagugcagcugcuaccccagauaccccggcgugagaugcgugugcagagacaacuggaagggcagcaacagacccaucguggacaucaacgugaaggacuacagcaucgugagcagcuacgugugcagcggccuggugggcgacacccccagaaagaacgacagcuucagcagcagccacugccuggaccccaacaacgaggagggcggccacggcgugaagggcugggccuucgacgacggcaacgacguguggaugggcagaaccaucagcgagaagcugagaagcggcuacgagaccuucaaggugaucgagggcuggagcaagcccaacagcaagcugcagaucaacagacaggugaucguggagagaggcaacagaagcggcuacagcggcaucuucagcguggagggcaagagcugcaucaacagaugcuucuacguggagcugaucagaggcagaaaggaggagaccgaggugugguggaccagcaacagcaucgugguguucugcggcaccagcggcaccuacggcaccggcagcuggcccgacggcgccgacaucaaccugaugcccaucuga

SEQ ID NO: 174299 - RNA, 1410 nt, Artificial Sequence; identical to SEQ ID NO: 174205
  derived and/or modified CDS sequence (opt4) from neuraminidase__InfluenzaA__AAY28348

SEQ ID NO: 174300 - RNA, 1410 nt, Artificial Sequence; identical to SEQ ID NO: 174121
  derived and/or modified CDS sequence (opt4) from neuraminidase__InfluenzaA__AAY28358

SEQ ID NO: 174301 - RNA, 1410 nt, Artificial Sequence; identical to SEQ ID NO: 174205
  derived and/or modified CDS sequence (opt4) from neuraminidase__InfluenzaA__AAY28388

SEQ ID NO: 174302 - RNA, 1410 nt, Artificial Sequence; identical to SEQ ID NO: 174210
  derived and/or modified CDS sequence (opt4) from neuraminidase__InfluenzaA__AAY28398

SEQ ID NO: 174303 - RNA, 1410 nt, Artificial Sequence; identical to SEQ ID NO: 174224
  derived and/or modified CDS sequence (opt4) from neuraminidase__InfluenzaA__AAY28408

SEQ ID NO: 174304 - RNA, 1410 nt, Artificial Sequence; identical to SEQ ID NO: 174197
  derived and/or modified CDS sequence (opt4) from neuraminidase__InfluenzaA__AAY28505

SEQ ID NO: 174305 - RNA, 1410 nt, Artificial Sequence
  derived and/or modified CDS sequence (opt4) from neuraminidase__InfluenzaA__AAY28524
augaaccccaaccagaagaucaucaccaucggcagcgugagccugaccaucgccaccaucugcuuccugaugcagaucgccauccuggugaccaccgugacccugcacuucaagcagcacgagugcaacagcccccccaacaaccaggugaugcugugcgagcccaccaucaucgagagaaacaucaccgagaucguguaccugaccaacaccaccaucgagaaggagaucugccccaagcuggccgaguacagaaacuggagcaagccccagugcaacaucaccggcuucgcccccuucagcaaggacaacagcaucagacugagcgccggcggcgacaucugggugaccagagagcccuacgugagcugcgaccccgacaagugcuaccaguucgcccugggccagggcaccacccugaacaacggccacagcaacuacaccgugcacgacagaacccccuacagaacccugcugaugaacgagcugggcgugcccuuccaccugggcaccagacaggugugcaucgccuggagcagcagcagcugccacgacggcaaggccuggcugcacgugugcgugaccggcgacgacaagaacgccaccgccagcuucaucuacaacggcagacugguggacagcaucggcagcuggagcaagaagauccugagaacccaggagagcgagugcgugugcaucaacggcaccugcaccguggugaugaccgacggcagcgccagcggcaaggccgacaccaagauccuguucaucgaggagggcaagaucgugcacaucagcacccugagcggcagcgcccagcacguggaggagugcagcugcuaccccagauaccccggcgugagaugcgugugcagagacaacuggaagggcagcaacagacccaucguggacaucaacgugaaggacuacagcaucgugagcagcuacgugugcagcggccuggugggcgacacccccagaaagaacgacagcagcagcagcagccacugccuggaccccaacaacgaggagggcggccacggcgugaagggcugggccuucgacgacggcaacgacguguggaugggcagaaccaucagcgagaagcugagaagcggcuacgagaccuucaaggugaucgagggcuggagcaagcccaacagcaagcugcagaucaacagacaggugaucguggagagaggcaacagaagcggcuacagcggcaucuucagcguggagggcaagagcugcaucaacagaugcuucuacguggagcugaucagaggcagaaaggaggagaccgaggugugguggaccagcaacagcaucgugguguucugcggcaccagcggcaccuacggcaccggcagcuggcccgacggcgccgacaucaaccugaugcccaucuga

SEQ ID NO: 174306 - RNA, 1410 nt, Artificial Sequence; identical to SEQ ID NO: 174195
  derived and/or modified CDS sequence (opt4) from neuraminidase__InfluenzaA__AAY28534

SEQ ID NO: 174307 - RNA, 1410 nt, Artificial Sequence
  derived and/or modified CDS sequence (opt4) from neuraminidase__InfluenzaA__AAY28544
augaaccccaaccagaagaucaucaccaucggcagcgugagccugaccaucgccaccaucugcuuccugaugcagaucgccauccuggugaccaccgugacccugcacuucaagcagcacgagugcaacagcccccccaacaaccaggugaugcugugcgagcccaccaucaucgagagaaacaucaccgagaucguguaccugaccaacaccaccaucgagaaggagaucugccccaagcuggccgaguacagaaacuggagcaagccccagugcaacaucaccggcuucgcccccuucagcaaggacaacagcaucagacugagcgccggcggcgacaucugggugaccagagagcccuacgugagcugcgaccccaacaagugcuaccaguucgcccugggccagggcaccacccugaacaacggccacagcaacgacaccgugcacgacagaacccccuacagaacccugcugaugaacgagcugggcgugcccuuccaccugggcaccagacaggugugcaucgccuggagcagcagcagcugccacgacggcaaggccuggcugcacgugugcgugaccggcgacgacaagaacgccaccgccagcuucaucuacaacggcagacugguggacagcaucggcagcuggagcaagaagauccugagaacccaggagagcgagugcgugugcaucaacggcaccugcaccguggugaugaccgacggcagcgccagcggcaaggccgacaccaagauccuguucaucgaggagggcaagaucgugcacaucagcacccugagcggcagcgcccagcacguggaggagugcagcugcuaccccagauaccccggcgugagaugcgugugcagagacaacuggaagggcagcaacagacccaucguggacaucaacgugaaggacuacagcaucgugagcagcuacgugugcagcggccuggugggcgacacccccagaaagaacgacagcuucagcagcagccacugccuggaccccaacaacgaggagggcggccacggcgugaagggcugggccuucgacgacggcaacgacguguggaugggcagaaccaucagcgagaagcugagaagcggcuacgagaccuucaaggugaucgagggcuggagcaagcccaacagcaagcugcagaucaacagacaggugaucguggagagaggcaacagaagcggcuacagcggcaucuucagcguggagggcaagagcugcaucaacagaugcuucuacguggagcugaucagaggcagaaaggaggagaccgaggugugguggaccagcaacagcaucgugguguucugcggcaccagcggcaccuacggcaccggcagcuggcccgacggcgccgacaucaaccugaugcccaucuga

SEQ ID NO: 174308 - RNA, 1410 nt, Artificial Sequence; identical to SEQ ID NO: 174121
  derived and/or modified CDS sequence (opt4) from neuraminidase__InfluenzaA__AAY28554

SEQ ID NO: 174309 - RNA, 1410 nt, Artificial Sequence
  derived and/or modified CDS sequence (opt4) from neuraminidase__InfluenzaA__AAY28564
augaaccccaaccagaagaucaucaccaucggcagcgugagccugaccaucgccaccaucugcuuccugaugcagaucgccauccuggugaccaccgugacccugcacuucaagcagcacgagugcaacagcccccccaacaaccaggugaugcugugcgagcccaccaucaucgagagaaacaucaccgagaucguguaccugaccaacaccaccaucgagaaggagaucugccccaagcuggccgaguacagaaacuggagcaagccccagugcaacaucaccggcuucgcccccuucagcaaggacaacagcaucagacugagcgccggcggcgacaucugggugaccagagagcccuacgugagcugcgaccccgacaagugcuaccaguucgcccugggccagggcaccacccugaacaacggccacagcaacgacaccgugcacgacagaacccccuacagaacccugcugaugaacgagcugggcgugcccuuccaccugggcaccagacaggugugcaucgccuggagcagcagcagcugccacgacggcaaggccuggcugcacgugugcgugaccggcgacgacaagaacgccaccgccagcuucaucuacaacggcagacugguggacagcaucggcagcuggagcaagaagauccugagaacccaggagagcgagugcgugugcaucaacggcaccugcaccguggugaugaccgacggcagcgccagcggcaaggccgacaccaagauccuguucaucgaggagggcaagaucgugcacaucagcacccugagcggcagcgcccagcacguggaggagugcagcugcuaccccagauaccccggcgugagaugcgugugcagagacaacuggaagggcagcaacagacccaucguggacaucaacgugaaggacuacagcaucgugagcagcuacgugugcagcggccuggugggcgacacccccagaaagaacgacagcagcagcagcagccacugccuggaccccaacaacgaggagggcggccacggcgugaagggcugggccuucgacgacggcaacgacguguggaugggcagaaccaucagcgagaagcugagaagcggcuacgagaccuucaaggugaucgagggcuggagcagacccaacagcaagcugcagaucaacagacaggugaucguggagagaggcaacagaagcggcuacagcggcaucuucagcguggagagcaagagcugcaucaacagaugcuucuacguggagcugaucagaggcagaaaggaggagaccgaggugugguggaccagcaacagcaucgugguguucugcggcaccagcggcaccuacggcaccggcagcuggcccgacggcgccgacaucaaccugaugcccaucuga

SEQ ID NO: 174310 - RNA, 1410 nt, Artificial Sequence; identical to SEQ ID NO: 174195
  derived and/or modified CDS sequence (opt4) from neuraminidase__InfluenzaA__AAY28574

SEQ ID NO: 174311 - RNA, 1410 nt, Artificial Sequence; identical to SEQ ID NO: 174209
  derived and/or modified CDS sequence (opt4) from neuraminidase__InfluenzaA__AAY28584

SEQ ID NO: 174312 - RNA, 1410 nt, Artificial Sequence; identical to SEQ ID NO: 174121
  derived and/or modified CDS sequence (opt4) from neuraminidase__InfluenzaA__AAY28594

SEQ ID NO: 174313 - RNA, 1410 nt, Artificial Sequence
  derived and/or modified CDS sequence (opt4) from neuraminidase__InfluenzaA__AAY28611
augaaccccaaccagaagaucaucaccaucggcagcgugagccugaccaucgccaccaucugcuuccugaugcagaucgccauccuggugaccaccgugacccugcacuucaagcaguacgagugcaacagcccccccaacaaccaggugaugcugugcgagcccaccaucaucgagagaaacaucaccgagaucguguaccugaccaacaccaccaucgagaaggagaucugccccaagcuggccgaguacagaaacuggagcaagccccagugcaacaucaccggcuucgcccccuucagcaaggacaacagcaucagacugagcgccggcggcgacaucugggugaccagagagcccuacgugagcugcgaccccgacaagugcuaccaguucgcccugggccagggcaccacccugaacaacggccacagcaacgacaccgugcacgacagaacccccuacagaacccugcugaugaacgagcugggcgugcccuuccaccugggcaccaagcaggugugcaucgccuggagcagcagcagcugccacgacggcaaggccuggcugcacgugugcgugaccggcgacgacgagaacgccaccgccagcuucaucuacaacggcagacugguggacagcaucggcagcuggagcaagaagauccugagaacccaggagagcgagugcgugugcaucaacggcaccugcaccguggugaugaccgacggcagcgccagcggcaaggccgacaccaagauccuguucaucgaggagggcaagaucgugcacaccagcagccugagcggcagcgcccagcacguggaggagugcagcugcuaccccagauaccccggcgugagaugcgugugcagagacaacuggaagggcagcaacagacccaucguggacaucaacgugaaggacuacagcaucgugagcagcuacgugugcagcggccuggugggcgacacccccagaaagaacgacagcagcagcagcagccacugccuggaccccaacaacgaggagggcggccacggcgugaagggcugggccuucgacgacggcaacgacguguggaugggcagaaccaucagcgagaagcugagaagcggcuacgagaccuucaaggugaucgagggcuggagcaagcccaacagcaagcugcagaucaacagacaggugaucguggacagaggcaacagaagcggcuacagcggcaucuucagcguggagggcaagagcugcaucaacagaugcuucuacguggagcugaucagaggcagaaagcaggagaccgaggugcuguggaccagcaacagcaucgugguguucugcggcaccagcggcaccuacggcaccggcagcuggcccgacggcgccgacaucaaccugaugcccaucuga

SEQ ID NO: 174314 - RNA, 1410 nt, Artificial Sequence; identical to SEQ ID NO: 174226
  derived and/or modified CDS sequence (opt4) from neuraminidase__InfluenzaA__AAY28651

SEQ ID NO: 174315 - RNA, 1410 nt, Artificial Sequence
  derived and/or modified CDS sequence (opt4) from neuraminidase__InfluenzaA__AAY44613
augaaccccaaccagaagaucaucaccaucggcagcgugagccugaccaucgccaccaucugcuuccugaugcagaucgccauccuggugaccaccgugacccugcacuucaagcagcacgagugcaacagcccccccaacaaccaggugaugcugugcgagcccaccaucaucgagagaaacaucaccgagaucguguaccugaccaacaccaccaucgagaaggagaucugccccaagaucgccgaguacagaaacuggagcaagccccagugcaacaucaccggcuucgcccccuucagcaaggacaacagcaucagacugagcgccggcggcgacaucugggugaccagagagcccuacgugagcugcgaccccgacaagugcuaccaguucgcccugggccagggcaccacccugaacaacggccacagcaacgacaccgugcacgacagaacccccuacagaacccugcugaugaacgagcugggcgugcccuuccaccugggcaccagacaggugugcaucgccuggagcagcagcagcugccacgacggcaaggccuggcugcacgugugcgugaccggcgacgacaagaacgccaccgccagcuucaucuacaacggcagacugguggacagcaucggcagcuggagcaagaagauccugagaacccaggagagcgagugcgugugcaucaacggcaccugcaccguggugaugaccgacggcagcgccagcggcaaggccgacaccaagauccuguucaucgaggagggcaagaucgugcacaucagcacccugagcggcagcgcccagcacguggaggagugcagcugcuaccccagauaccccggcgugagaugcgugugcagagacaacuggaagggcagcaacagacccaucguggacaucaacgugaaggacuacagcaucgugagcagcuacgugugcagcggccuggugggcgacacccccagaaagaacgacagcagcagcagcagccacugccuggaccccaacaacgaggagggcggccacggcgugaagggcugggccuucgacgacggcaacgacguguggaugggcagaaccaucagcgagaagcugagaagcggcuacgagaccuucaaggugaucgagggcuggagcaagcccaacagcaagcugcagaucaacagacaggugaucguggagagaggcaacagaagcggcuacagcggcaucuucagcguggagggcaagagcugcaucaacagaugcuucuacguggagcugaucagaggcagaaaggaggagaccgaggugugguggaccagcaacagcaucgugguguucugcggcaccagcggcaccuacggcaccggcagcuggcccgacggcgccgacaucaaccugaugcccaucuga

SEQ ID NO: 174316 - RNA, 1410 nt, Artificial Sequence; identical to SEQ ID NO: 174209
  derived and/or modified CDS sequence (opt4) from neuraminidase__InfluenzaA__AAY44624

SEQ ID NO: 174317 - RNA, 1410 nt, Artificial Sequence; identical to SEQ ID NO: 174231
  derived and/or modified CDS sequence (opt4) from neuraminidase__InfluenzaA__AAY44634

SEQ ID NO: 174318 - RNA, 1410 nt, Artificial Sequence; identical to SEQ ID NO: 174224
  derived and/or modified CDS sequence (opt4) from neuraminidase__InfluenzaA__AAY44644

SEQ ID NO: 174319 - RNA, 1410 nt, Artificial Sequence
  derived and/or modified CDS sequence (opt4) from neuraminidase__InfluenzaA__AAY44654
augaaccccaaccagaagaucaucaccaucggcagcgugagccugaccaucgccaccaucugcuuccugaugcagaucgccauccuggugaccaccgugacccugcacuucaagcaguacgagugcaacagcccccccaacaaccaggugaugcugugcgagcccaccaucaucgagagaaacaucaccgagaucguguaccugaccaacaccaccaucgagaaggagaucugccccaagcuggccgaguacagaaacuggagcaagccccagugcaacaucaccggcuucgcccccuucagcaaggacaacagcaucagacugagcgccggcggcgacaucugggugaccagagagcccuacgugagcugcgaccccgacaagugcuaccaguucgcccugggccagggcaccacccugaacaacggccacagcaacgacaccgugcacgacagaacccccuacagaacccugcugaugaacgagcugggcgugcccuuccaccugggcaccaagcaggugugcaucgccuggagcagcagcagcugccacgacggcaaggccuggcugcacgugugcgugaccggcgacgacgagaacgccaccgccagcuucaucuacaacggcagacugguggacagcaucggcagcuggagcaagaagauccugagaacccaggagagcgagugcgugugcaucaacggcaccugcaccguggugaugaccgacggcagcgccagcggcaaggccgacaccaagauccuguucaucgaggagggcaagaucgugcacaccagcagccugagcggcagcgcccagcacguggaggagugcagcugcuaccccagauaccccggcgugagaugcgugugcagagacaacuggaagggcagcaacagacccaucguggacaucaacgugaaggacuacagcaucgugagcagcuacgugugcagcggccuggugggcgacacccccagaaagaacgacagcagcagcagcagccacugccuggaccccaacaacgaggagggcggccacggcgugaagggcugggccuucgacgacggcaacgacguguggaugggcagaaccaucagcgagaagcugagaagcggcuacgagaccuucaaggugaucgagggcuggagcaagcccaacagcaagcugcagauccacagacaggugaucguggacagaggcaacagaagcggcuacagcggcaucuucagcguggagggcaagagcugcaucaacagaugcuucuacguggagcugaucagaggcagaaagcaggagaccgaggugcuguggaccagcaacagcaucgugguguucugcggcaccagcggcaccuacggcaccggcagcuggcccgacggcgccgacaucaaccugaugcccaucuga

SEQ ID NO: 174320 - RNA, 1410 nt, Artificial Sequence
  derived and/or modified CDS sequence (opt4) from neuraminidase__InfluenzaA__AAY44758
augaaccccaaccagaagaucaucaccaucggcagcgugagccugaccaucgccaccaucugcuuccugaugcagaucgccauccuggugaccaccgugacccugcacuucaagcaguacgagugcaacagccccagcaacaaccaggugaugcugugcgagcccaccaucaucgagagaaacaucaccgagaucguguaccugaccaacaccaccaucgagaaggagaucugccccaagcuggccgaguacagaaacuggagcaagccccagugcaagaucaccggcuucgcccccuucagcaaggacaacagcaucagacugagcgccggcggcgacaucugggugaccagagagcccuacgugagcugcgaccccgacaagugcuaccaguucgcccugggccagggcaccacccugaacaacagacacagcaacgacaccgugcacgacagaacccccuacagaacccugcugaugaacgagcugggcgugcccuuccaccugggcaccaagcaggugugcaucgccuggagcagcagcagcugccacgacggcaaggccuggcugcacgugugcgugaccggccacgacgagaacgccaccgccagcuucaucuacgacggcagacugguggacagcaucggcagcuggagcaagaagauccugagaacccaggagagcgagugcgugugcaucaacggcaccugcaccguggugaugaccgacggcagcgccagcggcagagccgacaccaagauccuguucaucgaggagggcaagaucgugcacaccagcaagcugagcggcagcgcccagcacguggaggagugcagcugcuaccccagauaccccggcgugagaugcgugugcagagacaacuggaagggcagcaacagacccaucguggacaucaacgugaaggacuacagcaucgugagcagcuacgugugcagcggccuggugggcgacacccccagaaagaacgacagcagcagcagcagccacugccuggaccccaacaacgaggagggcggccacggcgugaagggcugggccuucgacgacggcaacgacguguggaugggcagaaccaucagcgagaagagcagaagcggcuacgagaccuucaaggugaucgagggcuggagcaagcccaacagcaagcugcagaucaacagacaggugaucguggagagaggcaacagaagcggcuacagcggcaucuucagcguggagggcaagagcugcaucaacagaugcuucuacguggagcugaucagaggcagaaagcccgagaccgaggugugguggaccagcaacagcaucgugguguucugcggcaccagcggcaccuacggcaccggcagcuggcccgacggcgccgacaucaaccugaugcccaucuga

SEQ ID NO: 174321 - RNA, 1410 nt, Artificial Sequence; identical to SEQ ID NO: 174121
  derived and/or modified CDS sequence (opt4) from neuraminidase__InfluenzaA__AAY44778

SEQ ID NO: 174322 - RNA, 1410 nt, Artificial Sequence
  derived and/or modified CDS sequence (opt4) from neuraminidase__InfluenzaA__AAY44788
augaaccccaaccagaagaucaucaccaucggcagcgugagccugaccaucgccaccaucugcuuccugaugcagaucgccauccuggugaccaccgugacccugcacuucaagcaguacgagugcaacagcccccccaacaaccaggugaugcugugcgagcccaccaucaucgagagaaacaucaccgagaucguguaccugaccaacaccaccaucgagaaggagaucugccccaagcuggccgaguacagaaacuggagcaagccccagugcaacaucaccggcuucgcccccuucagcaaggacaacagcaucagacugagcgccggcggcgacaucugggugaccagagagcccuacgugagcugcgaccccgacaagugcuaccaguucgcccugggccagggcaccacccugaacaacggccacagcaacgacaccgugcacgacagaacccccuacagaacccugcugaugaacgagcugggcgugcccuuccaccugggcaccaagcaggugugcaucgccuggagcagcagcagcugccacgacggcaaggccuggcugcacgugugcgugaccggcgacgacgagaacgccaccgccagcuucaucuacaacggcagacugguggacagcaucggcagcuggagcaagaagauccugagaacccaggagagcgagugcgugugcaucaacggcaccugcaccguggugaugaccgacggcagcgccagcggcaaggccgacaccaagauccuguucaucgaggagggcaagaucgugcacaccagccugcugagcggcagcgcccagcacguggaggagugcagcugcuaccccagauaccccggcgugagaugcgugugcagagacaacuggaagggcagcaacagacccaucguggacaucaacgugaaggacuacagcaucgugagcagcuacgugugcagcggccuggugggcgacacccccagaaagaacgacagcagcagcagcagccacugccuggaccccaacaacgaggagggcggccacggcgugaagggcugggccuucgacgacggcaacgacguguggaugggcagaaccaucagcgagaagcugagaagcggcuacgagaucuucaaggugaucgagggcuggagcaagcccaacagcaagcugcagaucaacagacaggugaucguggacagaggcaacagaagcggcuacagcggcaucuucagcguggagggcaagagcugcaucaacagaugcuucuacguggagcugaucagaggcagaaagcaggagaccgaggugcuguggaccagcaacagcaucgugguguucugcggcaccagcggcaccuacggcaccggcagcuggcccgacggcgccgacaucaaccugaugcccaucuga

SEQ ID NO: 174323 - RNA, 1410 nt, Artificial Sequence; identical to SEQ ID NO: 174197
  derived and/or modified CDS sequence (opt4) from neuraminidase__InfluenzaA__AAY44909

SEQ ID NO: 174324 - RNA, 1410 nt, Artificial Sequence; identical to SEQ ID NO: 174224
  derived and/or modified CDS sequence (opt4) from neuraminidase__InfluenzaA__AAY45649

SEQ ID NO: 174325 - RNA, 1410 nt, Artificial Sequence
  derived and/or modified CDS sequence (opt4) from neuraminidase__InfluenzaA__AAY46374
augaaccccaaccagaagaucaucaccaucggcagcgugagccugaccaucgccaccaucugcuuccugaugcagaucgccauccuggugaccaccgugacccugcacuucaagcaguacgagugcaacagcccccccaacaaccaggugaugcugugcgagcccaccaucaucgagagaaacaucaccgagaucguguaccugaccaacaccaccaucgagaaggagaucugccccaagcuggccgaguacagaaacuggagcaagccccagugcaagaucaccggcuucgcccccuucagcaaggacaacagcaucagacugagcgccggcggcgacaucugggugaccagagagcccuacgugagcugcgaccccuacaagugcuaccaguucgcccugggccagggcaccacccugaacaacagacacagcaacgacaccgugcacgacagaacccccuacagaacccugcugaugaacgagcugggcgugcccuuccaccugggcaccaagcaggugugcaucgccuggagcagcagcagcugccacgacggcaaggccuggcugcacgugugcgugaccggccacgacgagaacgccaccgccagcuucaucuacgacggcagacugguggacagcaucggcagcuggagcaagaagauccugagaacccaggagagcgagugcgugugcaucaacggcaccugcaccguggugaugaccgacggcagcgccagcggcagagccgacaccaagauccuguucaucgaggagggcaagaucgugcacaccagcaagcugagcggcagcgcccagcacguggaggagugcagcugcuaccccagauaccccggcgugagaugcgugugcagagacaacuggaagggcagcaacagacccaucguggacaucaacgugaaggacuacagcaucgugagcagcuacgugugcagcggccuggugggcgacacccccagaaagaacgacagcagcagcagcagccacugccuggaccccaacaacgaggagggcggccacggcgugaagggcugggccuucgacgacggcaacgacguguggaugggcagaaccaucagcgagaagagcagaagcggcuacgagaccuucaaggugaucgagggcuggagcaagcccaacagcaagcugcagaucaacagacaggugaucguggagagaggcaacaugagcggcuacagcggcaucuucagcguggagggcaagagcugcaucaacagaugcuucuacguggagcugaucagaggcagaaagcaggagaccgaggugugguggaccagcaacagcaucgugguguucugcggcaccagcggcaccuacggcaccggcagcuggcccgacggcgccgacaucaaccugaugcccaucuga

SEQ ID NO: 174326 - RNA, 1410 nt, Artificial Sequence
  derived and/or modified CDS sequence (opt4) from neuraminidase__InfluenzaA__AAY46384
augaaccccaaccagaagaucaucaccaucggcagcgugagccugaccaucgccaccaucugcuuccugaugcagaucgccauccuggugaccaccgugacccugcacuucaagcagcacgagugcaacagcccccccaacaaccaggugaugcugugcgagcccaccaucaucgagagaaacaucaccgagaucguguaccugaccaacaccaccaucgagaaggagaucugccccaagcuggccgaguacagaaacuggagcaagccccagugcaacaucaccggcuucgcccccuucagcaaggacaacagcaucagacugagcgccggcggcgacaucugggugaccagagagcccuacgugagcugcgaccccgacaagugcuaccaguucgcccugggccagggcaccacccugaacaacggccacagcaacgacgccgugcacgacagaacccccuacagaacccugcugaugaacgagcugggcgugcccuuccaccugggcaccagacaggugugcaucgccuggagcagcagcagcugccacgacggcaaggccuggcugcacgugugcgugaccggcgacgacaagaacgccaccgccagcuucaucuacaacggcagacugguggacagcaucggcagcuggagcaagaagauccugagaacccaggagagcgagugcgugugcaucaacggcaccugcaccguggugaugaccgacggcagcgccagcggcaaggccgacaccaagauccuguucaucgaggagggcaagaucgugcacaucagcacccugagcggcagcgcccagcacguggaggagugcagcugcuaccccagauaccccggcgugagaugcgugugcagagacaacuggaagggcagcaacagacccaucguggacaucaacgugaaggacuacagcaucgugagcagcuacgugugcagcggccuggugggcgacacccccagaaagaacgacagcuucagcagcagccacugccuggaccccaacaacgaggagggcggccacggcgugaagggcugggccuucgacgacggcaacgacguguggaugggcagaaccaucagcgagaagcugagaagcggcuacgagaccuucaaggugaucgagggcuggagcaagcccaacagcaagcugcagaucaacagacaggugaucguggagagaggcaacagaagcggcuacagcggcaucuucagcguggagggcaagagcugcaucaacagaugcuucuacguggagcugaucagaggcagaaaggaggagaccgaggugugguggaccagcaacagcaucgugguguucugcggcaccagcggcaccuacggcaccggcagcuggcccgacggcgccgacaucaaccugaugcccaucuga

SEQ ID NO: 174327 - RNA, 1410 nt, Artificial Sequence
  derived and/or modified CDS sequence (opt4) from neuraminidase__InfluenzaA__AAY46394
augaaccccaaccagaagaucaucaccaucggcagcgugagccugaccaucgccaccaucugcuuccugaugcagaucgccauccugaucaccaccgugacccugcacuucaagcaguacgagugcaacagcccccccaacaaccaggugaugcugugcgagcccaccaucaucgagagaaacaucaccgagaucguguaccugaccaacaccaccaucgagaaggagaucugccccaagcuggccgaguacagaaacuggagcaagccccagugcaacaucaccggcuucgcccccuucagcaaggacaacagcaucagacugagcgccggcggcgacaucugggugaccagagagcccuacgugagcugcgaccccgacaagugcuaccaguucgcccugggccagggcaccacccugaacaacggccacagcaacgacaccgugcacgacagaacccccuacagaacccugcugaugaacgagcugggcgugcccuuccaccugggcaccaagcaggugugcaucgccuggagcagcagcagcugccacgacggcaaggccuggcugcacgugugcgugaccggcgacgacgagaacgccaccgccagcuucaucuacaacggcagacugguggacagcaucggcagcuggagcaagaagauccugagaacccaggagagcgagugcgugugcaucaacggcaccugcaccguggugaugaccgacggcagcgccagcggcaaggccgacaccaagauccuguucaucgaggagggcaagaucgugcacaccagcagccugagcggcagcgcccagcacguggaggagugcagcugcuaccccagauaccccggcgugagaugcgugugcagagacaacuggaagggcagcaacagacccaucguggacaucaacgugaaggacuacagcaucgugagcagcuacgugugcagcggccuggugggcgacacccccagaaagaacgacagcagcagcagcagccacugccuggaccccaacaacgaggagggcggccacggcgugaagggcugggccuucgacgacggcaacgacguguggaugggcagaaccaucagcgagaagcugagaagcggcuacgagaccuucaaggugaucgagggcuggagcaagcccaacagcaagcugcagaucaacagacaggugaucguggacagaggcaacagaagcggcuacagcggcaucuucagcguggagggcaagagcugcaucaacagaugcuucuacguggagcugaucagaggcagaaagcaggagaccgaggugcuguggaccagcaacagcaucgugguguucugcggcaccagcggcaccuacggcaccggcagcuggcccgacggcgccgacaucgaccugaugcccaucuga

SEQ ID NO: 174328 - RNA, 1410 nt, Artificial Sequence
  derived and/or modified CDS sequence (opt4) from neuraminidase__InfluenzaA__AAY46419
augaaccccaaccagaagaucaucaccaucggcagcgugagccugaccaucgccaccaucugcuuccugaugcagaucgccauccuggugaccaccgugacccugcacuucaagcaguacgagugcaacagccugcccaacaaccaggugaugcugugcgagcccaccauccuggagagaaacaucaccgagaucguguaccugaccaacaccaccaucgagaaggagaucugccccaagcuggccgaguacagaaacuggagcaagccccagugcaagaucaccggcuucgcccccuucagcaaggacaacagcaucagacugagcgccggcggcgacaucugggugaccagagagcccuacgugagcugcgaccccgacaagugcuaccaguucgcccugggccagggcaccacccugaacaacagacacagcaacgacaccgugcacgacagaacccccuacagaacccugcugaugaacgagcugggcgugcccuuccaccugggcaccaagcaggugugcaucgccuggagcagcagcagcugccacgacggcaaggccuggcugcacgugugcgugaccggccacaacgagaacgccaccgccagcuucaucuacggcggcagacugguggacagcaucggcagcuggagcaagaagauccugagaacccaggagagcgagugcgugugcaucaacggcaccugcaccguggugaugaccgacggcagcgccagcggcagagccgacaccaagauccuguucaucgaggagggcaagaucauccacaucagccagcugagcggcagcgcccagcacguggaggagugcagcugcuaccccagauaccccggcgugagaugcgugugcagagacaacuggaagggcagcaacagacccaucguggacaucaacgugaaggacuacagcaucgugagcagcuacgugugcagcggccuggugggcgacacccccagaaagaacgacagcagcagcagcagccacugccugaaccccaacaacgaggagggcggccacggcgugaagggcugggccuucgacgacggcaacgacguguggaugggcagaaccaucagcgagaaguucagaagcggcuacgagaccuucaaggugaucgagggcuggagcaagcccaacagcaagcugcagaucaacagacaggugaucguggacagagacaacagaagcggcuacagcggcaucuucagcguggagggcaagagcugcaucaacagaugcuucuacguggagcugaucagaggcagaaagcaggagaccgaggugugguggaccagcaacagcaucgugguguucugcggcaccagcggcaccuacggcaccggcagcuggcccgacggcgccgacaucaaccugaugcccaucuga

SEQ ID NO: 174329 - RNA, 1410 nt, Artificial Sequence
  derived and/or modified CDS sequence (opt4) from neuraminidase__InfluenzaA__AAY47016
augaaccccaaccagaagaucaucaccaucggcagcgugagccugaccaucgccaccaucugcuuccugaugcagaucgccauccuggugaccaccgugacccugcacuucaagcaguacgagugcaacagcccccccaacaaccaggugaugcugugcgagcccaccaucaucgagagaaacaucaccgagaucguguaccugaccaacaccaccaucgagaaggagaucugccccaagcuggccgaguacagaaacuggagcaagccccagugcaacaucaccggcuucgcccccuucagcaaggacaacagcaucagacugagcgccggcggcgacaucugggugaccagagagcccuacgugagcugcgaccccgacaagugcuaccaguucgcccugggccagggcaccacccugaacaacggccacagcaacgacaccgugcacgacagaacccccuacagaacccugcugaugaacgagcugggcgugcccuuccaccugggcaccagacaggugugcaucgccuggagcagcagcagcugccacgacggcaaggccuggcugcacgugugcgugaccggcgacgacgagaacgccaccgccagcuucaucuacaacggcagacugguggacagcaucggcagcuggagcaagaagauccugagaacccaggagagcgagugcgugugcaucaacggcaccugcaccguggugaugaccgacggcagcgccagcggcaaggccgacaccaagauccuguucaucgaggagggcaagaucgugcacaucagcacccugagcggcaacgcccagcacguggaggagugcagcugcuaccccagauaccccggcgugagaugcgugugcagagacaacuggaagggcagcaacagacccaucguggacaucaacgugaaggacuacagcaucgugagcagcuacgugugcagcggccuggugggcgacacccccagaaagaacgacagcuucagcagcagccacugccuggaccccaacagcgaggagggcggccacggcgugaagggcugggccuucgacgacggcaacgacguguggaugggcagaaccaucagcgagaagcugagaagcggcuacgagaccuucaaggugaucgagggcuggagcaagcccaacagcaagcugcagaucaacagacaggugaucguggagagaggcaacagaagcggcuacagcggcaucuucagcguggagggcaagagcugcaucaacagaugcuucuacguggagcugaucagaggcagaaaggaggagaccgaggugugguggaccagcaacagcaucgugguguucugcggcaccagcggcaccuacggcaccggcagcuggcccgacggcgccgacaucaaccugaugcccaucuga

SEQ ID NO: 174330 - RNA, 1410 nt, Artificial Sequence
  derived and/or modified CDS sequence (opt4) from neuraminidase__InfluenzaA__AAY47055
augaaccccaaccagaagaucaucaccaucggcagcgugagccugaccaucgccaccaucugcuuccugaugcagaucgccauccuggugaccaccgugacccugcacuucaagcaguacgagugcaacagcccccccaacaaccaggugaugcugugcgagcccaccaucaucgagagaaacaucaccgagaucguguaccugaccaacaccaccaucgagaaggagaucugccccaagcuggccgaguacagaaacuggagcaagccccagugcaacaucaccggcuucgcccccuucagcaaggacaacagcaucagacugagcgccggcggcgacaucugggugaccagagagcccuacgugagcugcgaccccgacaagugcuaccaguucgcccugggccagggcaccacccugaacaacggccacagcaacgacaccgugcacgacagaacccccuacagaacccugcugaugaacgagcugggcgugcccuuccaccugggcaccaagcaggugugcaucgccuggagcagcagcagcugccacgacggcaaggccuggcugcacgugugcgugaccggcgacgacgagaacgccaccgccagcuucaucuacaacggcagacugguggacagcaucggcagcuggagcaagaagauccugagaacccaggagagcgagugcgugugcaucaacggcaccugcaccguggugaugaccgacggcagcgccagcggcaaggccgacaccaagauccuguucaucgaggagggcaagaucgugcacaccagccugcugagcggcagcgcccagcacguggaggagugcagcugcuaccccagauaccccggcgugagaugcgugugcagagacaacuggaagggcagcaacagacccaucguggacaucaacgugaaggacuacagcaucgugagcagcuacgugugcagcggccuggugggcgacacccccagaaagaacgacagcagcagcagcagccacugccuggaccccaacaacgaggagggcggccacggcgugaagggcugggccuucgacgacggcaacgacguguggaugggcagaaccaucagcgagaagcugagaagcggcuacgagaccuucaaggugaucgagggcuggagcaagcccaacagcaagcugcagaucaacagacaggugaucguggacagaggcaacagaagcggcuacagcggcaucuucagcguggagggcaagagcugcaucaacagaugcuucuacguggagcugaucagaggcagaaagcaggagaccgaggugcuguggaccagcaacagcaucgugguguucugcggcaccagcggcaccuacggcaccggcagcuggcccgacggcgccgacaucaaccuguuccccaucuga

SEQ ID NO: 174331 - RNA, 1410 nt, Artificial Sequence
  derived and/or modified CDS sequence (opt4) from neuraminidase__InfluenzaA__AAY47078
augaaccccaaccagaagaucaucaccaucggcagcgugagccugaccaucgccaccaucugcuuccugaugcagaucgccauccuggugaccaccgugacccugcacuucaagcaguacgagugcaacagcccccccaacaaccaggugaugcugugcgagcccaccaucaucgagagaaacaucaccgagaucguguaccugaccaacaccaccaucgagaaggagaucugccccaagcuggccgaguacagaaacuggagcaagccccagugcaacaucaccggcuucgcccccuucagcaaggacaacagcaucagacugagcgccggcggcgacaucugggugaccagagagcccuacgugagcugcgaccacgacaagugcuaccaguucgcccugggccagggcaccacccugaacaacggccacagcaacgacaccgugcacgacagaacccccuacagaacccugcugaugaacgagcugggcgugcccuuccaccugggcaccaagcaggugugcaucgccuggagcagcagcagcugccacgacggcaaggccuggcugcacgugugcgugaccggcgacgacgagaacgccaccgccagcuucaucuacaacggcagacugguggacagcaucggcagcuggagcaagaagauccugagaacccaggagagcgagugcgugugcaucaacggcaccugcaccguggugaugaccgacggcagcgccagcggcaaggccgacaccaagauccuguucaucgaggagggcaagaucgugcacaucagcacccugagcggcagcgcccagcacguggaggagugcagcugcuaccccagauaccccggcgugagaugcgugugcagagacaacuggaagggcagcaacagacccaucguggacaucaacgugaaggacuacagcaucgugagcagcuacgugugcagcggccuggugggcgacacccccagaaagaacgacagcuucagcagcagccacugccuggaccccaacaacgaggagggcggccacggcgugaagggcugggccuucgacgacggcaacgacguguggaugggcagaaccaucagcgagaagcugagaagcggcuacgagaccuucaaggugaucgagggcuggagcaagcccaacagcaagcugcagaucaacagacaggugaucguggagagaggcaacagaagcggcuacagcggcaucuucagcguggagggcaagagcugcaucaacagaugcuucuacguggagcugaucagaggcagaaaggaggagaccgaggugugguggaccagcaacagcaucgugguguucugcggcaccagcggcaccuacggcaccggcagcuggcccgacggcgccgacaucaaccugaugcccaucuga

SEQ ID NO: 174332 - RNA, 1410 nt, Artificial Sequence
  derived and/or modified CDS sequence (opt4) from neuraminidase__InfluenzaA__AAY47088
augaaccccaaccagaagaucaucaccaucggcagcgugagccugaccaucagcaccaucugcuucuucaugcagaucgccauccugaucaccaccgugacccugcacuucaagcaguacgaguucaacagcccccccaacaaccaggugaugcugugcgagcccaccaucaucgagagaaacaucaccgagaucguguaccugaccaacaccaccaucgagaaggagaucugccccaagcuggccgaguacagaaacuggagcaagccccagugcaacaucaccggcuucgcccccuucagcaaggacaacagcaucagacugagcgccggcggcgacaucugggugaccagagagcccuacgugagcugcgaccccgacaagugcuaccaguucgcccugggccagggcaccacccugaacaacgugcacagcaacgacaccgugcacgacagaacccccuacagaacccugcugaugaacgagcugggcgugcccuuccaccugggcaccaagcaggugugcaucgccuggagcagcagcagcugccacgacggcaaggccuggcugcacgugugcgugaccggcgacgacgagaacgccaccgccagcuucaucuacaacggcagacugguggacagcaucgugagcuggagcaagaagauccugagaacccaggagagcgagugcgugugcaucaacggcaccugcaccguggugaugaccgacggcagcgccagcggcaaggccgacaccaagauccuguucaucgaggagggcaagaucgugcacaccagcacccugagcggcagcgcccagcacguggaggagugcagcugcuaccccagauaccccggcgugagaugcgugugcagagacaacuggaagggcagcaacagacccaucguggacaucaacaucaaggaccacagcaucgugagcagcuacgugugcagcggccuggugggcgacacccccagaaagaacgacagcagcagcagcagccacugccuggaccccaacaacgaggagggcggccacggcgugaagggcugggccuucgacgacggcaacgacguguggaugggcagaaccaucagcgagaagcugagaagcggcuacgagaccuucaaggugaucgagggcuggagcaaccccaacagcaagcugcagaucaacagacaggugaucguggacagaggcaacagaagcggcuacagcggcaucuucagcguggagggcaagagcugcaucaacagaugcuucuacguggagcugaucagaggcagaaagcaggagaccgaggugcuguggaccagcaacagcaucgugguguucugcggcaccagcggcaccuacggcaccggcagcuggcccgacggcgccgacaucaaccugaugcccaucuga

SEQ ID NO: 174333 - RNA, 1410 nt, Artificial Sequence; identical to SEQ ID NO: 174197
  derived and/or modified CDS sequence (opt4) from neuraminidase__InfluenzaA__AAY58319

SEQ ID NO: 174334 - RNA, 1392 nt, Artificial Sequence
  derived and/or modified CDS sequence (opt4) from neuraminidase__InfluenzaA__AAY59038
augaaccccaaccagaagaucaucaccaucggcagcgugagccugaccaucgccaccaucugcuuccugaugcagaucgccauccuggugaccaccgugacccugcacuucaagcaguacgagugcaacagcccccccaacaaccaggugaugcugugcgagcccaccaucaucgagagaaacaucaccgagaucguguaccugaccaacaccaccaucgagaaggagaucugccccaagcuggccgaguacagaaacuggagcaagccccagugcaacaucaccggcuucgcccccuucagcaaggacaacagcaucagacugagcgccggcggcgacaucugggugaccagagagcccuacgugagcugcgaccccgacaagugcuaccaguucgcccugggccagggcaccaccaacgacaccgugcacgacagaacccccuacagaacccugcugaugaacgagcugggcgugcccuuccaccugggcaccaagcaggugugcaucgccuggagcagcagcagcugccacgacggcaaggccuggcugcacgugugcgugaccggcgacgacgagaacgccaccgccagcuucaucuacaacggcagacugguggacagcaucggcagcuggagcaagaagauccugagaacccaggagagcgagugcgugugcaucaacggcaccugcaccguggugaugaccgacggcagcgccagcggcaaggccgacaccaagauccuguucaucgaggagggcaagaucgugcacaccagcccccugagcggcagcgcccagcacguggaggagugcagcugcuaccccagauaccccggcgugagaugcgugugcagagacaacuggaagggcagcaacagacccaucguggacaucaacgugaaggacuacagcaucgugagcagcuacgugugcagcggccuggugggcgacacccccagaaagaacgacagcagcagcagcagccacugccuggaccccaacaacgaggagggcggccacggcgugaagggcugggccuucgacgacggcaacgacguguggaugggcagaaccaucagcgagaagcugagaagcggcuacgagaccuucaaggugaucgagggcuggagcaagcccaacagcaagcugcagaucaacagacaggugaucguggacagaggcaacagaagcggcuacagcggcaucuucagcguggagggcaagagcugcaucaacagaugcuucuacguggagcugaucagaggcagaaagcaggagaccgaggugcuguggaccagcaacagcaucgugguguucugcggcaccagcggcaccuacggcaccggcagcuggcccgacggcgccgacaucaaccugaugcccaucuga

SEQ ID NO: 174335 - RNA, 1410 nt, Artificial Sequence
  derived and/or modified CDS sequence (opt4) from neuraminidase__InfluenzaA__AAY64195
augaaccccaaccagaagaucaucaccaucggcagcgugagccugaccaucgccaccaucugcuuccugaugcagaucgccauccuggugaccaccgugacccugcacuucaagcaguacgagugcaacagccugcccaacaaccaggugaugcugugcgagcccaccaucaucgagagaaacaucaccgagaucguguaccugaccaacaccaccaucgagaaggagaucugccccaagcuggccgaguacagaaacuggagcaagccccagugcaagaucaccggcuucgcccccuucagcaaggacaacagcaucagacugagcgccggcggcgacaucugggugaccagagagcccuacgugagcugcgaccccgacaagugcuaccaguucgcccugggccagggcaccacccugaacaacagacacagcaacgacaccgugcacgacagaacccccuacagaacccugcugaugaacgagcugggcgugcccuuccaccugggcaccaagcaggugugcaucgccuggagcagcagcagcugccacgacggcaaggccuggcugcacgugugcgugaccggccacgacgagaacgccaccgccagcuucaucuacgacggcagacugguggacagcaucggcagcuggagcaagaagauccugagaacccaggagagcgagugcgugugcaucaacggcaccugcaccguggugaugaccgacggcagcgccagcggcagagccgacaccaagauccuguucaucgaggagggcaagaucauccacaucagccagcugagcggcagcgcccagcacguggaggagugcagcugcuaccccagauaccccggcgugagaugcgugugcagagacaacuggaagggcagcaacagacccaucguggacaucaacgugaaggacuacagcaucgugagcagcuacgugugcagcggccuggugggcgacacccccagaaagaacgacagcagcagcagcagccacugccugaaccccaacaacgaggagggcggccacggcgugaagggcugggccuucgacgacggcaacgacguguggaugggcagaaccaucagcgagaaguucagaagcggcuacgagaccuucaaggugaucgagggcuggagcaagcccaacagcaagcugcagaucaacagacaggugaucguggacagagacaacagaagcggcuacagcggcaucuucagcguggagggcaagagcugcaucaacagaugcuucuacguggagcugaucagaggcagaaagcaggaggccgaggugugguggaccagcaacagcaucgugguguucugcggcaccagcggcaccuacggcaccggcagcuggcccgacggcgccgacaucaaccugaugcccaucuga

SEQ ID NO: 174336 - RNA, 1410 nt, Artificial Sequence; identical to SEQ ID NO: 174195
  derived and/or modified CDS sequence (opt4) from neuraminidase__InfluenzaA__AAY64205

SEQ ID NO: 174337 - RNA, 1410 nt, Artificial Sequence; identical to SEQ ID NO: 174121
  derived and/or modified CDS sequence (opt4) from neuraminidase__InfluenzaA__AAY64215

SEQ ID NO: 174338 - RNA, 1410 nt, Artificial Sequence
  derived and/or modified CDS sequence (opt4) from neuraminidase__InfluenzaA__AAY64225
augaaccccaaccagaagaucaucaccaucggcagcgugagccugaccaucgccaccaucugcuuccugaugcagaucaccauccuggugaccaccgugacccugcacuucaagcaguacgagugcaaccccccccccaacaaccaggugaugcugugcgagcccaccaucaucgagagaaacaucaccgagaucguguaccugaccaacaccaccaucgagaaggagaucugccccaagcuggccgaguacagaaacuggagcaagccccagugcaacaucaccggcuucgcccccuucagcaaggacaacagcaucagacugagcgccggcggcgacaucugggugaccagagagcccuacgugagcugcgaccccgacaagugcuaccaguucgcccugggccagggcaccacccugaacaacggccacagcaacgacaccgugcacgacagaacccccuacagaacccugcugaugaacgagcugggcgugcccuuccaccugggcaccagacaggugugcaucgccuggagcagcagcagcugccacgacggcaaggccuggcugcacgugugcgugaccggcgacgacgagaacgccaccgccagcuucaucuacaacggcagacugguggacagcaucggcagcuggagcaagaagauccugagaacccaggagagcgagugcgugugcaucaacggcaccugcaccguggugaugaccgacggcagcgccagcggcaaggccgacaccaagauccuguucaucgaggagggcaagaucgugcacaucagcacccugagcggcagcgcccagcacguggaggagugcagcugcuaccccagauaccccggcgugagaugcgugugcagagacaacuggaagggcagcaacagacccaucguggacaucaacgugaaggacuacagcaucgugagcagcuacgugugcagcggccuggugggcgacacccccagaaagaacgacagcuucagcagcagccacugccuggaccccaacaacgaggagggcggccacggcgugaagggcugggccuucgacgacggcaacgacguguggaugggcagaaccaucagcgagaagcugagaagcggcuacgagaccuucaaggugaucgagggcuggagcaagcccaacagcaagcugcagaucaacagacaggugaucguggagagaggcaacagaagcggcuacagcggcaucuucagcguggagggcaagagcugcaucaacagaugcuucuacguggagcugaucagaggcagaaaggaggagaacgaggugugguggaccagcaacagcaucgugguguucugcggcaccagcggcaccuacggcaccggcagcuggcccgacggcgccgacaucaaccugaugcccaucuga

SEQ ID NO: 174339 - RNA, 1410 nt, Artificial Sequence
  derived and/or modified CDS sequence (opt4) from neuraminidase__InfluenzaA__AAY64245
augaaccccaaccagaagaucaucaccaucggcagcgugagccugaccaucgccaccaucugcuuccugaugcagaucgccauccuggugaccaccgugacccugcacuucaagcaguacgagugcaacagccugcccaacaaccaggugaugcugugcgagcccaccauccuggagagaaacaucaccgagaucguguaccugaccaacaccaccaucgagaaggagaucugccccaagcuggccgaguacagaaacuggagcaagccccagugcaagaucaccggcuucgcccccuucagcaaggacaacagcaucagacugagcgccggcggcgacaucugggugaccagagagcccuacgugagcugcgaccccgacaagugcuaccaguucgcccugggccagggcaccacccugaacaacagacacagcaacgacaccgugcacgacagaacccccuacagaacccugcugaugaacgagcugggcgugcccuuccaccugggcaccaagcaggugugcaucgccuggagcagcagcagcugccacgacggcaaggccuggcugcacgugugcgugaccggccacgacgagaacgccaccgccagcuucaucuacggcggcagacugguggacagcaucggcagcuggagcaagaagauccugagaacccaggagagcgagugcgugugcaucaacggcaccugcaccguggugaugaccgacggcagcgccagcggcagagccgacaccaagauccuguucaucgaggagggcaagaucauccacaucagccagcugagcggcagcgcccagcacguggaggagugcagcugcuaccccagauaccccggcgugagaugcgugugcagagacaacuggaagggcagcaacagacccaucguggacaucaacgugaaggacuacagcaucgugagcagcuacgugugcagcggccuggugggcgacacccccagaaagaacgacagcagcagcagcagccacugccugaaccccaacaacgaggagggcggccacggcgugaagggcugggccuucgacgacggcaacgacguguggaugggcagaaccaucagcgagaaguucagaagcggcuacgagaccuucaaggugaucgagggcuggagcaagcccaacagcaagcugcagaucaacagacaggugaucguggacagagacaacagaagcggcuacagcggcaucuucagcguggagggcaagagcugcaucaacagaugcuucuacguggagcugaucagaggcagaaagcaggagaccgaggugugguggaccagcaacagcaucgugguguucugcggcaccagcggcaccuacggcaccggcagcuggcccgacggcgccgacaucaaccugaugcccaucuga

SEQ ID NO: 174340 - RNA, 1410 nt, Artificial Sequence; identical to SEQ ID NO: 174121
  derived and/or modified CDS sequence (opt4) from neuraminidase__InfluenzaA__AAY64255

SEQ ID NO: 174341 - RNA, 1410 nt, Artificial Sequence; identical to SEQ ID NO: 174339
  derived and/or modified CDS sequence (opt4) from neuraminidase__InfluenzaA__AAY64265

SEQ ID NO: 174342 - RNA, 1410 nt, Artificial Sequence; identical to SEQ ID NO: 174339
  derived and/or modified CDS sequence (opt4) from neuraminidase__InfluenzaA__AAY64285

SEQ ID NO: 174343 - RNA, 1410 nt, Artificial Sequence
  derived and/or modified CDS sequence (opt4) from neuraminidase__InfluenzaA__AAY64295
augaaccccaaccagaagaucaucaccaucggcagcgugagccugaccaucgccaccaucugcuuccugaugcagaucgccauccuggugaccaccgugacccugcacuucaagcaguacgagugcaacagcccccccaacaaccaggugaugcugugcgagcccaccaucaucgagagaaacaucaccgagaucguguaccugaccaacaccaccaucgagaaggagaucugccccaagcugagcgaguacagaaacuggagcaagccccagugcaacaucaccggcuucgcccccuucagcaaggacaacagcaucagacugagcgccggcggcgacaucugggugaccagagagcccuacgugagcugcgaccccgacaagugcuaccaguucgcccugggccagggcaccacccugaacaacggccacagcaacgacaccgugcacgacagaacccccuacagaacccugcugaugaacgagcugggcgugcccuuccaccugggcaccaagcaggugugcaucgccuggagcagcagcagcugccacgacggcaaggccuggcugcacgugugcgugaccggcgacgacgagaacgccaccgccagcuucaucuacaacggcagacugguggacagcaucggcagcuggagcaagaagauccugagaacccaggagagcgagugcgugugcaucaacggcaccugcaccguggugaugaccgacggcagcgccagcggcaaggccgacaccaagauccuguucaucgaggagggcaagaucgugcacaucagcacccugagcggcagcgcccagcacguggaggagugcagcugcuaccccagauaccccggcgugagaugcgugugcagagacaacuggaagggcagcaacagacccaucguggacaucaacgugaaggaccacagcaucgugagcagcuacgugugcagcggccuggugggcgacacccccagaaagaacgacagcuucagcagcagccacugccuggaccccaacaacgaggagggcggccacggcgugaagggcugggccuucgacgacggcaacgacguguggaugggcagaaccaucagcgagaagcugagaagcggcuacgagaccuucaaggugaucgagggcuggagcaagcccaacagcaagcugcagaucaacagacaggugaucguggagagaggcaacagaagcggcuacagcggcaucuucagcguggagggcaagagcugcaucaacagaugcuucuacguggagcugaucagaggcagaaaggaggagaccgaggugugguggaccagcaacagcaucgugguguucugcggcaccagcggcaccuacggcaccggcagcuggcccgacggcgccgacaucaaccugaugcccaucuga

SEQ ID NO: 174344 - RNA, 1410 nt, Artificial Sequence
  derived and/or modified CDS sequence (opt4) from neuraminidase__InfluenzaA__AAY64305
augaaccccaaccagaagaucaucaccaucggcagcgugagccugaccaucgccaccaucugcuuccugaugcagaucgccauccuggugaccaccgugacccugcacuucaagcaguacgagugcaacagcccccccaacaaccaggugaugcugugcgagcccaccaucaucgagagaaacaucaccgagaucguguaccugaccaacaccaccaucgagaaggagaucugccccaagcuggccgaguacagaaacuggagcaagccccagugcaagaucaccggcuucgcccccuucagcaaggacaacagcaucagacugagcgccggcggcgacaucugggugaccagagagcccuacgugagcugcgaccccgacaagugcuaccaguucgcccugggccagggcaccacccugaacaacagacacagcaacgacaccgugcacgacagaacccccuacagaacccugcugaugaacgagcugggcgugcccuuccaccugggcaccaagcaggugugcaucgccuggagcagcagcagcugccacgacggcaaggccuggcugcacgugugcgugaccggccacgacgagaacgccaccgccagcuucaucuacgacggcagacugguggacagcaucggcagcuggagcaagaagauccugagaacccaggagagcgagugcgugugcaucaacggcaccugcaccguggugaugaccgacggcagcgccagcggcagagccgacaccaagauccuguucaucgaggagggcaagaucgugcacaccagcaagcugagcggcagcgcccagcacguggaggagugcagcugcuaccccagauaccccggcgugagaugcgugugcagagacaacuggaagggcagcaacagacccaucguggacaucaacgugaaggacuacagcaucgugagcagcuacgugugcagcggccuggugggcgacacccccagaaagaacgacagcagcagcagcagccacugccuggaccccaacaacgaggagggcggccacggcgugaagggcugggccuucgacgacggcaacgacguguggaugggcagaaccaucagcgagaagagcagaagcggcuacgagaccuucaaggugaucgagggcuggagcaagcccaacagcaagcugcagaucaacagacaggugaucguggagagaggcaacaugagcggcuacagcggcaucuucagcguggagggcaagagcugcaucaacagaugcuucuacguggagcugaucagaggcagaaagcaggagaccgaggugugguggaccagcaacagcaucgugguguucugcggcaccagcggcaccuacggcaccggcagcuggcccgacggcgccgacaucaaccugaugcccaucuga

SEQ ID NO: 174345 - RNA, 1410 nt, Artificial Sequence; identical to SEQ ID NO: 174195
  derived and/or modified CDS sequence (opt4) from neuraminidase__InfluenzaA__AAY64335

SEQ ID NO: 174346 - RNA, 1410 nt, Artificial Sequence; identical to SEQ ID NO: 174210
  derived and/or modified CDS sequence (opt4) from neuraminidase__InfluenzaA__AAY64365

SEQ ID NO: 174347 - RNA, 1410 nt, Artificial Sequence
  derived and/or modified CDS sequence (opt4) from neuraminidase__InfluenzaA__AAY64385
augaaccccaaccagaagaucaucaccaucggcagcgugagccugaccaucgccaccaucugcuuccugaugcagaucgccauccuggugaccaccgugacccugcacuucaagcaguacgagugcaacagccugcccaacaaccaggugaugcugugcgagcccaccauccuggagagaaacaucaccgagaucguguaccugaccaacaccaccaucgagaaggagaucugccccaagcuggccgaguacagaaacuggagcaagccccagugcaagaucaccggcuucgcccccuucagcaaggacaacagcaucagacugagcgccggcggcgacaucugggugaccagagagcccuacgugagcugcgaccccgacaagugcuaccaguucgcccugggccagggcaccacccugaacaacagacacagcaacgacaccgugcacgacagaacccccuacagaacccugcugaugaacgagcugggcgugcccuuccaccugggcaccaagcaggugugcaucgccuggagcagcagcagcugccacgacggcaaggccuggcugcacgugugcgugaccggccacgacgagaacgccaccgccagcuucaucuacggcggcagacugguggacagcaucggcagcuggagcaagaagauccugagaacccaggagagcgagugcgugugcaucaacggcaccugcaccguggugaugaccgacggcagcgccagcggcagagccgacaccaagauccuguucaucgaggagggcaagaucauccacaucagccagcugagcggcagcgcccagcacguggaggagugcagcugcuaccccagauaccccggcgugagaugcgugugcagagacaacuggaagggcagcaacagacccaucguggacaucaacgugaaggacuacagcaucgugagcagcuacgugugcagcggccuggugggcgacacccccagaaagaacgacagcagcagcagcagccacugccugaaccccaacaacgaggagggcggccacggcgugaagggcugggccuucgacgacggcaacgacguguggaugggcagaaccaucagcgagaagagcagaagcggcuacgagaccuucaaggugaucgagggcuggagcaagcccaacagcaagcugcagaucaacagacaggugaucguggacagagacaacagaagcggcuacagcggcaucuucagcguggagggcaagagcugcaucaacagaugcuucuacguggagcugaucagaggcagaaagcaggagaccgaggugugguggaccagcaacagcaucgugguguucugcggcaccagcggcaccuacggcaccggcagcuggcccgacggcgccgacaucaaccugaugcccaucuga

SEQ ID NO: 174348 - RNA, 1410 nt, Artificial Sequence
  derived and/or modified CDS sequence (opt4) from neuraminidase__InfluenzaA__AAY64395
augaaccccaaccagaagaucaucaccaucggcagcgugagccugaucaucagcaccaucugcuucuucaugcagaucgccauccugaucaccaccgugacccugcacuucaagcaguacgaguucaacagcccccccaacaaccaggugaugcugugcgagcccaccaucaucgagagaaacaucaccgagaucguguaccugaccaacaccaccaucgagaaggagaucugccccaagcuggccgaguacagaaacuggagcaagccccagugcgacaucaccggcuucgcccccuucagcaaggacaacagcaucagacugagcgccggcggcgacaucugggugaccagagagcccuacgugagcugcgaccccgacaagugcuaccaguucgcccugggccagggcaccacccugaacaacgugcacagcaacgacaccgugcacgacagaacccccuacagaacccugcugaugaacgagcugggcgugcccuuccaccugggcaccaagcaggugugcaucgccuggagcagcagcagcugccacgacggcaaggccuggcugcacgugugcgugaccggcgacgacgagaacgccaccgccagcuucaucuacaacggcagacugguggacagcaucgugagcuggagcaagaagauccugagaacccaggagagcgagugcgugugcaucaacggcaccugcaccguggugaugaccgacggcagcgccagcggcaaggccgacaccaagauccuguucaucaaggagggcaagaucgugcacaccagcacccugagcggcagcgcccagcacguggaggagugcagcugcuaccccagauaccccggcgugagaugcgugugcagagacaacuggaagggcagcaacagacccaucguggacaucaacaucaaggacuacagcaucgugagcagcuacgugugcagcggccuggugggcgacacccccagaaagaacgacagcagcagcagcagccacugccuggaccccaacaacgaggagggcggccacggcgugaagggcugggccuucgacgacggcaacgacguguggaugggcagaaccaucagcgagaagcugagaagcggcuacgagaccuucaaggugaucgagggcuggagcaacagcaacagcaagcugcagaucaacagacaggugaucguggacagaggcaacagaagcggcuacagcggcaucuucagcguggagggcaagagcugcaucaacagaugcuucuacguggagcugaucagaggcagaaaggaggagaccgaggugcuguggaccagcaacagcaucgugguguucugcggcaccagcggcaccuacggcaccggcagcuggcccgacggcgccgacaucaaccugaugcccaucuga

SEQ ID NO: 174349 - RNA, 1410 nt, Artificial Sequence; identical to SEQ ID NO: 174344
  derived and/or modified CDS sequence (opt4) from neuraminidase__InfluenzaA__AAY64405

SEQ ID NO: 174350 - RNA, 1410 nt, Artificial Sequence; identical to SEQ ID NO: 174339
  derived and/or modified CDS sequence (opt4) from neuraminidase__InfluenzaA__AAY98040

SEQ ID NO: 174351 - RNA, 1410 nt, Artificial Sequence; identical to SEQ ID NO: 174339
  derived and/or modified CDS sequence (opt4) from neuraminidase__InfluenzaA__AAY98050

SEQ ID NO: 174352 - RNA, 1410 nt, Artificial Sequence; identical to SEQ ID NO: 174231
  derived and/or modified CDS sequence (opt4) from neuraminidase__InfluenzaA__AAY98060

SEQ ID NO: 174353 - RNA, 1410 nt, Artificial Sequence
  derived and/or modified CDS sequence (opt4) from neuraminidase__InfluenzaA__AAY98070
augaaccccaaccagaagaucaucaccaucggcagcgugagccugaccaucgccaccaucugcuuccugaugcagaucgccauccuggugaccaccgugacccugcacuucaagcaguacgagugcaacagcccccccaacaaccaggugaugcugugcgagcccaccaucaucgagagaaacaucaccgagaucguguaccugaccaacaccaccaucgagaaggagaucugccccaagcuggccgaguacagaaacuggagcaagccccagugcaacaucaccggcuucgcccccuucagcaaggacaacagcaucagacugagcgccggcggcgacaucugggugaccagagagcccuacgugagcugcgaccccgacaagugcuaccaguucgcccugggccagggcaccacccugaacaacggccacagcaacgacaccgugcacgacagaacccccuacagaacccugcugaugaacgagcugggcgugcccuuccaccugggcaccagacaggugugcaucgccuggagcagcagcagcugccacgacggcaaggccuggcugcacgugugcgugaccggcgacgacgagaacgccaccgccagcuucaucuacaacggcagacugguggacagcaucggcagcuggagcaagaagauccugagaacccaggagagcgagugcgugugcaucaacggcaccugcaccguggugaugaccgacggcagcgccagcggcaaggccgacaccaagauccuguucaucgaggagggcaagaucgugcacaucagcacccugagcggcagcgcccagcacguggaggagugcagcugcuaccccagauaccccggcgugagaugcgugugcagagacaacuggaagggcagcaacagacccaucguggacaucaacgugaaggaccacagcaucgugagcagcuacgugugcagcggccuggugggcgacacccccagaaagaacgacagcuucagcagcagccacugccuggaccccaacaacgaggagggcggccacggcgugaagggcugggccuucgacgacggcaacgacguguggaugggcagaaccaucagcgagaagcugagaagcggcuacgagaucuucaaggugaucgagggcuggagcaagcccaacagcaagcugcagaucaacagacaggugaucguggagagaggcaacagaagcggcuacagcggcaucuucagcguggagggcaagagcugcaucaacagaugcuucuacguggagcugaucagaggcagaaaggaggagaccgaggugugguggaccagcaacagcaucgugguguucugcggcaccagcggcaccuacggcaccggcagcuggcccgacggcgccgacaucaaccugaugcccaucuga

SEQ ID NO: 174354 - RNA, 1410 nt, Artificial Sequence; identical to SEQ ID NO: 174239
  derived and/or modified CDS sequence (opt4) from neuraminidase__InfluenzaA__AAY98080

SEQ ID NO: 174355 - RNA, 1410 nt, Artificial Sequence
  derived and/or modified CDS sequence (opt4) from neuraminidase__InfluenzaA__AAY98090
augaaccccaaccagaagaucaucaccaucggcagcgugagccugaccaucgccaccaucugcuuccugaugcagaucgccauccuggugaccaccgugacccugcacuucaagcaguacgagugcaacagccugcccaacaaccaggugaugcugugcgagcccaccaucaucgagagaaacaucaccgagaucguguaccugaccaacaccaccaucgagaaggagaucugccccaagcuggccgaguacagaaacuggagcaagccccagugcaagaucaccggcuucgcccccuucagcaaggacaacagcaucagacugagcgccggcggcgacaucugggugaccagagagcccuacgugagcugcgaccccgacaagugcuaccaguucgcccugggccagggcaccacccugaacaacagacacagcaacgacaccgugcacgacagaacccccuacagaacccugcugaugaacgagcugggcgugcccuuccaccugggcaccaagcaggugugcaucgccuggagcagcagcagcugccacgacggcaaggccuggcugcacgugugcgugaccggccacgacgagaacgccaccgccagcuucaucuacgacggcagacugguggacagcaucggcagcuggagcaagaagauccugagaacccaggagagcgagugcgugugcaucaacggcaccugcaccguggugaugaccgacggcagcgccagcggcaaggccgacaccaagauccuguucaucgaggagggcaagaucauccacaucagccagcugagcggcagcgcccagcacguggaggagugcagcugcuaccccagauaccccggcgugagaugcgugugcagagacaacuggaagggcagcaacagacccaucguggacaucaacgugaaggacuacagcaucgugagcagcuacgugugcagcggccuggugggcgacacccccagaaagaacgacagcagcagcagcagccacugccugaaccccaacaacgaggagggcggccacggcgugaagggcugggccuucgacgacggcaacgacguguggaugggcagaaccaucagcgagaaguucagaagcggcuacgagaccuucaaggugaucgagggcuggagcaagcccaacagcaagcugcagaucaacagacaggugaucguggacagagacaacagaagcggcuacagcggcaucuucagcguggagggcaagagcugcaucaacagaugcuucuacguggagcugaucagaggcagaaagcaggagaccgaggugugguggaccagcaacagcaucgugguguucugcggcaccagcggcaccuacggcaccggcagcuggcccgacggcgccgacaucaaccugaugcccaucuga

SEQ ID NO: 174356 - RNA, 1410 nt, Artificial Sequence; identical to SEQ ID NO: 174339
  derived and/or modified CDS sequence (opt4) from neuraminidase__InfluenzaA__AAY98100

SEQ ID NO: 174357 - RNA, 1410 nt, Artificial Sequence; identical to SEQ ID NO: 174339
  derived and/or modified CDS sequence (opt4) from neuraminidase__InfluenzaA__AAY98110

SEQ ID NO: 174358 - RNA, 1410 nt, Artificial Sequence; identical to SEQ ID NO: 174339
  derived and/or modified CDS sequence (opt4) from neuraminidase__InfluenzaA__AAY98120

SEQ ID NO: 174359 - RNA, 1410 nt, Artificial Sequence; identical to SEQ ID NO: 174339
  derived and/or modified CDS sequence (opt4) from neuraminidase__InfluenzaA__AAY98130

SEQ ID NO: 174360 - RNA, 1410 nt, Artificial Sequence; identical to SEQ ID NO: 174339
  derived and/or modified CDS sequence (opt4) from neuraminidase__InfluenzaA__AAY98150

SEQ ID NO: 174361 - RNA, 1410 nt, Artificial Sequence
  derived and/or modified CDS sequence (opt4) from neuraminidase__InfluenzaA__AAY98160
augaaccccaaccagaagaucaucaccaucggcagcgugagccugaccaucgccaccaucugcuuccugaugcagaucgccauccuggugaccaccgugacccugcacuucaagcaguacgagugcaacagccugcccaacaaccaggugaugcugugcgagcccaccauccuggagagaaacaucaccgagaucguguaccugaccaacaccaccaucgagaaggagaucugccccaagcuggccgaguacagaaacuggagcaagccccagugcaagaucaccggcuucgcccccuucagcaaggacaacagcaucagacugagcgccggcggcgacaucugggugaccagagagcccuacgugagcugcgaccccgacaagugcuaccaguucgcccugggccagggcaccacccugaacaacagacacagcaacgacaccgugcacgacagaacccccuacagaacccugcugaugaacgagcugggcgugcccuuccaccugggcaccaagcaggugugcaucgccuggagcagcagcagcugccacgacggcaaggccuggcugcacgugugcgugaccggccacgacgagaacgccaccgccagcuucaucuacggcggcagacugguggacagcaucggcagcuggagcaagaagauccugagaacccaggagagcgagugcgugugcaucaacggcaccugcaccguggugaugaccgacggcagcgccagcggcagagccgacaccaagauccuguucaucgaggagggcaagaucauccacaucagccagcugagcggcaacgcccagcacguggaggagugcagcugcuaccccagauaccccggcgugagaugcgugugcagagacaacuggaagggcagcaacagacccaucguggacaucaacgugaaggacuacagcaucgugagcagcuacgugugcagcggccuggugggcgacacccccagaaagaacgacagcagcagcagcagcaacugccugaaccccaacaacgaggagggcggccacggcgugaagggcugggccuucgacgacggcaacgacguguggaugggcagaaccaucagcgagaaguucagaagcggcuacgagaccuucaaggugaucgagggcuggagcaagcccaacagcaagcugcagaucaacagacaggugaucguggacagagacaacagaagcggcuacagcggcaucuucagcguggagggcaagagcugcaucaacagaugcuucuacguggagcugaucagaggcagaaagcaggagaccgaggugugguggaccagcaacagcaucgugguguucugcggcaccagcggcaccuacggcaccggcagcuggcccgacggcgccgacaucaaccugaugcccaucuga

SEQ ID NO: 174362 - RNA, 1410 nt, Artificial Sequence; identical to SEQ ID NO: 174339
  derived and/or modified CDS sequence (opt4) from neuraminidase__InfluenzaA__AAY98170

SEQ ID NO: 174363 - RNA, 1410 nt, Artificial Sequence; identical to SEQ ID NO: 174339
  derived and/or modified CDS sequence (opt4) from neuraminidase__InfluenzaA__AAY98180

SEQ ID NO: 174364 - RNA, 1410 nt, Artificial Sequence; identical to SEQ ID NO: 174339
  derived and/or modified CDS sequence (opt4) from neuraminidase__InfluenzaA__AAY98200

SEQ ID NO: 174365 - RNA, 1410 nt, Artificial Sequence; identical to SEQ ID NO: 174339
  derived and/or modified CDS sequence (opt4) from neuraminidase__InfluenzaA__AAY98210

SEQ ID NO: 174366 - RNA, 1410 nt, Artificial Sequence; identical to SEQ ID NO: 174344
  derived and/or modified CDS sequence (opt4) from neuraminidase__InfluenzaA__AAY98220

SEQ ID NO: 174367 - RNA, 1410 nt, Artificial Sequence; identical to SEQ ID NO: 174339
  derived and/or modified CDS sequence (opt4) from neuraminidase__InfluenzaA__AAY98230

SEQ ID NO: 174368 - RNA, 1410 nt, Artificial Sequence
  derived and/or modified CDS sequence (opt4) from neuraminidase__InfluenzaA__AAY98250
augaaccccaaccagaagaucaucaccaucggcagcgugagccugaccaucgccaccaucugcuuccugaugcagaucgccauccuggugaccaccgugacccugcacuucaagcaguacgagugcaacagccugcccaacaaccaggugaugcugugcgagcccaccauccuggagagaaacaucaccgagaucguguaccugaccaacaccaccaucgagaaggagaucugccccaagcuggccgaguacagaaacuggagcaagccccagugcaagaucaccggcuucgcccccuucagcaaggacaacagcaucagacugagcgccggcggcgacaucugggugaccagagagcccuacgugagcugcgaccccgacaagugcuaccaguucgcccugggccagggcaccacccugaacaacagacacagcaacgacaccgugcacgacagaacccccuacagaacccugcugaugaacgagcugggcgugcccuuccaccugggcaccaagcaggugugcaucgccuggagcagcagcagcugccacgacggcaaggccuggcugcacgugugcgugaccggccacgacgagaacgccaccgccagcuucaucuacggcggcagacugguggacagcaucggcagcuggagcaagaagauccugagaacccaggagagcgagugcgugugcaucaacggcaccugcaccguggugaugaccgacggcagcgccagcggcagagccgacaccaagauccuguucaucgaggagggcaagaucauccacaucagccagcugagcggcagcgcccagcacguggaggagugcagcugcuaccccagauaccccggcgugagaugcgugugcagagacaacuggaagggcagcaacagacccaucguggacaucaacgugaaggacuacagcaucgugagcagcuacgugugcagcggccuggugggcgacacccccagaaagaacgacagcagcagcagcagccacugccugaaccccaacaacgaggagggcggccacggcgugaagggcugggccuucgacgacggcaacgacguguggaugggcagaaccaucagcgagaaguucagaagcggcuacgagaccuucaaggugaucgagggcuggagcaagcccaacagcaagcugcagaucaacagacaggugaucguggacagagacaacagaagcggcuacagcggcaucuucagcguggaggacaagagcugcaucaacagaugcuucuacguggagcugaucagaggcagaaagcaggagaccgaggugugguggaccagcaacagcaucgugguguucugcggcaccagcggcaccuacggcaccggcagcuggcccgacggcgccgacaucaaccugaugcccaucuga

SEQ ID NO: 174369 - RNA, 1410 nt, Artificial Sequence; identical to SEQ ID NO: 174339
  derived and/or modified CDS sequence (opt4) from neuraminidase__InfluenzaA__AAY98322

SEQ ID NO: 174370 - RNA, 1410 nt, Artificial Sequence; identical to SEQ ID NO: 174344
  derived and/or modified CDS sequence (opt4) from neuraminidase__InfluenzaA__AAY98332

SEQ ID NO: 174371 - RNA, 1410 nt, Artificial Sequence; identical to SEQ ID NO: 174339
  derived and/or modified CDS sequence (opt4) from neuraminidase__InfluenzaA__AAY98342

SEQ ID NO: 174372 - RNA, 1410 nt, Artificial Sequence; identical to SEQ ID NO: 174339
  derived and/or modified CDS sequence (opt4) from neuraminidase__InfluenzaA__AAY98359

SEQ ID NO: 174373 - RNA, 1410 nt, Artificial Sequence; identical to SEQ ID NO: 174344
  derived and/or modified CDS sequence (opt4) from neuraminidase__InfluenzaA__AAY98369

SEQ ID NO: 174374 - RNA, 1410 nt, Artificial Sequence
  derived and/or modified CDS sequence (opt4) from neuraminidase__InfluenzaA__AAY98379
augaaccccaaccagaagaucaucaccaucggcagcgugagccugaccaucgccaccaucugcuuccugaugcagaucgccauccuggugaccaccgugacccugcacuucaagcaguacgagugcaacagccugcccaacaaccaggugaugcugugcgagcccaccaucaucgagagaaacaucaccgagaucguguaccugaccaacaccaccaucgagaaggagaucugccccaagcuggccgaguacagaaacuggagcaagccccagugcaagaucaccggcuucgcccccuucagcaaggacaacagcaucagacugagcgccggcggcgacaucugggugaccagagagcccuacgugagcugcgaccccgacaagugcuaccaguucgcccugggccagggcaccacccugaacaacagacacagcaacgacaccgugcacgacagaacccccuacagaacccugcugaugaacgagcugggcgugcccuuccaccugggcaccaagcaggugugcaucgccuggagcagcagcagcugccacgacggcaaggccuggcugcacgugugcgugaccggccacgacgagaacgccaccgccagcuucaucuacggcggcagacugguggacagcaucggcagcuggagcaagaagauccugagaacccaggagagcgagugcgugugcaucaacggcaccugcaccguggugaugaccgacggcagcgccagcggcagagccgacaccaagauccuguucaucgaggagggcaagaucauccacaucagccagcugagcggcagcgcccagcacguggaggagugcagcugcuaccccagauaccccggcgugagaugcgugugcagagacaacuggaagggcagcaacagacccaucguggacaucaacgugaaggacuacagcaucgugagcagcuacgugugcagcggccuggugggcgacacccccagaaagaacgacagcagcagcagcagccacugccugaaccccaacaacgaggagggcggccacggcgugaagggcugggccuucgacgacggcaacgacguguggaugggcagaaccaucagcgagaaguucagaagcggcuacgagaccuucaaggugaucgagggcuggagcaagcccaacagcaagcugcagaucaacagacaggugaucguggacagaaacaacagaagcggcuacagcggcaucuucagcguggagggcaagagcugcaucaacagaugcuucuacguggagcugaucagaggcagaaagcaggagaccgaggugugguggaccagcaacagcaucgugguguucugcggcaccagcggcaccuacggcaccggcagcuggcccgacggcgccgacaucaaccugaugcccaucuga

SEQ ID NO: 174375 - RNA, 1410 nt, Artificial Sequence
  derived and/or modified CDS sequence (opt4) from neuraminidase__InfluenzaA__AAY98389
augaaccccaaccagaagaucaucaccaucggcagcgugagccugaccaucgccaccaucugcuuccugaugcagaucgccauccuggugaccaccgugacccugcacuucaagcaguacgagugcaacagccugcccaacaaccaggugaugcugugcgagcccaccaucaucgagagaaacaucaccgagaucguguaccugaccaacaccaccaucgagaaggagaucugccccaagcuggccgaguacagaaacuggagcaagccccagugcaagaucaccggcuucgcccccuucagcaaggacaacagcaucagacugagcgccggcggcgacaucugggugaccagagagcccuacgugagcugcgaccccgacaagugcuaccaguucgcccugggccagggcaccacccugaacaacagacacagcaacgacaccgugcacgacagaacccccuacagaacccugcugaugaacgagcugggcgugcccuuccaccugggcaccaagcaggugugcaucgccuggagcagcagcagcugccacgacggcaaggccuggcugcacgugugcgugaccggccacgacgagaacgccaccgccagcuucaucuacggcggcagacugguggacagcaucggcagcuggagcaagaagauccugagaacccaggagagcgagugcgugugcaucaacggcaccugcaccguggugaugaccgacggcagcgccagcggcagagccgacaccaagauccuguucaucgaggagggcaagaucauccacaucagccagcugagcggcagcgcccagcacguggaggagugcagcugcuaccccagauaccccggcgugagaugcgugugcagagacaacuggaagggcagcaacagacccaucguggacaucaacgugaaggacuacagcaucgugagcagcuacgugugcagcggccuggugggcgacacccccagaaagaacgacagcagcagcagcagccacugccugaaccccaacaacgaggagggcggccacggcgugaagggcugggccuucgacgacggcaacgacguguggaugggcagaaccaucagcgagaaguucagaagcggcuacgagaccuucaaggugaucgagggcuggagcaagcccaacagcaagcugcagaucaacagacaggugaucguggacagagacaacagaagcggcuacagcggcaucuucagcguggagggcaagagcugcaucaacagaugcuucuacguggagcugaucagaggcagaaagcaggagaccgaggugugguggaccagcaacagcaucgugguguucugcggcaccagcggcaccuacggcaccggcagcuggcccgacggcgccgacaucaaccugaugcccaucuga

SEQ ID NO: 174376 - RNA, 1410 nt, Artificial Sequence; identical to SEQ ID NO: 174339
  derived and/or modified CDS sequence (opt4) from neuraminidase__InfluenzaA__AAY98399

SEQ ID NO: 174377 - RNA, 1410 nt, Artificial Sequence; identical to SEQ ID NO: 174339
  derived and/or modified CDS sequence (opt4) from neuraminidase__InfluenzaA__AAY98409

SEQ ID NO: 174378 - RNA, 1410 nt, Artificial Sequence; identical to SEQ ID NO: 174339
  derived and/or modified CDS sequence (opt4) from neuraminidase__InfluenzaA__AAY98773

SEQ ID NO: 174379 - RNA, 1410 nt, Artificial Sequence
  derived and/or modified CDS sequence (opt4) from neuraminidase__InfluenzaA__AAZ32955
augaaccccaaccagaagaucaucaccaucggcagcgugagccugaccaucagcaccaucugcuucuucaugcagaucgccauccugaucaccaccgugacccugcacuucaagcaguacgaguucaacagcccccccaacaaccaggugaugcugugcgagcccaccaucaucgagagaaacaucaccgagaucguguaccugaccaacaccaccaucgagaaggagaucugccccaagcuggccgaguacagaaacuggagcaagccccagugcaacaucaccggcuucgcccccuucagcaaggacaacagcaucagacugagcgccggcggcgacaucugggugaccagagagcccuacgugagcugcgaccccgacaagugcuaccaguucgcccugggccagggcaccacccugaacaacgugcacagcaacgacaucgugcacgagagaacccccuacagaacccugcugaugaacgagcugggcgugcccuuccaccugggcaccaagcaggugugcaucgccuggagcagcagcagcugccacgacggcaaggccuggcugcacgugugcgugaccggcgacgacgagaacgccaccgccagcuucaucuacaacggcagacugguggacagcaucgugagcuggagcaagaagauccugagaacccaggagagcgagugcgugugcaucaacggcaccugcaccguggugaugaccgacggcagcgccagcggcaaggccgacaccaagauccuguucaucgaggagggcaagaucgugcacaccagcacccugagcggcagcgcccagcacguggaggagugcagcugcuaccccagauaccccggcgugagaugcgugugcagagacaacuggaagggcagcaacagacccaucguggacaucaacaucaaggacuacagcaucgugagcagcuacgugugcagcggccuggugggcgacacccccagaaagaacgacagcagcagcagcagccacugccuggaccccaacaacgaggagggcggccacggcgugaagggcugggccuucgacgacggcaacgacguguggaugggcagaaccaucagcgagaagcugagaagcggcuacgagaccuucaaggugaucgagggcuggagcaaccccaacagcaagcugcagaucaacagacaggugaucguggacagaggcaacagaagcggcuacagcggcaucuucagcguggagggcaagagcugcaucaacagaugcuucuacguggagcugaucagaggcagaaagcaggagaccgaggugcuguggaccagcaacagcaucgugguguucugcggcaccagcggcaccuacggcaccggcagcuggcccgacggcgccgacaucaaccugaugcccaucuga

SEQ ID NO: 174380 - RNA, 1344 nt, Artificial Sequence
  derived and/or modified CDS sequence (opt4) from neuraminidase__InfluenzaA__AAZ32957
augaaccccaaccagaagaucaucaccaucggcagcgugagccugaccaucagcaccaucugcuucuucaugcagaucgccauccugaucaccaccgugacccugaucgagagaaacaucaccgagaucguguaccugaccaacaccaccaucgagaaggagaucugccccaagcuggccgaguacagaaacuggagcaagccccagugcaacaucaccggcuucgcccccuucagcaaggacaacagcaucagacugagcgccggcggcgacaucugggugaccagagagcccuacgugagcugcgaccccgacaagugcuaccaguucgcccugggccagggcaccacccugaacaacgugcacagcaacgacaccgugcacgacagaacccccuacagaacccugcugaugaacgagcugggcgugcccuuccaccugggcaccaagcaggugugcaucgccuggagcagcagcagcugccacgacggcaaggccuggcugcacgugugcgugaccggcgacgacgagaacgccaccgccagcuucaucuacaacggcagacugguggacagcaucgugagcuggagcaagaagauccugagaacccaggagagcgagugcgugugcaucaacggcaccugcaccguggugaugaccgacggcaacgccagcggcaaggccgacaccaagauccuguucaucgaggagggcaagaucgugcacaccagcacccugagcggcagcgcccagcacguggaggagugcagcugcuaccccagauaccccggcgugagaugcgugugcagagacaacuggaagggcagcaacagacccaucguggacaucaacaucaaggacuacagcaucgugagcagcuacgugugcagcggccuggugggcgacacccccagaaagaacgacagcagcagcagcagccacugccuggaccccaacaacgaggagggcggccacggcgugaagggcugggccuucgacgacggcaacgacguguggaugggcagaaccaucagcgagaagcugagaagcggcuacgagaccuucaaggugaucgagggcuggagcaaccccaacagcaagcugcagaucaacagacaggugaucguggacagaggcaacagaagcggcuacagcggcaucuucagcguggagggcaagagcugcaucaacagaugcuucuacguggagcugaucagaggcagaaagcaggagaccgaggugcuguggaccagcaacagcaucgugguguucugcggcaccagcggcaccuacggcaccggcagcuggcccgacggcgccgacaucaaccugaugcccaucuga

SEQ ID NO: 174381 - RNA, 1344 nt, Artificial Sequence; identical to SEQ ID NO: 174380
  derived and/or modified CDS sequence (opt4) from neuraminidase__InfluenzaA__AAZ32958

SEQ ID NO: 174382 - RNA, 1344 nt, Artificial Sequence; identical to SEQ ID NO: 174380
  derived and/or modified CDS sequence (opt4) from neuraminidase__InfluenzaA__AAZ32959

SEQ ID NO: 174383 - RNA, 1410 nt, Artificial Sequence; identical to SEQ ID NO: 174344
  derived and/or modified CDS sequence (opt4) from neuraminidase__InfluenzaA__AAZ38465

SEQ ID NO: 174384 - RNA, 1410 nt, Artificial Sequence; identical to SEQ ID NO: 174344
  derived and/or modified CDS sequence (opt4) from neuraminidase__InfluenzaA__AAZ38476

SEQ ID NO: 174385 - RNA, 1410 nt, Artificial Sequence
  derived and/or modified CDS sequence (opt4) from neuraminidase__InfluenzaA__AAZ38487
augaaccccaaccagaagaucaucaccaucggcagcgugagccugaccaucgccaccaucugcuuccugaugcagaucgccauccuggugaccaccgugacccugcacuucaagcaguacgagugcaacagccugcccaacaaccaggugaugcugugcgagcccaccauccuggagagaaacaucaccgagaucguguaccugaccaacaccaccaucgagaaggagaucugccccaagcuggccgaguacagaaacuggagcaagccccagugcaagaucaccggcuucgcccccuucagcaaggacaacagcaucagacugagcgccggcggcgacaucugggugaccagagagcccuacgugagcugcgaccccgacaagugcuaccaguucgcccugggccagggcaccacccugaacaacagacacagcaacgacaccgugcacgacagaacccccuacagaacccugcugaugaacgagcugggcgugcccuuccaccugggcaccaagcaggugugcaucgccuggagcagcagcagcugccacgacggcaaggccuggcugcacgugugcgugaccggccacgacgagaacgccaccgccagcuucaucuacggcggcagacugguggacagcaucggcagcuggagcaagaagauccugagaacccaggagagcgagugcgugugcaucaacggcaccugcaccguggugaugaccgacggcagcgccagcggcagagccgacaccaagauccuguucaucgaggagggcaagaucauccacaucagccagcugagcggcagcgcccagcacguggaggagugcagcugcuaccccagauaccccggcgugagaugcgugugcagagacaacuggaagggcagcaacagacccaucguggacaucaacgugaaggacuacagcaucgugagcagcuacgugugcagcggccuggugggcgacacccccagaaagaacgacagcagcagcagcagcaacugccugaaccccaacaacgaggagggcggccacggcgugaagggcugggccuucgacgacggcaacgacguguggaugggcagaaccaucagcgagaaguucagaagcggcuacgagaccuucaaggugaucgagggcuggagcaagcccaacagcaagcugcagaucaacagacaggugaucguggacagagacaacagaagcggcuacagcggcaucuucagcguggagggcaagagcugcaucaacagaugcuucuacguggagcugaucagaggcagaaagcaggagaccgaggugugguggaccagcaacagcaucgugguguucugcggcaccagcggcaccuacggcaccggcagcuggcccgacggcgccgacaucaaccugaugcccaucuga

SEQ ID NO: 174386 - RNA, 1410 nt, Artificial Sequence
  derived and/or modified CDS sequence (opt4) from neuraminidase__InfluenzaA__AAZ38509
augaaccccaaccagaagaucaucaccaucggcagcgugagccugaccaucagcaccaucugcuucuucaugcagaucgccauccugaucaccaccgugacccugcacuucaagcaguacgaguucaacagcccccccaacaaccaggugaugcugugcgagcccaccaucaucgagagaaacaucaccgagaucguguaccugaccaacaccaccaucgagaaggagaucugccccaagcuggccgaguacagaaacuggagcaagccccagugcgacaucaccggcuucgcccccuucagcaaggacaacagcaucagacugagcgccggcggcgacaucugggugaccagagagcccuacgugagcugcgaccccgacaagugcuaccaguucgcccugggccagggcaccacccugaacaacgugcacagcaacgacaccgugcacgacagaacccccuacagaacccugcugaugaacgagcugggcgugcccuuccaccugggcaccaagcaggugugcaucgccuggagcagcagcagcugccacgacggcaaggccuggcugcacgugugcgugaccggcgacgacaagaacgccaccgccagcuucaucuacaacggcagacugguggacagcaucgugagcuggagcaaggagauccugagaacccaggagagcgagugcgugugcaucaacggcaccugcaccguggugaugaccgacggcagcgccagcggcaaggccgacaccaagauccuguucaucgaggagggcaagaucgugcacaccagcacccugagcggcagcgcccagcacguggaggagugcagcugcuaccccagauaccccggcgugagaugcgugugcagagacaacuggaagggcagcaacagacccaucguggacaucaacaucaaggacuacagcaucgugagcagcuacgugugcagcggccuggugggcgacacccccagaaagaacgacagcagcagcagcagccacugccuggaccccaacaacgaggagggcggccacggcgugaagggcugggccuucgacgacggcaacgacguguggaugggcagaaccaucagcgagaagcugagaagcggcuacgagaccuucaaggugaucgagggcuggagcaacagcaacagcaagcugcagaucaacagacaggugaucguggacagaggcaacagaagcggcuacagcggcaucuucagcguggagggcaagagcugcaucaacagaugcuucuacguggagcugaucagaggcagaaaggaggagaccgaggugcuguggaccagcaacagcaucgugguguucugcggcaccagcggcaccuacggcaccggcagcuggcccgacggcgccgacaucaaccugaugcccaucuga

SEQ ID NO: 174387 - RNA, 1410 nt, Artificial Sequence
  derived and/or modified CDS sequence (opt4) from neuraminidase__InfluenzaA__AAZ38586
augaaccccaaccagaagaucaucaccaucggcagcgugagccugaccaucagcaccaucugcuucuucaugcagaucgccauccugaucaccaccgugacccugcacuucaagcaguacgaguucaacagcccccccaacaaccaggugaugcugugcgagcccaccaucaucgagagaaacaucaccgagaucguguaccugaccaacaccaccaucgagaaggagaucugccccaagcuggccgaguacagaaacuggagcaagccccagugcgacaucaccggcuucgcccccuucagcaaggacaacagcaucagacugagcgccggcggcgacaucugggugaccagagagcccuacgugagcugcgaccccgacaagugcuaccaguucgcccugggccagggcaccacccugaacaacgugcacagcaacgacaccgugcacgacagaacccccuacagaacccugcugaugaacgagcugggcgugcccuuccaccugggcaccaagcaggugugcaucgccuggagcagcagcagcugccacgacggcaaggccuggcugcacgugugcgugaccggcgacgacaagaacgccaccgccagcuucaucuacaacggcagacugguggacagcaucgugagcuggagcaaggagauccugagaacccaggagagcgagugcgugugcaucaacggcaccugcaccguggugaugaccgacggcagcgccagcggcaaggccgacaccaagauccuguucaucgaggagggcaagaucgugcacaccagcacccugagcggcagcgcccagcacguggaggagugcagcugcuaccccagauaccccggcgugagaugcgugugcagagacaacuggaagggcagcaacagacccaucguggacaucaacaucaaggacuacagcaucgugagcagcuacgugugcagcggccuggugggcgacacccccagaaagaacgacagcagcagcagcagccacugccuggaccccaacaacgaggagggcggccacggcgugaagggcugggccuucgacgacggcaacgacguguggaugggcagaaccaucagcgagaagcugagaagcggcuacgagaccuucaaggugaucgagggcuggagcaaccccaacagcaagcugcagaucaacagacaggugaucguggacagaggcaacagaagcggcuacagcggcaucuucagcguggagggcaagagcugcaucaacagaugcuucuacguggagcugaucagaggcagaaaggaggagaccgaggugcuguggaccagcaacagcaucgugguguucugcggcaccagcggcaccuacggcaccggcagcuggcccgacggcgccgacaucaaccugaugcccaucuga

SEQ ID NO: 174388 - RNA, 1410 nt, Artificial Sequence; identical to SEQ ID NO: 174387
  derived and/or modified CDS sequence (opt4) from neuraminidase__InfluenzaA__AAZ38597

SEQ ID NO: 174389 - RNA, 1410 nt, Artificial Sequence
  derived and/or modified CDS sequence (opt4) from neuraminidase__InfluenzaA__AAZ38608
augaaccccaaccagaagaucaucaccaucggcagcgugagccugaccaucagcaccaucugcuucuucaugcagaucgccauccugaucaccaccgugacccugcacuucaagcaguacgaguucaacagcccccccaacaaccaggugaugcugugcgagcccaccaucaucgagagaaacaucaccgagaucguguaccugaccaacaccaccaucgagaaggagaugugccccaagcuggccgaguacagaaacuggagcaagccccagugcgacaucaccggcuucgcccccuucagcaaggacaacagcaucagacugagcgccggcggcgacaucugggugaccagagagcccuacgugagcugcgaccccgacaagugcuaccaguucgcccugggccagggcaccacccugaacaacgugcacagcaacgacaccgugcacgacagaacccccuacagaacccugcugaugaacgagcugggcgugcccuuccaccugggcaccaagcaggugugcaucgccuggagcagcagcagcugccacgacggcaaggccuggcugcacgugugcgugaccggcgacgacaagaacgccaccgccagcuucaucuacaacggcagacugguggacagcaucgugagcuggagcaagaagauccugagaacccaggagagcgagugcgugugcaucaacggcaccugcaccguggugaugaccgacggcagcgccagcggcaaggccgacaccaagauccuguucaucgaggagggcaagaucauccacaccagcacccugagcggcagcgcccagcacguggaggagugcagcugcuaccccagauaccccggcgugagaugcgugugcagagacaacuggaagggcagcaacagacccaucguggacaucaacaucaaggacuacagcaucgugagcagcuacgugugcagcggccuggugggcgacacccccagaaagaacgacagcagcagcagcagccacugccuggaccccaacaacgaggagggcggccacggcgugaagggcugggccuucgacgacggcaacgacguguggaugggcagaaccaucagcgagaagcugagaagcggcuacgagaccuucaaggugaucgagggcuggagcaagcccaacagcaagcugcagaucaacagacaggugaucguggacagaggcaacagaagcggcuacagcggcaucuucagcguggagggcaagagcugcaucaacagaugcuucuacguggagcugaucagaggcagaaaggaggagaccgaggugcuguggaccagcaacagcaucgugguguucugcggcaccagcggcaccuacggcaccggcagcuggcccgacggcgccgacaccaaccugaugcccaucuga

SEQ ID NO: 174390 - RNA, 1410 nt, Artificial Sequence
  derived and/or modified CDS sequence (opt4) from neuraminidase__InfluenzaA__AAZ38619
augaaccccaaccagaagaucaucaccaucggcagcgugagccugaccaucagcaccaucugcuucuucaugcagaucgccauccugaucaccaccgugacccugcacuucaagcaguacgaguucaacagcccccccaacaaccaggugaugcugugcgagcccaccaucaucgagagaaacaucaccgagaucguguaccugaccaacaccaccaucgagaaggagaugugccccaagcuggccgaguacagaaacuggagcaagccccagugcgacaucaccggcuucgcccccuucagcaaggacaacagcaucagacugagcgccggcggcgacaucugggugaccagagagcccuacgugagcugcgaccccgacaagugcuaccaguucgcccugggccagggcaccacccugaacaacgugcacagcaacgacaccgugcacgacagaacccccuacagaacccugcugaugaacgagcugggcgugcccuuccaccugggcaccaagcaggugugcaucgccuggagcagcagcagcugccacgacggcaaggccuggcugcacgugugcgugaccggcgacgacaagaacgccaccgccagcuucaucuacaacggcagacugguggacagcaucgugagcuggagcaagaagauccugagaacccaggagagcgagugcgugugcaucaacggcaccugcaccguggugaugaccgacggcagcgccagcggcaaggccgacaccaagauccuguucaucgaggagggcaagaucauccacaccagcacccugagcggcagcgcccagcacguggaggagugcagcugcuaccccagauaccccggcgugagaugcgugugcagagacaacuggaagggcagcaacagacccaucguggacaucaacaucaaggacuacagcaucgugagcagcuacgugugcagcggccuggugggcgacacccccagaaagaacgacagcagcagcagcagccacugccuggaccccaacaacgaggagggcggccacggcgugaagggcugggccuucgacgacggcaacgacguguggaugggcagaaccaucagcgagaagcugagaagcggcuacgagaccuucaaggugaucgagggcuggagcaagcccaacagcaagcugcagaucaacagacaggugaucguggacagaggcaacagaagcggcuacagcggcaucuucagcguggagggcaagagcugcaucaacagaugcuucuacguggagcugaucagaggcagaaaggaggagaccgaggugcuguggaccagcaacagcaucgugguguucugcggcaccagcggcaccuacggcaccggcagcuggcccgacggcgccgacaucaaccugaugcccaucuga

SEQ ID NO: 174391 - RNA, 1410 nt, Artificial Sequence; identical to SEQ ID NO: 174387
  derived and/or modified CDS sequence (opt4) from neuraminidase__InfluenzaA__AAZ38641

SEQ ID NO: 174392 - RNA, 1410 nt, Artificial Sequence; identical to SEQ ID NO: 174387
  derived and/or modified CDS sequence (opt4) from neuraminidase__InfluenzaA__AAZ38653

SEQ ID NO: 174393 - RNA, 1410 nt, Artificial Sequence; identical to SEQ ID NO: 174178
  derived and/or modified CDS sequence (opt4) from neuraminidase__InfluenzaA__AAZ43386

SEQ ID NO: 174394 - RNA, 1410 nt, Artificial Sequence
  derived and/or modified CDS sequence (opt4) from neuraminidase__InfluenzaA__AAZ43397
augaaccccaaccagaagaucaucaccaucggcagcgugagccugaccaucgccaccaucugcuuccugaugcagaucgccauccuggugaccaccgugacccugcacuucaagcagcacgagugcaacagcccccccaacaaccaggugaugcugugcgagcccaccaucaucgagagaaacaucaccgagaucguguaccugaccaacaccaccaucgagagagagaucugccccaagcuggccgaguacagaaacuggagcaagccccagugcaacaucaccggcuucgcccccuucagcaaggacaacagcaucagacugagcgccggcggcgacaucugggugaccagagagcccuacgugagcugcgaccccgacaagugcuaccaguucgcccugggccagggcaccacccugaacaacggccacagcaacgacaccgugcacgacagaacccccuacagaacccugcugaugaacgagcugggcgugcccuuccaccugggcaccagacaggugugcaucgccuggagcagcagcagcugccacgacggcaaggccuggcugcacgugugcgugaccggcgacgacaagaacgccaccgccagcuucaucuacaacggcagacugguggacagcaucggcagcuggagcaagaagauccugagaacccaggagagcgagugcgugugcaucaacggcaccugcaccguggugaugaccgacggcagcgccagcggcaaggccgacaccaagauccuguucaucgaggagggcaagaucgugcacaucagcacccugagcggcagcgcccagcacguggaggagugcagcugcuaccccagauaccccggcgugagaugcgugugcagagacaacuggaagggcagcaacagacccaucguggacaucaacgugaaggacuacagcaucgugagcagcuacgugugcagcggccuggugggcgacacccccagaaagaacgacagcagcagcagcagccacugccuggaccccaacaacgaggagggcggccacggcgugaagggcugggccuucgacgacggcaacgacguguggaugggcagaaccaucagcgagaagcugagaagcggcuacgagaccuucaaggugaucgagggcuggagcaagcccaacagcaagcugcagaccaacagacaggugaucguggagagaggcaacagaagcggcuacagcggcaucuucagcguggagggcaagagcugcaucaacagaugcuucuacguggagcugaucagaggcagaaaggaggagaccgaggugugguggaccagcaacagcaucgugguguucugcggcaccagcggcaccuacggcaccggcagcuggcccgacggcgccgacaucaaccugaugcccaucuga

SEQ ID NO: 174395 - RNA, 1410 nt, Artificial Sequence
  derived and/or modified CDS sequence (opt4) from neuraminidase__InfluenzaA__AAZ43408
augaaccccaaccagaagaucaucaccaucggcagcgugagccugaccaucgccaccaucugcuuccugaugcagaucgccauccuggugaccaccgugacccugcacuucaagcaguacgagugcaacagcccccccaacaaccaggugaugcugugcgagcccaccaugaucgagagaaacaucaccgagaucguguaccugaccaacaccaccaucgagaaggagaucugccccaagcuggccgaguacagaaacuggagcaagccccagugcaacaucaccggcuucgcccccuucagcaaggacaacagcaucagacugagcgccggcggcgacaucugggugaccagagagcccuacgugagcugcgaccccgacaagugcuaccaguucgcccugggccagggcaccacccugaacaacggccacagcaacgacaccgugcacgacagaacccccuacagaacccugcugaugaacgagcugggcgugcccuuccaccugggcaccaagcaggugugcaucgccuggagcagcagcagcugccacgacggcaaggccuggcugcacgugugcgugaccggcgacgacgagaacgccaccgccagcuucaucuacaacggcagacugguggacagcaucggcagcuggagcaagaagauccugagaacccaggagagcgagugcgugugcaucaacggcaccugcaccguggugaugaccgacggcagcgccagcggcaaggccgacaccaagauccuguucaucgaggagggcaagaucgugcacaccagcagccugagcggcagcgcccagcacguggaggagugcagcugcuaccccagauaccccggcgugagaugcgugugcagagacaacuggaagggcagcaacagacccaucguggacaucaacgugaaggacuacagcaucgugagcagcuacgugugcagcggccuggugggcgacacccccagaaagaacgacagcagcagcagcagccacugccuggaccccaacaacgaggagggcggccacggcgugaagggcugggccuucgacgacggcaacgacguguggaugggcagaaccaucagcgagaagcugagaagcggcuacgagaccuucaaggugaucgagggcuggagcaagcccaacagcaagcugcagaucaacagacaggugaucguggacagaggcaacagaagcggcuacagcggcaucuucagcguggagagcaagagcugcaucaacagaugcuucuacguggagcugaucagaggcagaaagcaggagaccgaggugcuguggaccagcaacagcaucgugguguucugcggcaccagcggcaccuacggcaccggcagcuggcccgacggcgccgacaucaaccugaugcccaucuga

SEQ ID NO: 174396 - RNA, 1410 nt, Artificial Sequence
  derived and/or modified CDS sequence (opt4) from neuraminidase__InfluenzaA__AAZ74355
augaaccccaaccagaagaucaucaccaucggcagcgugagccugaccaucgccaccaucugcuuccugaugcagaucgccauccuggugaccaccgugacccugcacuucaagcagcacgagugcaacagcccccccaacaaccaggccaugcccugcgagcccgccaucaucgagagaaacaccaccgagaccguguaccugaccaacaccaccaucgagaaggagaucugccccaagcuggccgaguacagaaacuggagcaagccccagugcaacaucaccggcuucgcccccuucagcaaggacaacagcaucagacugagcgccggcggcgacaucugggugaccagagagcccuacgugagcugcgaccccgacaagugcuaccaguucgcccugggccagggcaccacccugaacaacggccacagcaacgacaccgugcacgacagaacccccuacagaacccugcugaugaacgagcugggcgugcccuuccaccugggcaccagacaggugugcaucgccuggagcagcagcagcugccacgacggcaaggccuggcugcacgugugcgugaccggcgacgacgagaacgccaccgccagcuucaucuacaacggcagacugguggacagcaucggcagcuggagcaagaagauccugagaacccaggagagcgagugcgugugcaucaacggcaccugcaccguggugaugaccgacggcagcgccagcggcaaggccgacaccaagauccuguucaucgaggagggcaagaucgugcacaucagcacccugagcggcagcgcccagcacguggaggagugcagcugcuaccccagauaccccggcgugagaugcgugugcagagacaacuggaagggcagcaacagacccaucguggacaucaacgugaaggacuacagcaucgugagcagcuacgugugcagcggccuggugggcgacacccccagaaagaacgacagcuucagcagcagccacugccuggaccccaacaacgaggagggcggccacggcgugaagggcugggccuucgacgacggcaacgacguguggaugggcagaaccaucagcgagaagcugagaagcggcuacgagaccuucaaggugaucgagggcuggagcaagcccaacagcaagcugcagaucaacagacaggugaucguggagagaggcaacagaagcggcuacagcggcaucuucagcguggagggcaagagcugcaucaacagaugcuucuacguggagcugaucagaggcagaaaggaggagaccgaggugugguggaccagcaacagcaucgugguguucugcggcaccagcggcaccuacggcaccggcagcuggcccgacggcgccgacaucaaccugaugcccaucuga

SEQ ID NO: 174397 - RNA, 1410 nt, Artificial Sequence
  derived and/or modified CDS sequence (opt4) from neuraminidase__InfluenzaA__AAZ74366
augaaccccaaccagaagaucaucaccaucggcagcgugagccugaccaucgccaccaucugcuuccugaugcagaucgccauccuggugaccaccgugacccugcacuucaagcaguacgagugcaacagccugcccaacaaccaggugaugcugugcgagcccaccaucaucgagagaaacaucaccgagaucguguaccugaccaacaccaccaucgagaaggagaucugccccaagcuggccgaguacagaaacuggagcaagccccagugcaagaucaccggcuucgcccccuucagcaaggacaacagcaucagacugagcgccggcggcgacaucugggugaccagagagcccuacgugagcugcgaccccgacaagugcuaccaguucgcccugggccagggcaccacccugaacaacagacacagcaacgacaccgugcacgacagaacccccuacagaacccugcugaugaacgagcugggcgugcccuuccaccugggcaccaagcaggugugcaucgccuggagcagcagcagcugccacgacggcaaggccuggcugcacgugugcgugaccggccacgacgagaacgccaccgccagcuucaucuacgacggcagacugguggacagcaucggcagcuggagcaagaagauccugagaacccaggagagcgagugcgugugcaucaacggcaccugcaccguggugaugaccgacggcagcgccagcggcaaggccgacaccaagauccuguucaucgaggagggcaagaucauccacaucagccagcugagcggcagcgcccagcacguggaggagugcagcugcuaccccagauaccccggcgugagaugcgugugcagagacaacuggaagggcagcaacagacccaucguggacaucaacgugaaggacuacagcaucgugagcagcuacgugugcagcggccuggugggcgacacccccagaaagaacgacagcagcagcagcagccacugccugaaccccaacaacgaggagggcggccacggcgugaagggcugggccuucgacgacggcaacgacguguggaugggcagaaccaucagcgagaaguucagaagcggcuacgagaccuucaaggugaucgagggcuggagcaagcccaacagcaagcugcagaucaacagacaggugaucguggacaaggacaacagaagcggcuacagcggcaucuucagcguggagggcaagagcugcaucaacagaugcuucuacguggagcugaucagaggcagaaagcaggagaccgaggugugguggaccagcaacagcaucgugguguucugcggcaccagcggcaccuacggcaccggcagcuggcccgacggcgccgacaucaaccugaugcccaucuga

SEQ ID NO: 174398 - RNA, 1410 nt, Artificial Sequence
  derived and/or modified CDS sequence (opt4) from neuraminidase__InfluenzaA__AAZ74377
augaaccccaaccagaagaucaucaccaucggcagcgugagccugaccaucgccaccaucugcuuccugacccagaucgccauccuggugaccaccgugacccugcacuucaagcaguacgagugcaacagcccccccaacaaccaggugaugcugugcgagcccaccaucaucgagagaaacaucaccgagaucguguaccugaccaacaccaccaucgagaaggagaucugccccaagcuggccgaguacagaaacuggagcaagccccagugcaacaucaccggcuucgcccccuucagcaaggacaacagcaucagacugagcgccggcggcgacaucugggugaccagagagcccuacgugagcugcgaccccgacaagugcuaccaguucgcccugggccagggcaccacccugaacaacggccacagcaacgacaccgugcacgacagaacccccuacagaacccugcugaugaacgagcugggcgugcccuuccaccugggcaccaagcaggugugcaucgccuggagcagcagcagcugccacgacggcaaggccuggcugcacgugugcgugaccggcgacgacaagaacgccaccgccagcuucaucuacaacggcagacugguggacagcaucggcagcuggagcaagaagauccugagaacccaggagagcgagugcgugugcaucaacggcaccugcaccguggugaugaccgacggcagcgccagcggcaaggccgacaccaagauccuguucaucgaggagggcaagaucgugcacaccagccugcugagcggcagcgcccagcacguggaggagugcagcugcuaccccagauaccccggcgugagaugcgugugcagagacaacuggaagggcagcaacagacccaucguggacaucaacgugaaggacuacagcaucgugagcagcuacgugugcagcggccuggugggcgacacccccagaaagaacgacagcagcagcagcagccacugccuggaccccaacaacgaggagggcggccacggcgugaagggcugggccuucgacgacggcaacgacguguggaugggcagaaccaucagagagaagcugagaagcggcuacgagaccuucaaggugaucgagggcuggagcaagcccaacagcaagcugcagaucaacagacaggugaucguggacagagacaacagaagcggcuacagcggcaucuucagcguggagggcaagagcugcaucaacagaugcuucuacguggagcugaucagaggcagaaaccaggagaccgaggugcuguggaccagcaacagcaucgugguguucugcggcaccagcggcaccuacggcaccggcagcuggcccgacggcgccgacaucaaccugaugcccaucuga

SEQ ID NO: 174399 - RNA, 1410 nt, Artificial Sequence
  derived and/or modified CDS sequence (opt4) from neuraminidase__InfluenzaA__AAZ74400
augaaccccaaccagaagaucaucaccaucggcagcgugagccugaccaucgccaccaucugcuuccugaugcagaucgccauccuggugaccaccgugacccugcacuucaagcaguacgagugcaacagcccccccaacaaccaggugaugcugugcgagcccaccaucaucgagagaaacaucaccgagaucguguaccugaccaacaccaccaucgagaaggagaucugccccaagcuggccgaguacagaaacuggagcaagccccagugcaagaucaccggcuucgcccccuucagcaaggacaacagcaucagacugagcgccggcggcgacaucugggugaccagagagcccuacgugagcugcgaccccgacaagugcuaccaguucgcccugggccagggcaccacccugaacaacagacacagcaacgacaccgugcacgacagaacccccuacagaacccugcugaugaacgagcugggcgugcccuuccaccugggcaccaagcaggugugcaucgccuggagcagcagcagcugccacgacggcaaggccuggcugcacgugugcgugaccggccacgacgagaacgccaccgccagccugaucuacgacggcagacugguggacagcaucggcagcuggagcaagaagauccugagaacccaggagagcgagugcgugugcaucaacggcaccugcaccguggugaugaccgacggcagcgccagcggcagagccgacaccaagauccuguucaucgaggagggcaagaucgugcacaccagcaagcugagcggcagcgcccagcacguggaggagugcagcugcuaccccagauaccccggcgugagaugcgugugcagagacaacuggaagggcagcaacagacccaucguggacaucaacgugaaggacuacagcaucgugagcagcuacgugugcagcggccuggugggcgacacccccagaaagaacgacagcagcagcagcagccacugccuggaccccaacaacgaggagggcggccacggcgugaagggcugggccuucgacgacggcaacgacguguggaugggcagaaccaucagcgagaagagcagaagcggcuacgagaccuucaaggugaucgagggcuggagcaagcccaacagcaagcugcagaucaacagacaggugaucguggagagaggcaacaugagcggcuacagcggcaucuucagcguggagggcaagagcugcaucaacagaugcuucuacguggagcugaucagaggcagaaagcaggagaccgaggugugguggaccagcaacagcaucgugguguucugcggcaccagcggcaccuacggcaccggcagcuggcccgacggcgccgacaucaaccugaugcccaucuga

SEQ ID NO: 174400 - RNA, 1410 nt, Artificial Sequence; identical to SEQ ID NO: 174339
  derived and/or modified CDS sequence (opt4) from neuraminidase__InfluenzaA__AAZ74411

SEQ ID NO: 174401 - RNA, 1410 nt, Artificial Sequence
  derived and/or modified CDS sequence (opt4) from neuraminidase__InfluenzaA__AAZ74422
augaaccccaaccagaagaucaucaccaucggcagcgugagccugaccaucagcaccaucugcuucuucaugcagaucgccauccugaucaccaccgugacccugcacuucaagcaguacgaguucaacagcccccccaacaaccaggugaugcugugcgagcccaccaucaucgagagaaacaucaccgagaucguguaccugaccaacaccaccaucgagaaggagaucugccccaagcccgccgaguacagaaacuggagcaagccccagugcgacaucaccggcuucgcccccuucagcaaggacaacagcaucagacugagcgccggcggcgacaucugggugaccagagagcccuacgugagcugcgaccccgacaagugcuaccaguucgcccugggccagggcaccacccugaacaacgugcacagcaacgacaccgugcacgacagaacccccuacagaacccugcugaugaacgagcugggcgugcccuuccaccugggcaccaagcaggugugcaucgccuggagcagcagcagcugccacgacggcaaggccuggcugcacgugugcgugaccggcgacgacaagaacgccaccgccagcuucaucuacaacggcagacugguggacagcaucgugagcuggagcaaggagauccugagaacccaggagagcgagugcgugugcaucaacggcaccugcgccguggugaugaccgacggcagcgccagcggcaaggccgacaccaagauccuguucaucgaggagggcaagaucgugcacaccagcaagcugagcggcagcgcccagcacguggaggagugcagcugcuaccccagauaccccggcaucagaugcgugugcagagacaacuggaagggcagcaacagacccaucguggacaucaacaucaaggacuacagcaucgugagcagcuacgugugcagcggccuggugggcgacacccccagaaagaacgacagcagcagcagcagccacugccuggaccccaacaacgaggagggcggccacggcgugaagggcugggccuucgacgacggcaacgacguguggaugggcagaaccaucagcgagaagcugagaagcggcuacgagaccuucaaggugaucgagggcuggagcaaccccaacagcaagcugcagaucaacagacaggugaucguggacagaggcaacagaagcggcuacagcggcaucuucagcguggagggcaagagcugcaucaacagaugcuucuacguggagcugaucagaggcagaaaggaggagaccgaggugcuguggaccagcaacagcaucgugguguucugcggcaccagcggcaccuacggcaccggcagcuggcccgacggcgccgacaucaaccugaugcccaucuga

SEQ ID NO: 174402 - RNA, 1410 nt, Artificial Sequence; identical to SEQ ID NO: 174387
  derived and/or modified CDS sequence (opt4) from neuraminidase__InfluenzaA__AAZ74444

SEQ ID NO: 174403 - RNA, 1410 nt, Artificial Sequence
  derived and/or modified CDS sequence (opt4) from neuraminidase__InfluenzaA__AAZ74455
augaaccccaaccagaagaucaucaccaucggcagcgugagccugaccaucagcaccaucugcuucuucaugcagaucgccauccugaucaccaccgugacccugcacuucaagcaguacgaguucaacagcccccccaacaaccaggugaugcugugcgagcccaccaucaucgagagaaacaucaccgagaucguguaccugaccaacaccaccaucgagaaggagaucugccccaagcuggccgaguacagaaacuggagcaagccccagugcgacaucaccggcuucgcccccuucagcaaggacaacagcaucagacugagcgccggcggcgacaucugggugaccagagagcccuacgugagcugcgaccccgacaagugcuaccaguucgcccugggccagggcaccacccugaacaacgugcacagcaacgacaccgugcacgacagaacccccuacagaacccugcugaugaacgagcugggcgugcccuuccaccugggcaccaagcaggugugcaucgccuggagcagcagcagcugccacgacggcaaggccuggcugcacgugugcgugaccggcgacgacaagaacgccaccgccagcuucaucuacaacggcagacugguggacagcaucgugagcuggagcaaggacauccugagaacccaggagagcgagugcgugugcaucaacggcaccugcaccguggugaugaccgacggcagcgccagcggcaaggccgacaccaagauccuguucaucgaggagggcaagaucgugcacaccagcacccugagcggcagcgcccagcacguggaggagugcagcugcuaccccagauaccccggcgugagaugcgugugcagagacaacuggaagggcagcaacagacccaucguggacaucaacaucaaggacuacagcaucgugagcagcuacgugugcagcggccuggugggcgacacccccagaaagaacgacagcagcagcagcagccacugccuggaccccaacaacgaggagggcggccacggcgugaagggcugggccuucgacgacggcaacgacguguggaugggcagaaccaucagcgagaagcugagacugggcuacgagaccuucaaggugaucgagggcuggagcaaccccaacagcaagcugcagaucaacagacaggugaucguggagagaggcaacagaagcggcuacagcggcaucuucagcguggagggcaagagcugcaucaacagaugcuucuacguggagcugaucagaggcagaaaggaggagaccgaggugcuguggaccagcaacagcaucgugguguucugcggcaccagcggcaccuacggcaccggcagcuggcccgacggcgccgacaucaaccugaugcccaucuga

SEQ ID NO: 174404 - RNA, 1410 nt, Artificial Sequence; identical to SEQ ID NO: 174387
  derived and/or modified CDS sequence (opt4) from neuraminidase__InfluenzaA__AAZ74477

SEQ ID NO: 174405 - RNA, 1410 nt, Artificial Sequence; identical to SEQ ID NO: 174403
  derived and/or modified CDS sequence (opt4) from neuraminidase__InfluenzaA__AAZ74488

SEQ ID NO: 174406 - RNA, 1410 nt, Artificial Sequence
  derived and/or modified CDS sequence (opt4) from neuraminidase__InfluenzaA__AAZ74499
augaaccccaaccagaagaucaucaccaucggcagcgugagccugaccaucagcaccaucugcuucuucaugcagaucgccauccugaucaccaccgugacccugcacuucaagcaguacgaguucaacagcccccccaacaaccaggugaugcugugcgagcccaccaucaucgagagaaacaucaccgagaucguguaccugaccaacaccaccaucgagaaggagaucugccccaagcuggccgaguacagaaacuggagcaagccccagugcgacaucaccggcuucgcccccuucagcaaggacaacagcaucagacugagcgccggcggcgacaucugggugaccagagagcccuacgugagcugcgaccccgacaagugcuaccaguucgcccugggccagggcaccacccugaacaacgugcacagcaacgacaccgugcacgacagaacccccuacagaacccugcugaugaacgagcugggcgugcccuuccaccugggcaccaagcaggugugcaucgccuggagcagcagcagcugccacgacggcaaggccuggcugcacgugugcgugaccggcgacgacaagaacgccaccgccagcuucaucuacaacggcagacugguggacagcaucgugagcuggagcaaggagauccugagaacccaggagagcgagugcgugugcaucaacggcaccugcgccguggugaugaccgacggcagcgccagcggcaaggccgacaccaagauccuguucaucgaggagggcaagaucgugcacaccagcaagcugagcggcagcgcccagcacguggaggagugcagcugcuaccccagauaccccggcaucagaugcgugugcagagacaacuggaagggcagcaacagacccaucguggacaucaacaucaaggacuacagcaucgugagcagcuacgugugcagcggccuggugggcgacacccccagaaagaacgacagcagcagcagcagccacugccuggaccccaacaacgaggagggcggccacggcgugaagggcugggccuucgacgacggcaacgacguguggaugggcagaaccaucagcgagaagcugagaagcggcuacgagaccuucaaggugaucgagggcuggagcaaccccaacagcaagcugcagaucaacagacaggugaucguggacagaggcaacagaagcggcuacagcggcaucuucagcguggagggcaagagcugcaucaacagaugcuucuacguggagcugaucagaggcagaaaggaggagaccgaggugcuguggaccagcaacagcaucgugguguucugcggcaccagcggcaccuacggcaccggcagcuggcccgacggcgccgacaucaaccugaugcccaucuga

SEQ ID NO: 174407 - RNA, 1410 nt, Artificial Sequence; identical to SEQ ID NO: 174403
  derived and/or modified CDS sequence (opt4) from neuraminidase__InfluenzaA__AAZ74510

SEQ ID NO: 174408 - RNA, 1410 nt, Artificial Sequence; identical to SEQ ID NO: 174406
  derived and/or modified CDS sequence (opt4) from neuraminidase__InfluenzaA__AAZ74521

SEQ ID NO: 174409 - RNA, 1410 nt, Artificial Sequence
  derived and/or modified CDS sequence (opt4) from neuraminidase__InfluenzaA__AAZ74532
augaaccccaaccagaagaucaucaccaucggcagcgugagccugaccaucagcaccaucugcuucuucaugcagaucgccauccugaucaccaccgugacccugcacuucaagcaguacgaguucaacagcccccccaacaaccaggugaugcugugcgagcccaccaucaucgagagaaacaucaccgagaucguguaccugaccaacaccaccaucgagaaggagaucugccccaagcuggccgaguacagaaacuggagcaagccccagugcgacaucaccggcuucgcccccuucagcaaggacaacagcaucagacugagcgccggcggcgacaucugggugaccagagagcccuacgugagcugcgaccccgacaagugcuaccaguucgcccugggccagggcaccacccugaacaacgugcacagcaacgacaccgugcacgacagaacccccuacagaacccugcugaugaacgagcugggcgugcccuuccaccugggcaccaagcaggugugcaucgccuggagcagcagcagcugccacgacggcaaggccuggcugcacgugugcgugaccggcgacgacaagaacgccaccgccagcuucaucuacaacggcagacugguggacagcaucgugagcuggagcaaggacauccugagaacccaggagagcgagugcgugugcaucaacggcaccugcaccguggugaugaccgacggcagcgccagcggcaaggccgacaccaagauccuguucaucgaggagggcaagaucgugcacaccagcacccugagcggcaacgcccagcacguggaggagugcagcugcuaccccagauaccccggcgugagaugcgugugcagagacaacuggaagggcagcaacagacccaucguggacaucaacaucaaggacuacagcaucgugagcagcuacgugugcagcggccuggugggcgacacccccagaaagaacgacagcagcagcagcagccacugccuggaccccaacaacgaggagggcggccacggcgugaagggcugggccuucgacgacggcaacgacguguggaugggcagaaccaucagcgagaagcugagacugggcuacgagaccuucaaggugaucgagggcuggagcaaccccaacagcaagcugcagaucaacagacaggugaucguggagagaggcaacagaagcggcuacagcggcaucuucagcguggagggcaagagcugcaucaacagaugcuucuacguggagcugaucagaggcagaaaggaggagaccgaggugcuguggaccagcaacagcaucgugguguucugcggcaccagcggcaccuacggcaccggcagcuggcccgacggcgccaacaucaaccugaugcccaucuga

SEQ ID NO: 174410 - RNA, 1410 nt, Artificial Sequence; identical to SEQ ID NO: 174387
  derived and/or modified CDS sequence (opt4) from neuraminidase__InfluenzaA__AAZ74543

SEQ ID NO: 174411 - RNA, 1410 nt, Artificial Sequence; identical to SEQ ID NO: 174339
  derived and/or modified CDS sequence (opt4) from neuraminidase__InfluenzaA__AAZ74565

SEQ ID NO: 174412 - RNA, 1410 nt, Artificial Sequence; identical to SEQ ID NO: 174387
  derived and/or modified CDS sequence (opt4) from neuraminidase__InfluenzaA__AAZ74598

SEQ ID NO: 174413 - RNA, 1410 nt, Artificial Sequence
  derived and/or modified CDS sequence (opt4) from neuraminidase__InfluenzaA__AAZ74609
augaaccccaaccagaagaucaucaccaucggcagcgugagccugaccaucgccaccaucugcuuccugaugcagaucgccauccuggugaccaccgugacccugcacuucaagcaguacgagugcaacagcccccccaacaaccaggugaugcugugcgagcccaucaucaucgagagaaacaucaccgagaucguguaccugaccaacaccaccaucgagaaggagaucugccccaagcuggccgaguacagaaacuggagcaagccccagugcaagaucaccggcuucgcccccuucagcaaggacaacagcaucagacugagcgccggcggcgacaucugggugaccagagagcccuacgugagcugcgaccccgacaagugcuaccaguucgcccugggccagggcaccacccugaacaacagacacagcaacgacaccgugcacgacagaacccccuacagaacccugcugaugaacgagcugggcgugcccuuccaccugggcaccaagcaggugugcaucgccuggagcagcagcagcugccacgacggcaaggccuggcugcacgugugcgugaccggccacgacgagaacgccaccgccagcuucaucuacgacggcagacugguggacagcaucagcagcuggagcaagaacauccugagaacccaggagagcgagugcgugugcaucaacggcaccugcaccguggugaugaccgacggcagcgccagcgagagagccgacaccaagauccuguucaucgaggagggcaagaucgugcacaucagcccccugagcggcagcgcccagcacguggaggagugcagcugcuaccccagauaccccggcgugagaugcgugugcagagacaacuggaagggcagcaacagacccaucguggacaucaacgugaaggacuacagcaucgugagcagcuacgugugcagcggccuggugggcgacacccccagaaagaacgacagcagcagcagcagcuacugccugaaccccaacaacgaggagggcggccacggcgugaagggcugggccuucgacgacggcaacgacguguggaugggcagaaccaucagcgagaagcugagaagcggcuacgagaccuucaaggugaucggcggcuggagcaagcccaacagcaagcugcagaucaacagacaggugaucguggacagaggcaacagaagcggcuacagcggcaucuucagcguggagggcaagagcugcgugaacagaugcuucuacguggagcugaucagaggcagaaagcaggagaccgaggugugguggaccagcaacagcaucgugguguucugcggcaccagcggcaccuacggcaccggcagcuggcccgacggcgccgacaucaaccugaugcccaucuga

SEQ ID NO: 174414 - RNA, 1410 nt, Artificial Sequence; identical to SEQ ID NO: 174121
  derived and/or modified CDS sequence (opt4) from neuraminidase__InfluenzaA__AAZ74620

SEQ ID NO: 174415 - RNA, 1410 nt, Artificial Sequence; identical to SEQ ID NO: 174233
  derived and/or modified CDS sequence (opt4) from neuraminidase__InfluenzaA__AAZ79508

SEQ ID NO: 174416 - RNA, 1410 nt, Artificial Sequence
  derived and/or modified CDS sequence (opt4) from neuraminidase__InfluenzaA__AAZ79519
augaaccccaaccagaagaucaucaccaucggcagcgugagccugaccaucgccaccaucugcuuccugaugcagaucgccauccuggugaccaccgugacccugcacuucaagcaguacgagugcaacagcccccccaacaaccaggugaugcugugcgagcccaccauccuggagagaaacaucaccgagaucguguaccugaccaacaccaccaucgagaaggagaucugccccaagcuggccgaguacagaaacuggagcaagccccagugcaagaucaccggcuucgcccccuucagcaaggacaacagcaucagacugagcgccggcggcgacaucugggugaccagagagcccuacgugagcugcgaccccgacaagugcuaccaguucgcccugggccagggcaccacccugaacaacagacacagcaacgacaccgugcacgacagaacccccuacagaacccugcugaugaacgagcugggcgugcccuuccaccugggcaccaagcaggugugcaucgccuggagcagcagcagcugccacgacggcaaggccuggcugcacgugugcgugaccggccacgacaagaacgccaccgccagcuucaucuacggcggcagacugguggacagcaucggcagcuggagcaagaagauccugagaacccaggagagcgagugcgugugcaucaacggcaccugcaccguggugaugaccgacggcagcgccagcggcagagccgacaccaagauccuguucaucgaggagggcaagaucauccacaucagccagcugagcggcagcgcccagcacguggaggagugcagcugcuaccccagauaccccggcgugagaugcgugugcagagacaacuggaagggcagcaacagacccaucguggacaucaacgugaaggacuacagcaucgugagcagcuacgugugcagcggccuggugggcgacacccccagaaagaacgacagcagcagcagcagccacugccugaaccccaacaacgaggagggcggccacggcgugaagggcugggccuucgacgacggcaacgacguguggaugggcagaaccaucagcgagaaguucagaagcggcuacgagaccuucaaggugaucgagggcuggagcagacccaacagcaagcugcagaucaacagacaggugaucguggacagagacaacagaagcggcuacagcggcaucuucagcguggagggcaagagcugcaucaacagaugcuucuacguggagcugaucagaggcagaaagcaggagaccgaggugugguggaccagcaacagcaucgugguguucugcggcaccagcggcaccuacggcaccggcagcuggcccgacggcgccgacaucaaccugaugcccaucuga

SEQ ID NO: 174417 - RNA, 1410 nt, Artificial Sequence; identical to SEQ ID NO: 174197
  derived and/or modified CDS sequence (opt4) from neuraminidase__InfluenzaA__AAZ79530

SEQ ID NO: 174418 - RNA, 1410 nt, Artificial Sequence
  derived and/or modified CDS sequence (opt4) from neuraminidase__InfluenzaA__AAZ79552
augaaccccaaccagaagaucaucaccaucggcagcgugagccugaccaucgccaccaucugcuuccugaugcagaucgccauccuggugaccaccgugacccugcacuucaagcaguacgagugcaacagcccccccaacaaccaggugaugcugugcgagcccaccaucaucgagagaaacaucaccgagaucguguaccugaccaacaccaccaucgagaaggagaucugccccaagcuggccgaguacagaaacuggagcaagccccagugcaacaucaccggcuucgcccccuucagcaaggacaacagcaucagacugagcgccggcggcgacaucugggugaccagagagcccuacgugagcugcgaccccgacaagugcuaccaguucgcccugggccagggcaccacccugaacaacggccacagcaacgacaccgugcacgacagaaccccccacagaacccugcugaugaacgagcugggcgugcccuuccaccugggcaccaagcaggugugcaucgccuggagcagcagcagcugccacgacggcaaggccuggcugcacgugugcgugaccggcgacgacaagaacgccaccgccagcuucaucuacaacggcagacugguggacagcaucggcagcuggagcaagaagauccugagaacccaggagagcgagugcgugugcaucaacggcaccugcaccguggugaugaccgacggcagcgccagcggcaaggccgacaccaagauccuguucaucgaggagggcaagaucgugcacaccagccugcugagcggcagcgcccagcacguggaggagugcagcugcuaccccagauaccccggcgugagaugcgugugcagagacaacuggaagggcagcaacagacccaucguggacaucaacgugaaggacuacagcaucgugagcagcuacgugugcagcggccuggugggcgacacccccagaaagaacgacagcagcagcagcagccacugccuggaccccaacaacgaggagggcggccacggcgugaagggcugggccuucgacgacggcaacgacguguggaugggcagaaccaucagcgagaagcugagaagcggcuacgagaccuucaaggugaucgagggcuggagcaagcccaacagcaagcugcagaucaacagacaggugaucguggacagagacaacagaagcggcuacagcggcaucuucagcguggagggcaagagcugcaucaacagaugcuucuacguggagcugaucagaggcagaaaccaggagaccgaggugcuguggaccagcaacagcaucgugguguucugcggcaccagcggcaccuacggcaccggcagcuggcccgacggcgccgacaucaaccugaugcccaucuga

SEQ ID NO: 174419 - RNA, 1410 nt, Artificial Sequence; identical to SEQ ID NO: 174339
  derived and/or modified CDS sequence (opt4) from neuraminidase__InfluenzaA__AAZ79563

SEQ ID NO: 174420 - RNA, 1410 nt, Artificial Sequence; identical to SEQ ID NO: 174339
  derived and/or modified CDS sequence (opt4) from neuraminidase__InfluenzaA__AAZ79574

SEQ ID NO: 174421 - RNA, 1410 nt, Artificial Sequence; identical to SEQ ID NO: 174339
  derived and/or modified CDS sequence (opt4) from neuraminidase__InfluenzaA__AAZ79585

SEQ ID NO: 174422 - RNA, 1410 nt, Artificial Sequence; identical to SEQ ID NO: 174406
  derived and/or modified CDS sequence (opt4) from neuraminidase__InfluenzaA__AAZ79618

SEQ ID NO: 174423 - RNA, 1410 nt, Artificial Sequence; identical to SEQ ID NO: 174387
  derived and/or modified CDS sequence (opt4) from neuraminidase__InfluenzaA__AAZ79633

SEQ ID NO: 174424 - RNA, 1410 nt, Artificial Sequence; identical to SEQ ID NO: 174406
  derived and/or modified CDS sequence (opt4) from neuraminidase__InfluenzaA__AAZ79945

SEQ ID NO: 174425 - RNA, 1410 nt, Artificial Sequence; identical to SEQ ID NO: 174403
  derived and/or modified CDS sequence (opt4) from neuraminidase__InfluenzaA__AAZ79966

SEQ ID NO: 174426 - RNA, 1410 nt, Artificial Sequence; identical to SEQ ID NO: 174387
  derived and/or modified CDS sequence (opt4) from neuraminidase__InfluenzaA__AAZ79977

SEQ ID NO: 174427 - RNA, 1410 nt, Artificial Sequence; identical to SEQ ID NO: 174387
  derived and/or modified CDS sequence (opt4) from neuraminidase__InfluenzaA__AAZ79988

SEQ ID NO: 174428 - RNA, 1410 nt, Artificial Sequence
  derived and/or modified CDS sequence (opt4) from neuraminidase__InfluenzaA__AAZ79999
augaaccccaaccagaagaucaucaccaucggcagcgugagccugaccaucagcaccaucugcuucuucaugcagaucgccauccugaucaccaccgugacccugcacuucaagcaguacgaguucaacagcccccccaacaaccagaugaugcugugcgagcccaccaucaucgagagaaacaucaccgagaucguguaccugaccaacaccaccaucgagaaggagaucugccccaagcuggccgaguacagaaacuggagcaagccccagugcgacaucaccggcuucgcccccuucagcaaggacaacagcaucagacugagcgccggcggcgacaucugggugaccagagagcccuacgugagcugcgaccccgacaagugcuaccaguucgcccugggccagggcaccacccugaacaacgugcacagcaacgacaccgugcacgacagaacccccuacagaacccugcugaugaacgagcugggcgugcccuuccaccugggcaccaagcaggugugcaucgccuggagcagcagcagcugccacgacggcaaggccuggcugcacgugugcgugaccggcgacgacaagaacgccaccgccagcuucaucuacaacggcagacugguggacagcaucgugagcuggagcaaggacauccugagaacccaggagagcgagugcgugugcaucaacggcaccugcaccguggugaugaccgacggcagcgccagcggcaaggccgacaccaagauccuguucaucgaggagggcaagaucgugcacaccagcacccugagcggcagcgcccagcacguggaggagugcagcugcuaccccagauaccccggcgugagaugcgugugcagagacaacuggaagggcagcaacagacccaucguggacaucaacaucaaggacuacagcaucgugagcagcuacgugugcagcggccuggugggcgacacccccagaaagaacgacagcagcagcagcagccacugccuggaccccaacaacgaggagggcggccacggcgugaagggcugggccuucgacgacggcaacgacguguggaugggcagaaccaucagcgagaagcugagacugggcuacgagaccuucaaggugaucgagggcuggagcaaccccaacagcaagcugcagaucaacagacaggugaucguggagagaggcaacagaagcggcuacagcggcaucuucagcguggagggcaagagcugcaucaacagaugcuucuacguggagcugaucagaggcagaaaggaggagaccgaggugcuguggaccagcaacagcaucgugguguucugcggcaccagcggcaccuacggcaccggcagcuggcccgacggcgccgacaucaaccugaugcccaucuga

SEQ ID NO: 174429 - RNA, 1410 nt, Artificial Sequence; identical to SEQ ID NO: 174175
  derived and/or modified CDS sequence (opt4) from neuraminidase__InfluenzaA__AAZ80010

SEQ ID NO: 174430 - RNA, 1410 nt, Artificial Sequence
  derived and/or modified CDS sequence (opt4) from neuraminidase__InfluenzaA__AAZ80021
augaaccccaaccagaagaucaucaccaucggcagcgugagccugaccaucagcaccaucugcuucuucaugcagaucgccauccugaucaccaccgugacccugcacuucaagcaguacgaguucaacagcccccccaacaaccaggugaugcugugcgagcccaccaucaucgagagaaacaucaccgagaucguguaccugaccaacaccaccaucgagaaggagaucugccccaagcuggccgaguacagaaacuggagcaagccccagugcgacaucaccggcuucgcccccuucagcaaggacaacagcaucagacugagcgccggcggcgacaucugggugaccagagagcccuacgugagcugcgaccccgacaagugcuaccaguucgcccugggccagggcaccacccugaacaacgugcacagcaacgacaccgugagagacagaacccccuacagaacccugcugaugaacgagcugggcgugcccuuccaccugggcaccaagcaggugugcaucgccuggagcagcagcagcugccacgacggcaaggccuggcugcacgugugcgugaccggcgacgacaagaacgccaccgccagcuucaucuacaacggcagacugguggacagcaucgugagcuggagcaaggagauccugagaacccaggagagcgagugcgugugcaucaacggcaccugcgccguggugaugaccgacggcagcgccagcggcaaggccgacaccaagauccuguucaucgaggagggcaagaucgugcacaccagcaagcugagcggcagcgcccagcacguggaggagugcagcugcuaccccagauaccccggcaucagaugcgugugcagagacaacuggaagggcagcaacagacccaucguggacaucaacaucaaggacuacagcaucgugagcagcuacgugugcagcggccuggugggcgacacccccagaaagaacgacagcagcagcagcagccacugccuggaccccaacaacgaggagggcggccacggcgugaagggcugggccuucgacgacggcaacgacguguggaugggcagaaccaucagcgagaagcugagaagcggcuacgagaccuucaaggugaucgagggcuggagcaaccccaacagcaagcugcagaucaacagacaggugaucguggacagaggcaacagaagcggcuacagcggcaucuucagcguggagggcaagagcugcaucaacagaugcuucuacguggagcugaucagaggcagaaaggaggagaccgaggugcuguggaccagcaacagcaucgugguguucugcggcaccagcggcaccuacggcaccggcagcuggcccgacggcgccgacaucaaccugaugcccaucuga

SEQ ID NO: 174431 - RNA, 1410 nt, Artificial Sequence
  derived and/or modified CDS sequence (opt4) from neuraminidase__InfluenzaA__AAZ83245
augaaccccaaccagaagaucaucaccaucggcagcgugagccugaccaucagcaccaucugcuucuucaugcagaucgccauccugaucaccaccgugacccugcacuucaagcaguacgaguucaaccccccccccaacaaccaggugaugcugugcgagcccaccaucaucgagagaaacaucaccgagaucguguaccugaccaacaccaccaucgagaaggagaucugccccaagcuggccgaguacagaaacuggagcaagccccagugcaacaucaccggcuucgcccccuucagcaaggacaacagcaucagacugagcgccggcggcgacaucugggugaccagagagcccuacgugagcugcgaccccgacaagugcuaccaguucgcccugggccagggcaccacccugaacaacgugcacagcaacgacaccgugcacgacagaacccccuacagaacccugcugaugaacgagcugggcgugcccuuccaccugggcaccaagcaggugugcaucgccuggagcagcagcagcugccacgacggcaaggccuggcugcacgugugcgugaccggcgacgacgagaacgccaccgccagcuucaucuacaacggcagacugguggacagcaucgugagcuggagcaagaagauccugagaacccaggagagcgagugcgugugcaucaacggcaccugcaccguggugaugaccgacggcagcgccagcggcaaggccgacaccaagauccuguucaucgaggagggcaagaucgugcacaccagcacccugagcggcagcgcccagcacguggaggagugcagcugcuaccccagauaccccggcgugagaugcgugugcagagacaacuggaagggcagcaacagacccaucguggacaucaacaucaaggacuacagcaucgugagcagcuacgugugcagcggccuggugggcgacacccccagaaagaacgacagcagcagcagcagccacugccuggaccccaacaacgaggagggcggccacggcgugaagggcugggccuucgacgacggcaacgacguguggaugggcagaaccaucagcgagaagcugagaagcggcuacgagaccuucaaggugaucgagggcuggagcaaccccaacagcaagcugcagaucaacagacaggugaucguggacagagacaacagaagcggcuacagcggcaucuucagcguggagggcaagagcugcaucaacagaugcuucuacguggagcugaucagaggcagaaaccaggagaccgaggugcuguggaccagcaacagcaucgugguguucugcggcaccagcggcaccuacggcaccggcagcuggcccgacggcgccgacaucaaccugaugcccaucuga

SEQ ID NO: 174432 - RNA, 1413 nt, Artificial Sequence
  derived and/or modified CDS sequence (opt4) from neuraminidase__InfluenzaA__AAZ83256
augaaccccaaccagaagaucaucaccaucggcagcaucagcaucgccaucggcaucaucagccugaugcugcagaucggcaacaucaucagcaucugggccagccacagcauccagaccggcagccagaaccacaccggcaucugcaaccagagaaucaucaccuacgagaacagcaccugggugaaccacaccuacgugaacaucaacaacaccaacgugguggccggcaaggacaagaccagcgugacccuggccggcaacagcagccugugcagcaucagcggcugggccaucuacaccaaggacaacagcaucagaaucggcagcaagggcgacguguucgugaucagagagcccuucaucagcugcagccaccuggagugcagaaccuucuuccugacccagggcgcccugcugaacgacaagcacagcaacggcaccgugaaggacagaagccccuacagagcccugaugagcugcccccugggcgaggcccccagccccuacaacagcaaguucgagagcguggccuggagcgccagcgccugccacgacggcaugggcuggcugaccaucggcaucagcggccccgacaacggcgccguggccgugcugaaguacaacggcaucaucaccgagaccaucaagagcuggaagaagagaauccugagaacccaggagagcgagugcgugugcgugaacggcagcugcuucaccaucaugaccgacggccccagcaacggcgccgccagcuacaagaucuucaagaucgagaagggcaaggugaccaagagcaucgagcugaacgcccccaacuuccacuacgaggagugcagcugcuaccccgacaccggcaccgugaugugcgugugcagagacaacuggcacggcagcaacagacccugggugagcuucaaccagaaccuggacuaccagaucggcuacaucugcagcggcguguucggcgacaaccccagacccaaggacggcaagggcagcugcaaccccgugaccguggacggcgccgacggcgugaagggcuucagcuacaaguacggcaacggcguguggaucggcagaaccaagagcaacagacugagaaagggcuucgagaugaucugggaccccaacggcuggaccgacaccgacagcgacuucagcgugaagcaggacgugguggccaucaccgacuggagcggcuacagcggcagcuucgugcagcaccccgagcugaccggccuggacugcaucagacccugcuucuggguggagcuggugagaggccugcccagagagaacaccaccaucuggaccagcggcagcagcaucagcuucugcggcaucgacagcgacaccgccaacuggagcuggcccgacggcgccgagcugcccuucaccaucgacaaguga

SEQ ID NO: 174433 - RNA, 1410 nt, Artificial Sequence; identical to SEQ ID NO: 174339
  derived and/or modified CDS sequence (opt4) from neuraminidase__InfluenzaA__AAZ83269

SEQ ID NO: 174434 - RNA, 1410 nt, Artificial Sequence; identical to SEQ ID NO: 174339
  derived and/or modified CDS sequence (opt4) from neuraminidase__InfluenzaA__AAZ83280

SEQ ID NO: 174435 - RNA, 1410 nt, Artificial Sequence; identical to SEQ ID NO: 174313
  derived and/or modified CDS sequence (opt4) from neuraminidase__InfluenzaA__AAZ83291

SEQ ID NO: 174436 - RNA, 1413 nt, Artificial Sequence
  derived and/or modified CDS sequence (opt4) from neuraminidase__InfluenzaA__AAZ83302
augaaccccaaccagaagaucaucaccaucggcagcaucagcaucgccaucggcaucaucagccugaugcugcagaucggcaacaucaucagcaucugggccagccacagcauccagaccggcagccagaaccacaccggcgugugcaaccagagaaucaucaccuacgagaacagcaccugggugaaccacaccuacgugaacaucaacaacaccaacgugaucgccggcaaggacaaggccagcgugacccuggccggcaacagcagccugugcagcaucagcggcugggccaucuacaccaaggacaacagcaucagaaucggcagcaagggcgacguguucgugaucagagagcccuucaucagcugcagccacagcgagugcagaaccuucuuccugacccagggcgcccugcugaacgacaagcacagcaacggcaccgugaaggacagaagccccuacagagcccugaugagcugcccccugggcgaggcccccagccccuacaacagcaaguucgagagcguggccuggagcgccagcgccugccacgacggcaugggcuggcugaccaucggcaucagcggccccgacaacggcgccguggccgugcugaaguacaacggcaucaucaccgagaccaucaagagcuggaagaagcagauccugagaacccaggagagcgagugcgugugcgugaacggcagcugcuucaccaucaugaccgacggccccagcaacggcgccgccagcuacaagaucuucaagaucgagaagggcaaggugaccaagagcaucgagcugaacgcccccaacuuccacuacgaggagugcagcugcuaccccgacaccggcaccgugaugugcgugugcagagacaacuggcacggcagcaacagacccugggugagcuucaaccagaaccuggacuaccagaucggcuacaucugcagcggcguguucggcgacaaccccagacccaaggacggcgagggcagcugcaaccccgugaccguggacggcgccaacggcgugaagggcuucagcuacaaguacggcaacggcguguggaucggcagaaccaagagcaacagacugagaaagggcuucgagaugaucugggaccccaacggcuggaccgacaccgacagcgacuucagcgugaagcaggacgugguggccaucaccgacuggagcggcuacagcggcagcuucgugcagcaccccgagcugaccggccuggacugcaucagacccugcuucuggguggagcuggugagaggccugcccaaggagaacaccaccaucuggaccagcggcagcagcaucagcuucugcggcgugaacagcgacaccgccaacuggagcuggcccgacggcgccgagcugcccuucaccaucgacaaguga

SEQ ID NO: 174437 - RNA, 1410 nt, Artificial Sequence
  derived and/or modified CDS sequence (opt4) from neuraminidase__InfluenzaA__AAZ83315
augaaccccaaccagaagaucaucaccaucggcagcgugagccugaccaucgccaccaucugcuuccugaugcagaucgccauccuggugaccaccgugacccugcacuucaagcaguacgagugcaacagccugcccaacaaccaggugaugcugugcgagcccaccaucaucgagagaaacaucaccgagaucguguaccugaccaacaccaccaucgagaaggagaucugccccaagcuggccgaguacagaaacuggagcaagccccagugcaagaucaccggcuucgcccccuucagcaaggacaacagcaucagacugagcgccggcggcgacaucugggugaccagagagcccuacgugagcugcgaccccgacaagugcuaccaguucgcccugggccagggcaccacccugaacaacagacacagcaacgacaccgugcacgacagaacccccuacagaacccugcugaugaacgagcugggcgugcccuuccaccugggcaccaagcaggugugcaucgccuggagcagcagcagcugccacgacggcaaggccuggcugcacgugugcgugaccggccacgacgagaacgccaccgccagcuucaucuacgacggcagacugguggacagcaucggcagcuggagcaagaagauccugagaacccaggagagcgagugcgugugcaucaacggcaccugcaccguggugaugaccgacggcagcgccagcggcagagccaacaccaagauccuguucaucgaggagggcaagaucauccacaucagccagcugagcggcagcgcccagcacguggaggagugcagcugcuaccccagauaccccggcgugagaugcgugugcagagacaacuggaagggcagcaacagacccaucguggacaucaacgugaaggacuacagcaucgccagcagcuacgugugcagcggccuggugggcgacacccccagaaagaacgacagcagcagcagcagccacugccugaaccccaacaacgaggagggcggccacggcgugaagggcugggccuucgacgacggcaacgacguguggaugggcagaaccaucagcgagaaguucagaagcggcuacgagaccuucaaggugaucgagggcuggagcaagcccaacagcaagcugcagaucaacagacaggugaucguggacagagacaacagaagcggcuacagcggcaucuucagcguggagggcaagagcugcaucaacagaugcuucuacguggagcugaucagaggcagaaagcaggagaccgaggugugguggaccagcaacagcaucgugguguucugcggcaccagcggcaccuacggcaccggcagcuggcccgacggcgccgacaucaaccugaugcccaucuga

SEQ ID NO: 174438 - RNA, 1410 nt, Artificial Sequence
  derived and/or modified CDS sequence (opt4) from neuraminidase__InfluenzaA__AAZ83326
augaaccccaaccagaagaucaucaccaucggcagcgugagccugaccaucgccaccaucugcuuccugaugcagaucgccauccuggugaccaccgugacccugcacuucaagcaguacgagugcgacagccugcccaacaaccaggugaugcugugcgagcccaccaucaucgagagaaacaucaccgagaucguguaccugaccaacaccaccaucgagaaggagaucugccccaagcuggccgaguacagaaacuggagcaagccccagugcaagaucaccggcuucgcccccuucagcaaggacaacagcaucagacugagcgccggcggcgacaucugggugaccagagagcccuacgugagcugcgaccccgacaagugcuaccaguucgcccugggccagggcaccacccugaacaacagacacagcaacgacaccgugcacgacagaacccccuacagaacccugcugaugaacgagcugggcgugcccuuccaccugggcaccaagcaggugugcaucgccuggagcagcagcagcugccacgacggcaaggccuggcugcacgugugcgugaccggccacgacgagaacgccaccgccagcuucaucuacgacggcagacugguggacagcaucggcagcuggagcaagaagauccugagaacccaggagagcgagugcgugugcaucaacggcaccugcaccguggugaugaccgacggcagcgccagcggcagagccgacaccaagauccuguucaucgaggagggcaagaucauccacaucagccagcugagcggcagcgcccagcacguggaggagugcagcugcuaccccagauaccccggcgugagaugcgugugcagagacaacuggaagggcagcaacagacccaucguggacaucaacgugaaggacuacagcaucgugagcagcuacgugugcagcggccuggugggcgacacccccagaaagaacgacagcagcagcagcagccacugccugaaccccaacaacgaggagggcggccacggcgugaagggcugggccuucgacgacggcaacgacguguggaugggcagaaccaucagcgagaaguucagaagcggcuacgagaccuucaaggugaucgagggcuggagcaagcccaacagcaagcugcagaucaacagacaggugaucguggacagagacaacagaagcggcuacagcggcaucuucagcguggagggcaagagcugcaucaacagaugcuucuacguggagcugaucagaggcagaaagcaggagaccgaggugugguggaccagcaacagcaucgugguguucugcggcaccagcggcaccuacggcaccggcagcuggcccgacggcgccgacaucaaccugaugcccaucuga

SEQ ID NO: 174439 - RNA, 1410 nt, Artificial Sequence
  derived and/or modified CDS sequence (opt4) from neuraminidase__InfluenzaA__AAZ83374
augaaccccaaccagaagaucaucaccaucggcagcgugagccugaccaucagcaccaucugcuucuucaugcagaucgccauccugaucaccaccgugacccugcacuucaagcaguacgaguucaacagcccccccaacaaccaggugaugcugugcgagcccaccaucaucgagagaaacaucaccgagaucguguaccugaccaacaccaccaucgagaaggagaucugccccaagcuggccgaguacagaaacuggagcaagccccagugcgacaucaccggcuucgcccccuucagcaaggacaacagcaucagacugagcgccggcggcgacaucugggugaccagagagcccuacgugagcugcgaccccgacaagugcuaccaguucgcccugggccagggcaccacccugaacaacgugcacagcaacgacaccgugcacgacagaacccccuacagaacccugcugaugaacgagcugggcgugcccuuccaccugggcaccaagcaggugugcaucgccuggagcagcagcagcugccacgacggcaaggccuggcugcacgugugcgugaccggcgacgacaagaacgccaccgccagcuucaucuacaacggcagacugguggacagcaucgugagcuggagcaaggagauccugagaacccaggagagcgagugcgugugcaucaacggcaccugcaccguggugaugaccgacggcagcgccagcggcaaggccgacaccaagauccuguucaucgaggagggcaagaucgugcacaccagcacccugagcggcagcgcccagcacguggaggagugcagcugcuaccccagauaccccggcgugagaugcgugugcagagacaacuggaagggcagcaacagacccaucguggacaucaacaucaaggacuacagcaucgugagcagcuacgugugcagcggccuggugggcgacacccccagaaagaacgacagcagcagcagcagccacugccuggaccccaacaacgaggagggcggccacggcgugaagggcugggccuucgacgacggcaacgacguguggaugggcagaaccaucagcgagaagcugagaaccggcuacgagaccuucaaggugaucgagggcuggagcaaccccaacagcaagcugcagaucaacagacaggugaucguggacagaggcaacagaagcggcuacagcggcaucuucagcguggagggcaagagcugcaucaacagaugcuucuacguggagcugaucagaggcagaaaggaggagaccgaggugcuguggaccagcaacagcaucgugguguucugcggcaccagcggcaccuacggcaccggcagcuggcccgacggcgccgacaucaaccugaugcccaucuga

SEQ ID NO: 174440 - RNA, 1410 nt, Artificial Sequence; identical to SEQ ID NO: 174406
  derived and/or modified CDS sequence (opt4) from neuraminidase__InfluenzaA__AAZ83385

SEQ ID NO: 174441 - RNA, 1413 nt, Artificial Sequence
  derived and/or modified CDS sequence (opt4) from neuraminidase__InfluenzaA__AAZ85129
augaacaccaaccagaagaucaucaccaucggcagcaucagcaucgccaucggcaucaucagccugaugcugcagaucggcaacaucaucagcaucugggccagccacagcauccagaccggcagccagaaccacaccggcgugugcaaccagagaaucaucaccuacgagaacagcaccugggugaaccacaccuacgugaacaucaacaacaccaacgugaucgccggcaaggacaagaccagcgugacccuggccggcaacagcagccugugcagcaucagcggcugggccaucuacaccaaggacaacagcaucagaaucggcagcaagggcgacguguucgugaucagagagcccuucaucagcugcagccaccuggagugcagaaccuucuuccugacccagggcgcccugcugaacgacaagcacagcaacggcaccgugaaggacagaagccccuacagagcccugaugagcugcccccugggcgaggcccccagccccuacaacagcaaguucgagagcguggccuggagcgccagcgccugccacgacggcaugggcuggcugaccaucggcaucagcggccccgacaacggcgccguggccgugcugaaguacaacggcaucaucaccgagaccaucaagagcuggaagaagcagauccugagaacccaggagagcgagugcgugugcgugaacggcagcugcuucaccaucaugaccgacggccccagcaacggcgccgccagcuacaagaucuucaagaucgagaagggcaaggugaccaagagcaucgagcugaacgcccccaacuuccacuacgaggagugcagcugcuaccccgacaccggcaccgugaugugcgugugcagagacaacuggcacggcagcaacagacccugggugagcuucaaccagaaccuggacuaccagaucggcuacaucugcagcggcguguucggcgacaaccccagacccaaggacggcgagggcagcugcaaccccgugaccguggacggcgccaacggcgugaagggcuucagcuacaaguacggcaacggcguguggaucggcagaaccaagagcaacagacugagaaagggcuucgagaugaucugggaccccaacggcuggaccgacaccgacagcgacuucagcgugaagcaggacgugguggccaucaccgacuggagcggcuacagcggcagcuucgugcagcaccccgagcugaccggccuggacugcaucagacccugcuucuggguggagcuggugagaggccugcccaaggagaacaccaccaucuggaccagcggcagcagcaucagcuucugcggcgugaacagcgacaccgccaacuggagcuggcccgacggcgccgagcugcccuucaccaucgacaaguga

SEQ ID NO: 174442 - RNA, 1410 nt, Artificial Sequence
  derived and/or modified CDS sequence (opt4) from neuraminidase__InfluenzaA__ABA06513
augaaccccaaccagaagaucaucaccaucggcagcgugagccugaccaucgccaccaucugcuuccugacccagaucgccauccuggugaccaccgugacccugcacuucaagcaguacgagugcaacagcccccccaacaaccaggugaugcugugcgagcccaccaucaucgagagaaacaucaccgagaucguguaccugaccaacaccaccaucgagaaggagaucugccccaagcuggccgaguacagaaacuggagcaagccccagugcaacaucaccggcuucgcccccuucagcaaggacaacagcaucagacugagcgccggcggcgacaucugggugaccagagagcccuacgugagcugcgaccccgacaagugcuaccaguucgcccugggccagggcaccacccugaacaacggccacagcaacgacaccgugcacgacagaacccccuacagaacccugcugaugaacgagcugggcgugcccuuccaccugggcaccaagcaggugugcaucgccuggagcagcagcagcugccacgacggcaaggccuggcugcacgugugcgugaccggcgacgacaagaacgccaccgccagcuucaucuacaacggcagacugguggacagcaucggcagcuggagcaagaagauccugagaacccaggagagcgagugcgugugcaucaacggcaccugcaccguggugaugaccgacggcagcgccagcggcaaggccgacaccaagauccuguucaucgaggagggcaagaucgugcacaccagccugcugagcggcagcgcccagcacguggaggagugcagcugcuaccccagauaccccggcgugagaugcgugugcagagacaacuggaagggcagcaacagacccaucguggacaucaacgugaaggacuacagcaucgugagcagcuacgugugcagcggccuggugggcgacacccccagaaagaacgacagcagcagcagcagccacugccuggaccccaacaacgaggagggcggccacggcgugaagggcugggccuucgacgacggcaacgacguguggaugggcagaaccaucagcgagaagcugagaagcggcuacgagaccuucaaggugaucgagggcuggagcaagcccaacagcaagcugcagaucaacagacaggugaucguggacagagacaacagaagcggcuacagcggcaucuucagcguggagggcaagagcugcaucaacagaugcuucuacguggagcugaucagaggcagaaaccaggagaccgaggugcuguggaccagcaacagcaucgugguguucugcggcaccagcggcaccuacggcaccggcagcuggcccgacggcgccgacaucaaccugaugcccaucuga

SEQ ID NO: 174443 - RNA, 1410 nt, Artificial Sequence; identical to SEQ ID NO: 174442
  derived and/or modified CDS sequence (opt4) from neuraminidase__InfluenzaA__ABA06545

SEQ ID NO: 174444 - RNA, 1413 nt, Artificial Sequence
  derived and/or modified CDS sequence (opt4) from neuraminidase__InfluenzaA__ABA08478
augaacaccaaccagaagaucaucaccaucggcagcaucagcaucgccaucggcaucaucagccugaugcugcagaucggcaacaucaucagcaucugggccagccacagcauccagaccggcagccagaaccacaccggcaucugcaaccagagaaucaucaccuacgagaacagcaccugggugaaccacaccuacgugaacaucaacaacaccaacgugguggccggcaaggacaagaccagcgugacccuggccggcaacagcagccugugcagcaucagcggcugggccaucuacaccaaggacaacagcaucagaaucggcagcaagggcgacguguucgugaucagagagcccuucaucagcugcagccaccuggagugcagaaccuucuuccugacccagggcgcccugcugaacgacaagcacagcaacggcaccgugaaggacagaagccccuacagagcccugaugagcugcccccugggcgaggcccccagccccuacaacagcaaguucgagagcguggccuggagcgccagcgccugccacgacggcaugggcuggcugaccaucggcaucagcggccccgacaacggcgccguggccgugcugaaguacaacggcaucaucaccgagaccaucaagagcuggaagaagagaauccugagaacccaggagagcgagugcgugugcgugaacggcagcugcuucaccaucaugaccgacggccccagcaacggcgccgccagcuacaagaucuucaagaucgagaagggcaaggugaccaagagcaucgagcugaacgcccccaacuuccacuacgaggagugcagcugcuaccccgacaccggcaccgugaugugcgugugcagagacaacuggcacggcagcaacagacccugggugagcuucaaccagaaccuggacuaccagaucggcuacaucugcagcggcguguucggcgacaaccccagacccaaggacggcaagggcagcugcaaccccgugaccguggacggcgccgacggcgugaagggcuucagcuacaaguacggcaacggcguguggaucggcagaaccaagagcaacagacugagaaagggcuucgagaugaucugggaccccaacggcuggaccgacaccgacagcgacuucagcgugaagcaggacgugguggccaucaccgacuggagcggcuacagcggcagcuucgugcagcaccccgagcugaccggccuggacugcaucagacccugcuucuggguggagcuggugagaggccugcccagagagaacaccaccaucuggaccagcggcagcagcaucagcuucugcggcguggacagcgacaccgccaacuggagcuggcccgacggcgccgagcugcccuucaccaucgacaaguga

SEQ ID NO: 174445 - RNA, 1410 nt, Artificial Sequence; identical to SEQ ID NO: 174442
  derived and/or modified CDS sequence (opt4) from neuraminidase__InfluenzaA__ABA08511

SEQ ID NO: 174446 - RNA, 1413 nt, Artificial Sequence
  derived and/or modified CDS sequence (opt4) from neuraminidase__InfluenzaA__ABA12699
augaaccccaaccagaagaucaucaccaucggcagcaucagcaucgccaucggcaucaucagccugaugcugcagaucggcaacaucaucagcaucugggccagccacagcauccagaccggcagccagaaccacaccggcaucugcaaccagagaaucaucaccuacgagaacagcaccugggugaaccacaccuacgugaacaucaacaacaccaacgugguggccggcaaggacaagaccagcgugacccuggccggcaacagcagccugugcagcaucagcggcugggccaucuacaccaaggacaacagcaucagaaucggcagcaagggcgacguguucgugaucagagagcccuucaucagcugcagccaccuggagugcagaaccuucuuccugacccagggcgcccugcugaacgacaagcacagcaacggcaccgugaaggacagaagccccuacagagcccugaugagcugcccccugggcgaggcccccagccccuacaacagcaaguucgagagcguggccuggagcgccagcgccugccacgacggcaugggcuggcugaccaucggcaucagcggccccgacaacggcgccguggccgugcugaaguacaacggcaucaucaccgagaccaucaagagcuggaagaagagaauccugagaacccaggagagcgagugcgugugcgugaacggcagcugcuucaccaucaugaccgacggccccagcaacggcgccgccagcuacaagaucuucaagaucgagaagggcaaggugaccaagagcaucgagcugaacgcccccaacuuccacuacgaggagugcagcugcuaccccgacaccggcaccgugaugugcgugugcagagacaacuggcacggcagcaacagacccugggugagcuucaaccagaaccuggacuaccagaucggcuacaucugcagcggcguguucggcgacaaccccagacccaaggacggcaagggcagcugcaaccccgugaccguggacggcgccgacggcgugaagggcuucagcuacaaguacggcaacggcguguggaucggcagaaccaagagcaacagacugagaaagggcuucgagaugaucugggaccccaacggcuggaccgacaccgacagcgacuucagcgugaagcaggacgugguggccaucaccgacuggagcggcuacagcggcagcuucgugcagcaccccgagcugaccggccuggacugcaucagacccugcuucuggguggagcuggugagaggccugcccagagagaacaccaccaucuggaccagcggcagcagcaucagcuucugcggcguggacagcgacaccgccaacuggagcuggcccgacggcgccgagcugcccuucaccaucgacaaguga

SEQ ID NO: 174447 - RNA, 1413 nt, Artificial Sequence; identical to SEQ ID NO: 174446
  derived and/or modified CDS sequence (opt4) from neuraminidase__InfluenzaA__ABA12710

SEQ ID NO: 174448 - RNA, 1413 nt, Artificial Sequence
  derived and/or modified CDS sequence (opt4) from neuraminidase__InfluenzaA__ABA12721
augaaccccaaccagaagaucaucaccaucggcagcaucagcaucgccaucggcaucaucagccugaugcugcagaucggcaacaucaucagcaucugggccagccacagcauccagaccggcagccagaaccacaccggcgugugcaaccagagaaucaucaccuacgagaacagcaccugggugaaccacaccuacgugaacaucaacaacaccaacgugaucgccggcaaggacaagaccagcgugacccuggccggcaacagcagccugugcagcaucagcggcugggccaucuacaccaaggacaacagcaucagaaucggcagcaagggcgacguguucgugaucagagagcccuucaucagcugcagccaccuggagugcagaaccuucuuccugacccagggcgcccugcugaacgacaagcacagcaacggcaccgugaaggacagaagccccuacagagcccugaugagcugcccccugggcgaggcccccagccccuacaacagcaaguucgagagcguggccuggagcgccagcgccugccacgacggcaugggcuggcugaccaucggcaucagcggccccgacaacggcgccguggccgugcugaaguacaacggcaucaucaccgagaccaucaagagcuggaagaagcagauccugagaacccaggagagcgagugcgugugcgugaacggcagcugcuucaccaucaugaccgacggccccagcaacggcgccgccagcuacaagaucuucaagaucggcaagggcaaggugaccaagagcaucgagcugaacgcccccaacuuccacuacgaggagugcagcugcuaccccgacaccggcaccgugaugugcgugugcagagacaacuggcacggcagcaacagacccugggugagcuucaaccagaaccuggacuaccagaucggcuacaucugcagcggcguguucggcgacaaccccagacccagagacggcgagggcagcugcaaccccgugaccguggacggcgccaacggcgugaagggcuucagcuacaaguacggcaacggcguguggaucggcagaaccaagagcaacagacugagaaagggcuucgagaugaucugggaccccaacggcuggaccgacaccgacagcgacuucagcgugaagcaggacgugguggccaucaccgacuggagcggcuacagcggcagcuucgugcagcaccccgagcugaccggccuggacugcaucagacccugcuucuggguggagcuggugagaggccugcccagagagaacaccaccaucuggaccagcggcagcagcaucagcuucugcggcgugaacagcgacaccgccaacuggagcuggcccgacggcgccgagcugcccuucaccaucgacaaguga

SEQ ID NO: 174449 - RNA, 1413 nt, Artificial Sequence; identical to SEQ ID NO: 174446
  derived and/or modified CDS sequence (opt4) from neuraminidase__InfluenzaA__ABA12732

SEQ ID NO: 174450 - RNA, 1410 nt, Artificial Sequence; identical to SEQ ID NO: 174387
  derived and/or modified CDS sequence (opt4) from neuraminidase__InfluenzaA__ABA12743

SEQ ID NO: 174451 - RNA, 1410 nt, Artificial Sequence; identical to SEQ ID NO: 174403
  derived and/or modified CDS sequence (opt4) from neuraminidase__InfluenzaA__ABA12754

SEQ ID NO: 174452 - RNA, 1410 nt, Artificial Sequence; identical to SEQ ID NO: 174406
  derived and/or modified CDS sequence (opt4) from neuraminidase__InfluenzaA__ABA12765

SEQ ID NO: 174453 - RNA, 1410 nt, Artificial Sequence; identical to SEQ ID NO: 174178
  derived and/or modified CDS sequence (opt4) from neuraminidase__InfluenzaA__ABA12776

SEQ ID NO: 174454 - RNA, 1410 nt, Artificial Sequence; identical to SEQ ID NO: 174387
  derived and/or modified CDS sequence (opt4) from neuraminidase__InfluenzaA__ABA12786

SEQ ID NO: 174455 - RNA, 1410 nt, Artificial Sequence; identical to SEQ ID NO: 174406
  derived and/or modified CDS sequence (opt4) from neuraminidase__InfluenzaA__ABA18029

SEQ ID NO: 174456 - RNA, 1413 nt, Artificial Sequence
  derived and/or modified CDS sequence (opt4) from neuraminidase__InfluenzaA__ABA18040
augaaccccaaccagaagaucaucaccaucggcagcaucagcaucgccaucggcaucaucagccugaugcugcagaucggcaacaucaucagcaucugggccagccacagcauccagaccggcagccagaaccacaccggcgugugcaaccagagaaucaucaccuacgagaacagcaccugggugaaccacaccuacgugaacaucaacaacaccaacgugaucgccggcaaggacaagaccagcgugacccuggccggcaacagcagccugugcagcaucagcggcugggccaucuacaccaaggacaacagcaucagaaucggcagcaagggcgacguguucgugaucagagagcccuucaucagcugcagccaccuggagugcagaaccuucuuccugacccagggcgcccugcugaacgacaagcacagcaacggcaccgugaaggacagaagccccuacagagcccugaugagcugcccccugggcgaggcccccagccccuacaacagcaaguucgagagcguggccuggagcgccagcgccugccacgacggcaugggcuggcugaccaucggcaucagcggccccgacaacggcgccguggccgugcugaaguacaacggcaucaucaccgagaccaucaagagcuggaagaagcagauccugagaacccaggagagcgagugcgugugcgugaacggcagcugcuucaccaucaugaccgacggccccagcaacggcgccgccagcuacaagaucuucaagaucgagaagggcaaggugaccaagagcaucgagcugaacgcccccaacuuccacuacgaggagugcagcugcuaccccgacaccggcaccgugaugugcgugugcagagacaacuggcacggcagcaacagacccugggugagcuucaaccagaaccuggacuaccagaucggcuacaucugcagcggcguguucggcgacaaccccagacccaaggacggcgagggcagcugcaaccccgugaccguggacggcgccaacggcgugaagggcuucagcuacaaguacggcaacggcguguggaucggcagaaccaagagcaacagacugagaaagggcuucgagaugaucugggaccccaacggcuggaccgacaccgacagcgacuucagcgugaagcaggacgugguggccaucaccgacuggagcggcuacagcggcagcuucgugcagcaccccgagcugaccggccuggacugcaucagacccugcuucuggguggagcuggugagaggccugcccaaggagaacaccaccaucuggaccagcggcagcagcaucagcuucugcggcgugaacagcgacaccgccaacuggagcuggcccgacggcgccgagcugcccuucaccaucgacaaguga

SEQ ID NO: 174457 - RNA, 1410 nt, Artificial Sequence
  derived and/or modified CDS sequence (opt4) from neuraminidase__InfluenzaA__ABA18126
augaaccccaaccagaagaucaucaccaucggcagcgugagccugaccaucgccaccaucugcuuccugaugcagaucgccauccuggugaccaccgugacccugcacuucaagcaguacgagugcaacagcccccccaacaaccaggugaugcugugcgagcccaccaucaucgagagaaacaucaccgagaucguguaccugaccaacaccaccaucgagaaggagaucugccccaagcuggccgaguacagaaacuggagcaagccccagugcaacaucaccggcuucgcccccuucagcaaggacaacagcaucagacugagcgccggcggcgacaucugggugaccagagagcccuacgugagcugcgaccccgacaagugcuaccaguucgcccugggccagggcaccacccugaacaacggccacagcaacgacaccgugcacgacagaacccccuacagaacccugcugaugaacgagcugggcgugcccuuccaccugggcaccaagcaggugugcaucgccuggagcagcagcagcugccacgacggcaaggccuggcugcacgugugcgugaccggcgacgacgagaacgccaccgccagcuucaucuacaacggcagacugguggacagcaucggcagcuggagcaagaagauccugagaacccaggagagcgagugcgugugcaucaacggcaccugcaccguggugaugaccgacggcagcgccagcggcaaggccgacaccaagauccuguucaucgaggagggcaagaucgugcacaucagcacccugagcggcagcgcccagcacguggaggagugcagcugcuaccccagauaccccggcgugagaugcgugugcagagacaacuggaagggcagcaacagacccaucguggacaucaacgugaaggacuacagcaucgugagcagcuacgugugcagcggccuggugggcgacacccccagaaagaacgacagcuucagcagcagccacugccuggaccccaacaacgaggagggcggccacggcgugaagggcugggccuucgacgacggcaacgacauguggaugggcagaaccaucagcgagaagcugagaagcggcuacgagaccuucaaggugaucgagggcuggagcaagcccaacagcaagcugcagaucaacagacaggugaucguggagagaggcaacagaagcggcuacagcggcaucuucagcguggagggcaagagcugcaucaacagaugcuucuacguggagcugaucagaggcagaaaggaggagaccgaggugugguggaccagcaacagcaucgugguguucugcggcaccagcggcaccuacggcaccggcagcuggcccgacggcgccgacaucaaccugaugcccaucuga

SEQ ID NO: 174458 - RNA, 1413 nt, Artificial Sequence; identical to SEQ ID NO: 174446
  derived and/or modified CDS sequence (opt4) from neuraminidase__InfluenzaA__ABA18148

SEQ ID NO: 174459 - RNA, 1410 nt, Artificial Sequence
  derived and/or modified CDS sequence (opt4) from neuraminidase__InfluenzaA__ABA18159
augaaccccaaccagaagaucaucaccaucggcagcgugagccugaccaucagcaccaucugcuucuucaugcagaucgccauccugaucaccaccgugacccugcacuucaagcaguacgaguucaacagcccccccaacaaccaggugaugcugugcgagcccaccaucaucgagagaaacaucaccgagaucguguaccugaccaacaccaccaucgagaaggagaucugccccaagcuggccgaguacagaaacuggagcaagccccagugcgacaucaccggcuucgcccccuucagcaaggacaacagcaucagacugagcgccggcggcgacaucugggugaccagagagcccuacgugagcugcgaccccgacaagugcuaccaguucgcccugggccagggcaccacccugaacaacgugcacagcaacgacaccgugcacgacagaacccccuacagaacccugcugaugaacgagcugggcgugcccuuccaccugggcaccaagcaggugugcaucgccuggagcagcagcagcugccacgacggcaaggccuggcugcacgugugcgugaccggcgacgacaagaacgccaccgccagcuucaucuacaacggcagacugguggacagcaucgugagcuggagcaaggagauccugagaacccaggagagcgagugcgugugcaucaacggcaccugcgccguggugaugaccgacggcagcgccagcggcaaggccgacaccaagauccuguucaucgaggagggcaagaucgugcacaccagcaagcugagcggcagcgcccagcacguggaggagugcagcugcuaccccagauaccccggcaucagaugcgugugcagagacaacuggaagggcagcaacagacccaucguggacgugaacaucaaggacuacagcaucgugagcagcuacgugugcagcggccuggugggcgacacccccagaaagaacgacagcagcagcagcagccacugccuggaccccaacaacgaggagggcggccacggcgugaagggcugggccuucgacgacggcaacgacguguggaugggcagaaccaucagcgagaagcugagaagcggcuacgagaccuucaaggugaucgagggcuggagcaaccccaacagcaagcugcagaucaacagacaggugaucguggacagaggcaacagaagcggcuacagcggcaucuucagcguggagggcaagagcugcaucaacagaugcuucuacguggagcugaucagaggcagaaaggaggagaccgaggugcuguggaccagcaacagcaucgugguguucugcggcaccagcggcaccuacggcaccggcagcuggcccgacggcgccgacaucaaccugaugcccaucuga

SEQ ID NO: 174460 - RNA, 1410 nt, Artificial Sequence; identical to SEQ ID NO: 174387
  derived and/or modified CDS sequence (opt4) from neuraminidase__InfluenzaA__ABA26703

SEQ ID NO: 174461 - RNA, 1410 nt, Artificial Sequence; identical to SEQ ID NO: 174387
  derived and/or modified CDS sequence (opt4) from neuraminidase__InfluenzaA__ABA26714

SEQ ID NO: 174462 - RNA, 1410 nt, Artificial Sequence; identical to SEQ ID NO: 174387
  derived and/or modified CDS sequence (opt4) from neuraminidase__InfluenzaA__ABA26736

SEQ ID NO: 174463 - RNA, 1410 nt, Artificial Sequence; identical to SEQ ID NO: 174387
  derived and/or modified CDS sequence (opt4) from neuraminidase__InfluenzaA__ABA26747

SEQ ID NO: 174464 - RNA, 1410 nt, Artificial Sequence; identical to SEQ ID NO: 174387
  derived and/or modified CDS sequence (opt4) from neuraminidase__InfluenzaA__ABA26758

SEQ ID NO: 174465 - RNA, 1410 nt, Artificial Sequence; identical to SEQ ID NO: 174387
  derived and/or modified CDS sequence (opt4) from neuraminidase__InfluenzaA__ABA26769

SEQ ID NO: 174466 - RNA, 1410 nt, Artificial Sequence; identical to SEQ ID NO: 174387
  derived and/or modified CDS sequence (opt4) from neuraminidase__InfluenzaA__ABA26780

SEQ ID NO: 174467 - RNA, 1410 nt, Artificial Sequence; identical to SEQ ID NO: 174387
  derived and/or modified CDS sequence (opt4) from neuraminidase__InfluenzaA__ABA26791

SEQ ID NO: 174468 - RNA, 1410 nt, Artificial Sequence; identical to SEQ ID NO: 174387
  derived and/or modified CDS sequence (opt4) from neuraminidase__InfluenzaA__ABA26802

SEQ ID NO: 174469 - RNA, 1413 nt, Artificial Sequence
  derived and/or modified CDS sequence (opt4) from neuraminidase__InfluenzaA__ABA42250
augaaccccaaccagaagaucaucaccaucggcagcaucagcaucgccaucggcaucaucagccugaugcugcagaucggcaacaucaucagcaucugggccagccacagcauccagaccggcagccagaaccacaccggcaucugcaaccagagaaucaucaccuacgagaacagcaccugggugaaccacaccuacgugaacaucaacaacaccaacgugguggccggcaaggacaagaccagcgugacccuggccggcaacagcagccugugcagcaucagcggcugggccaucuacaccaaggacaacagcaucagaaucggcagcaagggcgacguguucgugaucagagagcccuucaucagcugcagccaccuggagugcagaaccuucuuccugacccagggcgcccugcugaacgacaagcacagcaacggcaccgugaaggacagaagccccuacagagcccugaugagcugcccccugggcgaggcccccagccccuacaacagcaaguucgagagcguggccuggagcgccagcgccugccacgacggcaugggcuggcugaccaucggcaucagcggccccgacaacggcgccguggccgugcugaaguacaacggcaucaucaccgagaccaucaagagcuggaagaagagaauccugagaacccaggagagcgagugcgugugcgugaacggcagcugcuucaccaucaugaccgacggccccagcaacggcgccgccagcuacaagaucuucaagaucgagaagggcaaggugaccaagagcaucgagcugaacgcccccaacuuccacuacgaggagugcagcugcuaccccgacaccggcaccgugaugugcgugugcagagacaacuggcacggcagcaacagacccugggugagcuucaaccagaaccuggacuaccagaucggcuacaucugcagcggcguguucggcgacaaccccagacccaaggacggcaagggcagcugcaaccccgugaccguggacggcgccgacggcgugaagggcuucagcuacaaguacggcgacggcguguggaucggcagaaccaagagcaacagacugagaaagggcuucgagaugaucugggaccccaacggcuggaccgacaccgacagcgacuucagcgugaagcaggacgugguggccaucaccgacuggagcggcuacagcggcagcuucgugcagcaccccgagcugaccggccuggacugcaucagacccugcuucuggguggagcuggugagaggccugcccagagagaacaccaccaucuggaccagcggcagcagcaucagcuucugcggcguggacagcgacaccgccaacuggagcuggcccgacggcgccgagcugcccuucaccaucgacaaguga

SEQ ID NO: 174470 - RNA, 1413 nt, Artificial Sequence; identical to SEQ ID NO: 174456
  derived and/or modified CDS sequence (opt4) from neuraminidase__InfluenzaA__ABA42261

SEQ ID NO: 174471 - RNA, 1410 nt, Artificial Sequence
  derived and/or modified CDS sequence (opt4) from neuraminidase__InfluenzaA__ABA42272
augaaccccaaccagaagaucaucaccaucggcagcgugagccugaccaucagcaccaucugcuucuucaugcagaucgccauccugaucaccaccgugacccugcacuucaagcaguacgaguucaacagcccccccaacaaccaggugaugcugugcgagcccaccaucaucgagagaaacaucaccgagaucguguaccugaccaacaccaccaucgagaaggagaucugccccaagcuggccgaguacagaaacuggagcaagccccagugcgacaucaccggcuucgcccccuucagcaaggacaacagcaucagacugagcgccggcggcgacaucugggugaccagagagcccuacgugagcugcgaccccgacaagugcuaccaguucgcccugggccagggcaccacccugaacaacgugcacagcaacgacaccgugcacgacagaacccccuacagaacccugcugaugaacgagcugggcgugcccuuccaccugggcaccaagcaggugugcaucgccuggagcagcagcagcugccacgacggcaaggccuggcugcacgugugcgugaccggcgacgacaagaacgccaccgccagcuucaucuacaacggcagacugguggacagcaucgugagcuggagcaaggacauccugagaacccaggagagcgagugcgugugcaucaacggcaccugcaccguggugaugaccgacggcagcgccagcggcaaggccgacaccaagauccuguucaucgaggagggcaagaucgugcacaccagcacccugagcggcagcgcccagcacguggaggagugcagcugcuaccccagauaccccggcgugagaugcgugugcagagacaacuggaagggcagcaacagacccaucguggacaucaacaucaaggacuacagcaucgugagcagcuacgugugcagcggccuggugggcgacacccccagaaagaacgacagcagcagcagcagccacugccuggaccccaacaacgaggagggcggccacggcgugaagggcugggccuucgacgacggcaacgacguguggaugggcagaaccaucaacgagaagcugagacugggcuacgagaccuucaaggugaucgagggcuggagcaaccccaacagcaagcugcagaucaacagacaggugaucguggagagaggcaacagaagcggcuacagcggcaucuucagcguggagggcaagagcugcaucaacagaugcuucuacguggagcugaucagaggcagaaaggaggagaccgaggugcuguggaccagcaacagcaucgugguguucugcggcaccagcggcaccuacggcaccggcagcuggcccgacggcgccgacaucaaccugaugcccaucuga

SEQ ID NO: 174472 - RNA, 1410 nt, Artificial Sequence; identical to SEQ ID NO: 174387
  derived and/or modified CDS sequence (opt4) from neuraminidase__InfluenzaA__ABA42294

SEQ ID NO: 174473 - RNA, 1410 nt, Artificial Sequence; identical to SEQ ID NO: 174214
  derived and/or modified CDS sequence (opt4) from neuraminidase__InfluenzaA__ABA42305

SEQ ID NO: 174474 - RNA, 1410 nt, Artificial Sequence; identical to SEQ ID NO: 174224
  derived and/or modified CDS sequence (opt4) from neuraminidase__InfluenzaA__ABA42316

SEQ ID NO: 174475 - RNA, 1413 nt, Artificial Sequence
  derived and/or modified CDS sequence (opt4) from neuraminidase__InfluenzaA__ABA42327
augaaccccaaccagaagaucaucaccaucggcagcaucagcaucgccaucggcaucaucagccugaugcugcagaucggcaacaucaucagcaucugggccagccacagcauccagaccggcagccagaaccacaccggcaucugcaaccagagaaucaucaccuacgagaacagcaccugggugaaccacaccuacgugaacaucaacaacaccaacgugguggccggcaaggacaagaccagcgugacccuggccggcaacagcagccugugcagcaucagcggcugggccaucuacaccaaggacaacagcaucagaaucggcagcaagggcgacguguucgugaucagagagcccuucaucagcugcagccaccuggagugcagaaccuucuuccugacccagggcgcccugcugaacgacaagcacagcaacggcaccgugaaggacagaagccccuacagagcccugaugagcugcccccugggcgaggcccccagccccuacaacagcaaguucgagagcguggccuggagcgccagcgccugccacgacggcaugggcuggcugaccaucggcaucagcggccccgacaacggcgccguggccgugcugaaguacaacggcaucaucaccgagaccaucaagagcuggaagaagagaauccugagaacccaggagagcgagugcgugugcgugaacggcagcugcuucaccaucaugaccgacggccccagcaacggcgccgccagcuacaagaucuucaagaucgagaagggcaaggugaccaagagcaucgagcugaacgcccccaacuuccacuacgaggagugcagcugcuaccccgacaccggcaccgugaugugcgugugcagagacaacuggcacggcagcaacagacccugggugagcuucaaccagaaccuggacuaccagaucggcuacaucugcagcggcguguucggcgacaaccccagacccaaggacggcgagggcagcugcaaccccgugaccguggacggcgccgacggcgugaagggcuucagcuacaaguacggcaacggcguguggaucggcagaaccaagagcaacagacugagaaagggcuucgagaugaucugggaccccaacggcuggaccgacaccgacagcgacuucagcgugaagcaggacgugguggccaucaccgacuggagcggcuacagcggcagcuucgugcagcaccccgagcugaccggccuggacugcaucagacccugcuucuggguggagcuggugagaggccugcccagagagaacaccaccaucuggaccagcggcagcagcaucagcuucugcggcgugaacagcgacaccgccaacuggagcuggcccgacggcgccgagcugcccuucaccaucgacaaguga

SEQ ID NO: 174476 - RNA, 1410 nt, Artificial Sequence; identical to SEQ ID NO: 174209
  derived and/or modified CDS sequence (opt4) from neuraminidase__InfluenzaA__ABA42338

SEQ ID NO: 174477 - RNA, 1410 nt, Artificial Sequence
  derived and/or modified CDS sequence (opt4) from neuraminidase__InfluenzaA__ABA42349
augaaccccaaccagaagaucaucaccaucggcagcgugagccugaccaucgccaccaucugcuuccugaugcagaucgccauccuggugaccaccgugacccugcacuucaagcaguacgagugcgacagcccccccaacaaccaggugaugcugugcgagcccaccaucaucgagagaaacaucaccgagaucguguaccugaccaacaccaccaucgagaaggagaucugccccaagcuggccgaguacagaaacuggagcaagccccagugcaacaucaccggcuucgcccccuucagcaaggacaacagcaucagacugagcgccggcggcgacaucugggugaccagagagcccuacgugagcugcgaccccgacaagugcuaccaguucgcccugggccagggcaccacccugaacaacggccacagcaacgacaccgugcacgacagaacccccuacagaacccugcugaugaacgagcugggcgugcccuuccaccugggcaccagacaggugugcaucgccuggagcagcagcagcugccacgacggcaaggccuggcugcacgugugcgugaccggcgacgacgagaacgccaccgccagcuucaucuacaacggcaagcugguggacagcaucggcagcuggagcaagaagauccugagaacccaggagagcgagugcgugugcaucaacggcaccugcaccguggugaugaccgacggcagcgccagcggcaaggccgacaccaagauccuguucaucgaggagggcaagaucgugcacaucagcacccugagcggcagcgcccagcacguggaggagugcagcugcuaccccagauaccccggcgugagaugcgugugcagagacaacuggaagggcagcaacagacccaucguggacaucaacgugaaggacuacagcaucgugagcagcuacgugugcagcggccuggugggcgacacccccagaaagaacgacagcuucagcagcagccacugccuggaccccaacaacgaggagggcggccacggcgugaagggcugggccuucgacgacggcaacgacguguggaugggcagaaccaucagcgagaagcugagaagcggcuacgagaccuucaaggugaucgagggcuggagcaagcccaacagcaagcugcagaucaacagacaggugaucguggagagaggcaacagaagcggcuacagcggcaucuucagcguggagggcaagagcugcaucaacagaugcuucuacguggagcugaucagaggcagaaaggaggagaccgaggugugguggaccagcaacagcaucgugguguucugcggcaccagcggcaccuacggcaccggcagcuggcccgacggcgccgacaucaaccugaugcccaucuga

SEQ ID NO: 174478 - RNA, 1410 nt, Artificial Sequence; identical to SEQ ID NO: 174214
  derived and/or modified CDS sequence (opt4) from neuraminidase__InfluenzaA__ABA42360

SEQ ID NO: 174479 - RNA, 1410 nt, Artificial Sequence; identical to SEQ ID NO: 174209
  derived and/or modified CDS sequence (opt4) from neuraminidase__InfluenzaA__ABA42371

SEQ ID NO: 174480 - RNA, 1410 nt, Artificial Sequence; identical to SEQ ID NO: 174224
  derived and/or modified CDS sequence (opt4) from neuraminidase__InfluenzaA__ABA42382

SEQ ID NO: 174481 - RNA, 1410 nt, Artificial Sequence; identical to SEQ ID NO: 174209
  derived and/or modified CDS sequence (opt4) from neuraminidase__InfluenzaA__ABA42393

SEQ ID NO: 174482 - RNA, 1410 nt, Artificial Sequence
  derived and/or modified CDS sequence (opt4) from neuraminidase__InfluenzaA__ABA42404
augaaccccaaccagaagaucaucaccaucggcagcgugagccugaccaucgccaccaucugcuuccugaugcagaucgccauccuggugaccaccgugacccugcacuucaagcaguacgagugcaacagcccccccaacaaccaggugaugcugugcgagcccgccaucaucgagagaaacaucaccgagaucguguaccugaccaacaccaccaucgagaaggagaucugccccaagcuggccgaguacagaaacuggagcaagccccagugcaacaucaccggcuucgcccccuucagcaaggacaacagcaucagacugagcgccggcggcgacaucugggugaccagagagcccuacgugagcugcgaccccgacaagugcuaccaguucgcccugggccagggcaccacccugaacaacggccacagcaacgacaccgugcacgacagaacccccuacagaacccugcugaugaacgagcugggcgugcccuuccaccugggcaccagacaggugugcaucgccuggagcagcagcagcugccacgacggcaaggccuggcugcacgugugcgugaccggcgacgacgagaacgccaccgccagcuucaucuacaacggcagacugguggacagcaucggcagcuggagcaagaagauccugagaacccaggagagcgagugcgugugcaucaacggcaccugcaccguggugaugaccgacggcagcgccagcggcaaggccgacaccaagauccuguucaucgaggagggcaagaucgugaacaucagcacccugcccggcagcgcccagcacguggaggagugcagcugcuaccccagauaccccggcgugagaugcgugugcagagacaacuggaagggcagcaacagacccaucguggacaucaacgugaaggacuacagcaucgugagcagcuacgugugcagcggccuggugggcgacacccccagaaagaacgacagcuucagcagcagccacugccuggaccccaacaacgaggagggcggccacggcgugaagggcugggccuucgacgacggcaacgacguguggaugggcagaaccaucagcgagaagcugagaagcggcuacgagaccuucaaggugaucgagggcuggagcaagcccaacagcaagcugcagaucaacagacaggugaucguggagagaggcaacagaagcggcuacagcggcaucuucagcguggagggcaagagcugcaucaacagaugcuucuacguggagcugaucagaggcagaaaggaggagaccgaggugugguggaccagcaacagcaucgugguguucugcggcaccagcggcaccuacggcaccggcagcuggcccgacggcgccgacaucaaccugaugcccaucuga

SEQ ID NO: 174483 - RNA, 1410 nt, Artificial Sequence; identical to SEQ ID NO: 174224
  derived and/or modified CDS sequence (opt4) from neuraminidase__InfluenzaA__ABA42415

SEQ ID NO: 174484 - RNA, 1410 nt, Artificial Sequence; identical to SEQ ID NO: 174231
  derived and/or modified CDS sequence (opt4) from neuraminidase__InfluenzaA__ABA42446

SEQ ID NO: 174485 - RNA, 1410 nt, Artificial Sequence
  derived and/or modified CDS sequence (opt4) from neuraminidase__InfluenzaA__ABA42457
augaaccccaaccagaagaucaucaccaucggcagcgugagccugaccaucgccaccaucugcuuccugaugcagaucgccauccuggugaccaccgugacccugcacuucaagcaguacgagugcaacagcccccccaacaaccaggugaugcugugcgagcccaccaucaucgagagaaacaucaccgagaucguguaccugaccaacaccaccaucgagaaggagaucugccccaagcuggccgaguacagaaacuggagcaagccccagugcaacaucaccggcuucgcccccuucagcaaggacaacagcaucagacugagcgccggcggcgacaucugggugaccagagagcccuacgugagcugcgaccccgacaagugcuaccaguucgcccugggccagggcaccacccugaacaacggccacagcaacgacaccgugcacgacagaacccccuacagaacccugcugaugaacgagcugggcgugcccuuccaccugggcaccagacaggugugcaucgccuggagcagcagcagcugccacgacggcaaggccuggcugcacgugugcgugaccggcgacgacgagaacgccaccgccagcuucaucuacaacggcagacugguggacagcaucggcagcuggagcaagaagauccugagaacccaggagagcgagugcgugugcaucaacggcaccugcaccguggugaugaccgacggcagcgccagcggcaaggccgacaccaagauccuguucaucgaggagggcaagaucgugcacaucagcacccugagcggcagcgcccagcacguggaggagugcagcugcuaccccagauaccccggcgugagaugcgugugcagagacaacuggaagggcagcaacagacccaucguggacaucaacgugaaggacuacagcaucgugagcagcuacgugugcagcggccuggugggcgacacccccagaaagaacgacagcuucagcagcagccacugccuggaccccaacaacgaggagggcggccacggcgugaagggcugggccuucgacgacggcaacgacguguggaugggcagaaccaucagcgagaagcugagaagcggcuacgagaccuucaaggugaucgagggcuggagcaagcccaacagcaagcugcagaucaacagacaggugaucguggagagaggcaacagaagcggcuacagcggcaucuucagcguggagagcaagagcugcaucaacagaugcuucuacguggagcugaucagaggcagaaaggaggagaccgaggugugguggaccagcaacagcaucgugguguucugcggcaccagcggcaccuacggcaccggcagcuggcccgacggcgccgacaucaaccugaugcccaucuga

SEQ ID NO: 174486 - RNA, 1410 nt, Artificial Sequence; identical to SEQ ID NO: 174231
  derived and/or modified CDS sequence (opt4) from neuraminidase__InfluenzaA__ABA42468

SEQ ID NO: 174487 - RNA, 1410 nt, Artificial Sequence
  derived and/or modified CDS sequence (opt4) from neuraminidase__InfluenzaA__ABA42479
augaaccccaaccagaagaucaucaccaucggcagcgugagccugaccaucgccaccaucugcuuccugaugcagaucgccauccuggugaccaccgugacccugcacuucaagcaguacgagugcgacagcccccccaacaaccaggugaugcugugcgagcccaccaucaucgagagaaacaucaccgagaucguguaccugaccaacaccaccaucgagaaggagaucugccccaagcuggccgaguacagaaacuggagcaagccccagugcaacaucaccggcuucgcccccuucagcaaggacaacagcaucagacugagcgccggcggcgacaucugggugaccagagagcccuacgugagcugcgaccccgacaagugcuaccaguucgcccugggccagggcaccacccugaacaacggccacagcaacgacaccgugcacgacagaacccccuacagaacccugcugaugaacgagcugggcgugcccuuccaccugggcaccagacaggugugcaucgccuggagcagcagcagcugccacgacggcaaggccuggcugcacgugugcgugaccggcgacgacgagaacgccaccgccagcuucaucuacaacggcagacugguggacagcaucggcagcuggagcaagaagauccugagaacccaggagagcgagugcgugugcaucaacggcaccugcaccguggugaugaccgacggcagcgccagcggcaaggccgacaccaagauccuguucaucgaggagggcaagaucgugcacaucagcacccugagcggcagcgcccagcacguggaggagugcagcugcuaccccagauaccccggcgugagaugcgugugcagagacaacuggaagggcagcaacagacccaucguggacaucaacgugaaggacuacagcaucgugagcagcuacgugugcagcggccuggugggcgacacccccagaaagaacgacagcuucagcagcagccacugccuggaccccaacaacgaggacggcggccacggcgugaagggcugggccuucgacgacggcaacgacguguggaugggcagaaccaucagcgagaagcugagaagcggcuacgagaccuucaaggugaucgagggcuggagcaagcccaacagcaagcugcagaucaacagacaggugaucguggagagaggcaacagaagcggcuacagcggcaucuucagcguggagggcaagagcugcaucaacagaugcuucuacguggagcugaucagaggcagaaaggaggagaccgaggugugguggaccagcaacagcaucgugguguucugcggcaccagcggcaccuacggcaccggcagcuggcccgacggcgccgacaucaaccugaugcccaucuga

SEQ ID NO: 174488 - RNA, 1410 nt, Artificial Sequence
  derived and/or modified CDS sequence (opt4) from neuraminidase__InfluenzaA__ABA42490
augaaccccaaccagaagaucaucaccaucggcagcgugagccugaccaucgccaccaucugcuuccugaugcagaucgccauccuggugaccaccgugacccugcacuucaagcaguacgagugcaacagcccccccaacaaccaggugaugcugugcgagcccaccaucaucgagagaaacaucaccgagaucguguaccugaccaacaccaccaucgagaaggagaucugccccaagcuggccgaguacagaaacuggagcaagccccagugcaacaucaccggcuucgcccccuucagcaaggacaacagcaucagacugagcgccggcggcgacaucugggugaccagagagcccuacgugagcugcgaccccgacaagugcuaccaguucgcccugggccagggcaccacccugaacaacggccacagcaacgacaccgugcacgacagaacccccuacagaacccugcugaugaacgagcugggcgugcccuuccaccugggcaccagacaggugugcaucgccuggagcagcagcagcugccacgacggcaaggccuggcugcacgugugcgugaccggcgacgacgagaacgccaccgccagcuucaucuacaacggcagacugguggacagcaucggcagcuggagcaagaagauccugagaacccaggagagcgagugcgugugcaucaacggcaccugcaccguggugaugaccgacggcagcgccagcggcaaggccgacaccaagauccuguucaucgaggagggcaagaucgugcacaucagcaagcugagcggcagcgcccagcacguggaggagugcagcugcuaccccagauaccccggcgugagaugcgugugcagagacaacuggaagggcagcaacagacccaucguggacaucaacgugaaggacuacagcaucgugagcagcuacgugugcagcggccuggugggcgacacccccagaaagaacgacagcuucagcagcagccacugccuggaccccaacaacgaggagggcggccacggcgugaagggcugggccuucgacgacggcaacgacguguggaugggcagaaccaucagcgagaagcugagaagcggcuacgagaccuucaaggugaucaagggcuggagcaagcccaacagcaagcugcagaucaacagacaggugaucguggagagaggcaacagaagcggcuacagcggcaucuucagcguggagggcaagagcugcaucaacagaugcuucuacguggagcugaucagaggcagaaaggaggagaccgaggugugguggaccagcaacagcaucgugguguucugcggcaccagcggcaccuacggcaccggcagcuggcccgacggcgccgacaucaaccugaugcccaucuga

SEQ ID NO: 174489 - RNA, 1410 nt, Artificial Sequence; identical to SEQ ID NO: 174231
  derived and/or modified CDS sequence (opt4) from neuraminidase__InfluenzaA__ABA42501

SEQ ID NO: 174490 - RNA, 1410 nt, Artificial Sequence
  derived and/or modified CDS sequence (opt4) from neuraminidase__InfluenzaA__ABA42512
augaaccccaaccagaagaucaucaccaucggcagcgugagccugaccaucgccaccaucugcuuccugaugcagaucgccauccuggugaccaccgugacccugcacuucaagcaguacgagugcaacagcccccccaacaaccaggugaugcugugcgagcccaccaucaucgagagaaacaucaccgagaucguguaccccaccaacaccaccaucgagaaggagaucugccccaagcuggccgaguacagaaacuggagcaagccccagugcaacaucaccggcuucgcccccuucagcaaggacaacagcaucagacugagcgccggcggcgacaucugggugaccagagagcccuacgugagcugcgaccccgacaagugcuaccaguucgcccugggccagggcaccacccugaacaacggccacagcaacgacaccgugcacgacagaacccccuacagaacccugcugaugaacgagcugggcgugcccuuccaccugggcaccaagcaggugugcaucgccuggagcagcagcagcugccacgacggcaaggccuggcugcacgugugcgugaccggcgacgacgagaacgccaccgccagcuucaucuacaacggcagacugguggacagcaucggcagcuggagcaagaagauccugagaacccaggagagcgagugcgugugcaucaacggcaccugcaccguggugaugaccgacggcagcgccagcggcaaggccgacaccaagauccuguucaucgaggagggcaagaucgugcacaccagcagccugagcggcagcgcccagcacguggaggagugcagcugcuaccccagauaccccggcgugagaugcgugugcagagacaacuggaagggcagcaacagacccaucguggacaucaacgugaaggacuacagcaucgugagcagcuacgugugcagcggccuggugggcgacacccccagaaagaacgacagcagcagcagcagccacugccuggaccccaacaacgaggagggcggccacggcgugaagggcugggccuucgacgacggcaacgacguguggaugggcagaaccaucagcgagaagcugagaagcggcuacgagaccuucaaggugaucgagggcuggagcaagcccaacagcaagcugcagaucaacagacaggugaucguggacagaggcaacagaagcggcuacagcggcaucuucagcguggagggcaagagcugcaucaacagaugcuucuacguggagcugaucagaggcagaaagcaggagaccgaggugcuguggaccagcaacagcaucgugguguucugcggcaccagcggcaccuacggcaccggcagcuggcccgacggcgccgacaucaaccugaugcccaucuga

SEQ ID NO: 174491 - RNA, 1410 nt, Artificial Sequence; identical to SEQ ID NO: 174121
  derived and/or modified CDS sequence (opt4) from neuraminidase__InfluenzaA__ABA42523

SEQ ID NO: 174492 - RNA, 1410 nt, Artificial Sequence; identical to SEQ ID NO: 174121
  derived and/or modified CDS sequence (opt4) from neuraminidase__InfluenzaA__ABA42534

SEQ ID NO: 174493 - RNA, 1410 nt, Artificial Sequence; identical to SEQ ID NO: 174313
  derived and/or modified CDS sequence (opt4) from neuraminidase__InfluenzaA__ABA42545

SEQ ID NO: 174494 - RNA, 1410 nt, Artificial Sequence
  derived and/or modified CDS sequence (opt4) from neuraminidase__InfluenzaA__ABA42556
augaaccccaaccagaagaucaucaccaucggcagcgugagccugaccaucgccaccaucugcuuccugaugcagaucgccauccuggugaccaccgugacccugcacuucaagcaguacgagugcaacagcccccccaacaaccaggugaugcugugcgagcccaccaucaucgagagaaacaucaccgagaucguguaccugaccaacaccaccaucgagaaggagaucugccccaagcuggccgaguacagaaacuggagcaagccccagugcaacaucaccggcuucgcccccuucagcaaggacaacagcaucagacugagcgccggcggcgacaucugggugaccagagagcccuacgugagcugcgaccccgacaagugcuaccaguucgcccugggccagggcaccacccugaacaacggccacagcaacgacaccgugcacgacagaacccccuacagaacccugcugaugaacgagcugggcgugcccuuccaccugggcaccaagcaggugugcaucgccuggagcagcagcagcugccacgacggcaaggccuggcugcacgugugcgugaccggcgacgacgagaacgccaccgccagcuucaucuacaacggcagacugguggacagcaucggcagcuggagcaagaagauccugagaacccaggagagcgagugcgugugcaucaacggcaccugcaccguggugaugaccgacggcagcgccagcggcaaggccgacaccaagauccuguucaucgaggagggcaagaucgugcacaccagccugcugagcggcagcgcccagcacguggaggagugcagcugcuaccccagauaccccggcgugagaugcgugugcagagacaacuggaagggcagcaacagacccaucguggacaucaacgugaaggacuacagcaucgugagcagcuacgugugcagcggccuggugggcgacacccccagaaagaacgacagcagcagcagcagccacugccuggaccccaacaacgaggagggcggccacggcgugaagggcugggccuucgacgacggcaacgacguguggaugggcagaaccaucagcgagaagcugagaagcggcuacgagaccuucaaggugaucgagggcuggagcaagcccaacagcaagcugcagaucaacagacaggugaucguggacagaggcaacagaagcggcuacagcggcaucuucagcguggagggcaagagcugcaucaacagaugcuucuacguggagcugaucagaggcagaaagcaggaggccgaggugcuguggaccagcaacagcaucgugguguucugcggcaccagcggcaccuacggcaccggcagcuggcccgacggcgccgacaucaaccugaugcccaucuga

SEQ ID NO: 174495 - RNA, 1410 nt, Artificial Sequence; identical to SEQ ID NO: 174121
  derived and/or modified CDS sequence (opt4) from neuraminidase__InfluenzaA__ABA42567

SEQ ID NO: 174496 - RNA, 1410 nt, Artificial Sequence
  derived and/or modified CDS sequence (opt4) from neuraminidase__InfluenzaA__ABA42931
augaaccccaaccagaagaucaucaccaucggcagcgugagccugaccaucgccaccaucugcagccugaugcagaucgccauccuggugaccaccgugacccugcacuucaagcaguacgagugcaacagcccccccaacaaccaggugaugcugugcgagcccaccaucaucgagagaaacaucaccgagaucguguaccugaccaacaccaccaucgagaaggagaucugccccaagcuggccgaguacagaaacuggagcaagccccagugcaacaucaccggcuucgcccccuucagcaaggacaacagcaucagacugagcgccggcggcgacaucugggugaccagagagcccuacgugagcugcgaccccgacaagugcuaccaguucgcccugggccagggcaccacccugaacaacggccacagcaacgacaccgugcacgacagaacccccuacagaacccugcugaugaacgagcugggcgugcccuuccaccugggcaccaagcaggugugcaucgccuggagcagcagcagcugccacgacggcaaggccuggcugcacgugugcgugaccggcgacgacgagaacgccaccgccagcuucaucuacaacggcagacugguggacagcaucggcagcuggagcaagaagauccugagaacccaggagagcgagugcgugugcaucaacggcaccugcaccguggugaugaccgacggcagcgccagcggcaaggccgacaccaagauccuguucaucgaggagggcaagaucgugcacaccagccugcugagcggcagcgcccagcacguggaggagugcagcugcuaccccagauaccccggcgugagaugcgugugcagagacaacuggaagggcagcaacagacccaucguggacaucaacgugaaggacuacagcaucgugagcagcuacgugugcagcggccuggugggcgacacccccagaaagaacgacagcagcagcagcagccacugccuggaccccaacaacgaggagggcggccacggcgugaagggcugggccuucgacgacggcaacgacguguggaugggcagaaccaucagcgagaagcugagaagcggcuacgagaccuucaaggugaucgagggcuggagcaagcccaacagcaagcugcagaucaacagacaggugaucguggacagaggcaacagaagcggcuacagcggcaucuucagcguggagggcaagagcugcaucaacagaugcuucuacguggagcugaucagaggcagaaagcaggagaccgaggugcuguggaccagcaacagcaucgugguguucugcggcaccagcggcaccuacggcaccggcagcuggcccgacggcgccgacaucaaccugaugcccaucuga

SEQ ID NO: 174497 - RNA, 1410 nt, Artificial Sequence; identical to SEQ ID NO: 174121
  derived and/or modified CDS sequence (opt4) from neuraminidase__InfluenzaA__ABA42942

SEQ ID NO: 174498 - RNA, 1410 nt, Artificial Sequence; identical to SEQ ID NO: 174121
  derived and/or modified CDS sequence (opt4) from neuraminidase__InfluenzaA__ABA42981

SEQ ID NO: 174499 - RNA, 1410 nt, Artificial Sequence; identical to SEQ ID NO: 174209
  derived and/or modified CDS sequence (opt4) from neuraminidase__InfluenzaA__ABA42992

SEQ ID NO: 174500 - RNA, 1413 nt, Artificial Sequence
  derived and/or modified CDS sequence (opt4) from neuraminidase__InfluenzaA__ABA43192
augaaccccaaccagaagaucaucaccaucggcagcaucagcaucgccaucggcaucaucagccugaugcugcagaucggcaacaucaucagcaucugggccagccacagcauccagaccggcagccagaaccacaccggcgugugcaaccagagaaucaucaccuacgagaacagcaccugggugaaccacaccuacgugaacaucaacaacaccaacgugaucgccggcaaggacaagaccagcgugauccuggccggcaacagcagccugugcagcaucagcggcugggccaucuacaccaaggacaacagcaucagaaucggcagcaagggcgacguguucgugaucagagagcccuucaucagcugcagccaccuggagugcagaaccuucuuccugacccagggcgcccugcugaacgacaagcacagcaacggcaccgugaaggacagaagccccuacagagcccugaugagcugcccccugggcgaggcccccagccccuacaacagcaaguucgagagcguggccuggagcgccagcgccugccacgacggcaugggcuggcugaccaucggcaucagcggccccgacaacggcgccguggccgugcugaaguacaacggcaucaucaccgagaccaucaagagcuggaagaagcagauccugagaacccaggagagcgagugcgugugcgugaacggcagcugcuucaccaucaugaccgacggccccagcaacggcgccgccagcuacaagaucuucaagaucgagaagggcaaggugaccaagagcaucgagcugaacgcccccaacuuccacuacgaggagugcagcugcuaccccgacaccggcaccgugaugugcgugugcagagacaacuggcacggcagcaacagacccugggugagcuucaaccagaaccuggacuaccagaucggcuacaucugcagcggcguguucggcgacaaccccagacccaaggacggcgagggcagcugcaaccccgugaccguggacggcgccaacggcgugaagggcuucagcuacaaguacggcaacggcguguggaucggcagaaccaagagcaacagacugagaaagggcuucgagaugaucugggaccccaacggcuggaccgacaccgacagcgacuucagcgugaagcaggacguggugagcaucaccgacuggagcggcuacagcggcagcuucgugcagcaccccgagcugaccggccuggacugcaucagacccugcuucuggguggagcuggugagaggccugcccaaggagaacaccaccaucuggaccagcggcagcagcaucagcuucugcggcgugaacagcgacaccgccaacuggagcuggcccgacggcgccgagcugcccuucaccaucgacaaguga

SEQ ID NO: 174501 - RNA, 1410 nt, Artificial Sequence; identical to SEQ ID NO: 174406
  derived and/or modified CDS sequence (opt4) from neuraminidase__InfluenzaA__ABA43203

SEQ ID NO: 174502 - RNA, 1410 nt, Artificial Sequence
  derived and/or modified CDS sequence (opt4) from neuraminidase__InfluenzaA__ABA43339
augaaccccaaccagaagaucaucaccaucggcagcgugagccugagcaucgccaccaucugcuuccugaugcagaucgccauccuggugaccaccgugacccugcacuucaagcaguacgagugcagcagcccccccaacaaccaggugaugcccugcgagcccaccaucaucgagagaaacaucaccgagaucguguaccugaccaacaccaccaucgagaaggagaucugccccaagcugguggaguacagaaacuggagcaagccccagugcaagaucaccggcuucgcccccuucagcaaggacaacagcaucagacugagcgccggcggcgacaucugggugaccagagagcccuacgugagcugcgaccccggcaagugcuaccaguucgcccugggccagggcaccacccugaacaacagacacagcaacgacaccgugcacgacagaacccccuacagaacccugcugaugaacgagcugggcgugcccuuccaccugggcaccaagcaggugugcauggccuggagcagcagcagcugccacgacggcaaggccuggcugcacgugugcgugaccggccacgacgagaacgccaccgccagcuucaucuacgacggcagacugguggacagcaucggcagcuggagcaagaacauccugagaacccaggagagcgagugcgugugcaucaacggcaccugcaccguggugaugaccgacggcagcgccagcgagagagccgacaccaagauccuguucaucgaggagggcaagaucgugcacaucagcccccugagcggcagcgcccagcacguggaggagugcagcugcuaccccagauaccccggcgugagaugcgugugcagagacaacuggaagggcagcaacagacccaucguggacaucaacgugaaggacuacagcaucgugagcagcuacgugugcagcggccuggugggcgacacccccagaaagaacgacagaagcagcagcagcuacugcagaaaccccaacaacgagaagggcagccacggcgugaagggcugggccuucgacgacggcaacgacguguggaugggcagaaccaucggcgaggagcugagaagcggcuacgagaccuucaaggugaucggcggcuggagcacccccaacagcaagcugcagaucaacagacaggugaucguggacagcggcaacagaagcggcuacagcggcaucuucagcguggagggcaagagcugcaucaacagaugcuucuacguggagcugaucagaggcagaaagcaggagaccagagugugguggaccagcaacagcaucgugguguucugcggcaccagcggcaccuacggcaccggcagcuggcccgacggcgccgacaucaaccugaugcccaucuga

SEQ ID NO: 174503 - RNA, 1410 nt, Artificial Sequence
  derived and/or modified CDS sequence (opt4) from neuraminidase__InfluenzaA__ABA54916
augaaccccaaccagaagaucaucaccaccggcagcaucugcauggugaucggcauggugagccugaugcugcagaucggcaacaucaucagcaucugggugagccacagcauccagaccggcacccagcacagagccgagcccugcaacagaagcaucaucaacuacgagaacaacaccugggugaaccagaccuacgugaagaucagcaacaccaacuuccugaccgagaaggccguggccagcgugagacuggugggcaacagcagccugugccccaucagcggcugggccguguacagcaaggacaacagcaucagaaucggcagcaagggcgacguguucgugaucagagagcccuucaucagcugcagccaccuggagugcagaaccuucuuccugacccagggcgcccugcugaacgacaagcacagcaacggcaccgugaaggacagaagccccuacagaacccugaugagcugccccgugggcgaggcccccagccccuacaacagcagauucgagagcguggccuggagcgccagcgccugccacgacggcaccagcuggcugaccaucggcaucagcggccccgacaacggcgccguggccgugcugaaguacaacggcaucaucaccgacaccaucaagagcuggagaaacaacauccugagagcccaggagagcgagugcgccugcgugaacggcagcugcuucaccgugaugaccgacggccccagcaacggccaggccagcuacaagaucuucaagaucgagaagggcaagguggugaagagcguggagcugaacgcccccaacuaccacuacgaggagugcagcugcuaccccgacgccggcgagaucaccugcgugugcagagacaacuggcacggcagcaacagacccugggugagcuucaaccagaaccuggaguaccagaucggcuacaucugcagcggcguguucggcgacaaccccagacccaacgacggcaccggcagcugcggccccgugagccccaacggcgccuacggcgugaagggcuucagcuucaaguacggcaacggcguguggaucggcagaaccaagagcaccaacagcagaagcggcuucgagaugaucugggaccccaacggcuggaccggcaccgacagcaacuucagcgugaagcaggacaucguggccaucaccgacuggagcggcuacagcggcagcuucgugcagcaccccgagcugaccggccuggacugcaucagacccugcuucuggguggagcugaucagaggcagacccaaggagagcaccaucuggaccagcggcagcagcaucagcuucugcggcgugaacagcgacaccgugggcuggagcuggcccgacggcgccgagcugcccuucaccaucgacaaguga

SEQ ID NO: 174504 - RNA, 1413 nt, Artificial Sequence
  derived and/or modified CDS sequence (opt4) from neuraminidase__InfluenzaA__ABA87048
augaaccccaaccagaagaucaucaccaucggcagcaucagcaucgccaucggcaucaucagccugaugcugcagaucggcaacaucaucagcaucugggccagccacagcauccagaccggcagccagaaccacaccggcgugugcaaccagagaaucaucaccuacgagaacagcaccugggugaaccacaccuacgugaacaucaacaacaccaacgugaucgccggcaaggacaagaccagcgugacccuggccggcaacagcagccugugcagcaucagcggcugggccaucuacaccaaggacaacagcaucagaaucggcagcaagggcgacguguucgugaucagagagcccuucaucagcugcagccaccuggagugcagaaccuucuuccugacccagggcgcccugcugaacgacaagcacagcaacggcaccgugaaggacagaagccccuacagagcccugaugagcugcccccugggcgaggcccccagccccuacaacagcaaguucgagagcguggccuggagcgccagcgccugccacgacggcaugggcuggcugaccaucggcaucagcggccccgacaacggcgccguggccgugcugaaguacaacggcaucaucaccgagaccaucaagagcuggaagaagcagauccugagaacccaggagagcgagugcgugugcgugaacggcagcugcuucaccaucaugaccgacggccccagcaacagagccgccagcuacaagaucuucaagaucgagaagggcaaggugaccaagagcguggagcugaacgcccccaacuuccacuacgaggagugcagcugcuaccccgacaccggcaccgugaugugcgugugcagagacaacuggcacggcagcaacagacccugggugagcuucaaccagaaccuggacuaccagaucggcuacaucugcagcggcguguucggcgacaaccccagacccaaggacggcgagggcagcugcaaccccgugaccguggacggcgccaacggcgugaagggcuucagcuacaaguacggcaacggcguguggaucggcagaaccaagagcaacagacugagaaagggcuucgagaugaucugggaccccaacggcuggaccgacaccgacagcgacuucagcgugaagcaggacgugguggccaucaccgacuggagcggcuacagcggcagcuucgugcagcaccccgagcugaccggccuggacugcaucagacccugcuucuggguggagcuggugagaggccugcccaaggagaacaccaccaucuggaccagcggcagcagcaucagcuucugcggcgugaacagcgacaccgccaacuggagcuggcccgacggcgccgagcugcccuucaccaucgacaaguga

SEQ ID NO: 174505 - RNA, 1413 nt, Artificial Sequence
  derived and/or modified CDS sequence (opt4) from neuraminidase__InfluenzaA__ABA87060
augaaccccaaccagaagaucaucaccaucggcagcaucagcaucgccaucggcaucaucagccugaugcugcagaucggcaacaucaucagcaucugggccagccacagcauccagaccggcagccagaaccacaccggcaucugcaaccagagaaucaucaccuacgagaacagcaccugggugaaccacaccuacgugaacaucaacaacaccaacgugguggccggcaaggacaagaccagcgugacccuggccggcaacagcagccugugcagcaucagcggcugggccaucuacaccaaggacaacagcaucagaaucggcagcaagggcgacguguucgugaucagagagcccuucaucagcugcagccaccuggagugcagaaccuucuuccugacccagggcgcccugcugaacgacaagcacagcaacggcaccgugaaggacagaagccccuacagagcccugaugagcugcccccugggcgaggcccccagccccuacaacagcaaguucgagagcguggccuggagcgccagcgccugccacgacggcaugggcuggcugaccaucggcaucagcggccccgacaacggcgccguggccgugcugaaguacaacggcaucaucaccgagaccaucaagagcuggaagaagagaauccugagaacccaggagagcgagugcgugugcgugaacggcagcugcuucaccaucaugaccgacggccccagcaacggcaccgccagcuacaagaucuucaagaucgagaagggcaaggugaccaagagcaucgagcugaacgcccccaacuuccacuacgaggagugcagcugcuaccccgacaccggcaccgugaugugcgugugcagagacaacuggcacggcagcaacagacccugggugagcuucaaccagaaccuggacuaccagaucggcuacaucugcagcggcguguucggcgacaaccccagacccaaggacggcaagggcagcugcagccccgugaccguggacggcgccgacggcgugaagggcuucagcuacaaguacggcaacggcguguggaucggcagaaccaagagcaacagacugagaaagggcuucgagaugaucugggaccccaacggcuggaccgacaccgacagcgacuucagcgugaagcaggacgugguggccaucaccgacuggagcggcuacagcggcagcuucgugcagcaccccgagcugaccggccuggacugcaucagacccugcuucuggguggagcuggugagaggccugcccagagagaacaccaccaucuggaccagcggcagcagcaucagcuucugcggcguggacagcgacaccgccaacuggagcuggcccgacggcgccgagcugcccuucaccaucgacaaguga

SEQ ID NO: 174506 - RNA, 1413 nt, Artificial Sequence
  derived and/or modified CDS sequence (opt4) from neuraminidase__InfluenzaA__ABA87083
augaaccccaaccagaagaucaucaccaucggcagcaucagcaucgccaucggcaucaucagccugaugcugcagaucggcaacaucaucagcaucugggccagccacagcauccagaccggcagccagaaccacaccggcaucugcaaccagaagaucaucaccuacaagaacagcaccugggugaaccacaccuacgugaacaucaacaacaccaacgugguggccggcaaggacaagaccagcgugacccuggccggcaacagcagccugugcagcaucagcggcugggccaucuacaccaaggacaacagcaucagaaucggcagcaagggcgacguguucgugaucagagagcccuucaucagcugcagccaccuggagugcagaaccuucuuccugacccagggcgcccugcugaacgacaagcacagcaacggcaccgugaaggacagaagccccuacagagcccugaugagcugcccccugggcgaggcccccagccccuacaacagcaaguucgagagcguggccuggagcgccagcgccugccacgacggcaugggcuggcugaccaucggcaucagcggccccgacaacggcgccguggccgugcugaaguacaacggcaucaucaccgagaccaucaagagcuggaagaagagaauccugagaacccaggagagcgagugcgugugcgugaacggcagcugcuucaccaucaugaccgacggccccagcaacggcgccgccagcuacaagaucuucaagaucgagaagggcaaggugaccaagagcaucgagcugaacgcccccaacuuccacuacgaggagugcagcugcuaccccgacaccggcaccgugaugugcgugugcagagacaacuggcacggcagcaacagacccugggugagcuucaaccagaaccuggacuaccagaucggcuacaucugcagcggcguguucggcgacaaccccagacccaaggacggcgagggcagcugcaaccccgugaccguggacggcgccgacggcgugaagggcuucagcuacaaguacggcaacggcguguggaucggcagaaccaagagcaacagacugagaaagggcuucgagaugaucugggaccccaacggcuggaccgacaccgacagcguguucagcgugaagcaggacgugguggccaucaccgacuggagcggcuacagcggcagcuucgugcagcaccccgagcugaccggccuggacugcaucagacccugcuucuggguggagcuggugagaggccugcccagagagaacaccaccaucuggaccagcggcagcagcaucagcuucugcggcgugaacagcgacaccgccaacuggagcuggcccgacggcgccgagcugcccuucaccaucgacaaguga

SEQ ID NO: 174507 - RNA, 1413 nt, Artificial Sequence
  derived and/or modified CDS sequence (opt4) from neuraminidase__InfluenzaA__ABA87234
augaacagcaaccagaagaucaucaccaucggcagcaucagcaucgccaucggcaucaucagccugaugcugcagaucggcaacaucaucagcaucugggccagccacagcauccagaccggcagccagaaccacaccggcgugugcaaccagagaaucaucaccuacgagaacagcaccugggugaaccacaccuacgugaacaucaacaacaccaacgugaucgccggcaaggacaagaccagcgugacccuggccggcaacagcagccugugcagcaucagcggcugggccaucuacaccaaggacaacagcaucagaaucggcagcaagggcgacguguucgugaucagagagcccuucaucagcugcagccaccuggagugcagaaccuucuuccugacccagggcgcccugcugaacgacaagcacagcaacggcaccgugaaggacagaagccccuacagagcccugaugagcugcccccugggcgaggcccccagccccuacaacagcaaguucgagagcguggccuggagcgccagcgccugccacgacggcaugggcuggcugaccaucggcaucagcggccccgacaacggcgccguggccgugcugaaguacaacggcaucaucaccgagaccaucaagagcuggaagaagcagauccugagaacccaggagagcgagugcgugugcgugaacggcagcugcuucaccaucaugaccgacggccccagcaacggcgccgccagcuacaagaucuucaagaucgagaagggcaaggugaucaagagcaucgagcugaacgcccccaacuuccacuacgaggagugcagcugcuaccccgacaccggcaccgugaugugcgugugcagagacaacuggcacggcagcaacagacccugggugagcuucaaccagaaccuggacuaccagaucggcuacaucugcagcggcguguucggcgacaaccccagacccaaggacggcgagggcagcugcaaccccgugaccguggacggcgccaacggcgugaagggcuucagcuacaaguacggcaacggcguguggaucggcagaaccaagagcaacagacugagaaagggcuucgagaugaucugggaccccaacggcuggaccgacaccgacagcgacuucagcgugaagcaggacgugguggccaucaccgacuggagcggcuacagcggcagcuucgugcagcaccccgagcugaccggccuggacugcaucagacccugcuucuggguggagcuggugagaggccugcccaaggagaacaccaccaucuggaccagcggcagcagcaucagcuucugcggcgugaacagcgacaccgccaacuggagcuggcccgacggcgccgagcugcccuucaccaucgacaaguga

SEQ ID NO: 174508 - RNA, 1410 nt, Artificial Sequence; identical to SEQ ID NO: 174442
  derived and/or modified CDS sequence (opt4) from neuraminidase__InfluenzaA__ABB02784

SEQ ID NO: 174509 - RNA, 1413 nt, Artificial Sequence; identical to SEQ ID NO: 174446
  derived and/or modified CDS sequence (opt4) from neuraminidase__InfluenzaA__ABB02795

SEQ ID NO: 174510 - RNA, 1413 nt, Artificial Sequence; identical to SEQ ID NO: 174446
  derived and/or modified CDS sequence (opt4) from neuraminidase__InfluenzaA__ABB02806

SEQ ID NO: 174511 - RNA, 1413 nt, Artificial Sequence
  derived and/or modified CDS sequence (opt4) from neuraminidase__InfluenzaA__ABB02817
augaaccccaaccagaagaucaucaccaucggcagcaucagcaucgccaucggcaucaucagccugaugcugcagaucggcaacaucaucagcaucugggccagccacagcauccagaccggcagccagaaccacaccggcgugugcaaccagagaaucaucaccuacgagaacagcaccugggugaaccacaccuacgugaacaucaacaacaccaacgugaucgccggcaaggacaagaccagcgugacccuggccggcaacagcagccugugcagcaucagcggcugggccaucuacaccaaggacaacagcaucagaaucggcagcaagggcgacguguucgugaucagagagcccuucaucagcugcagccaccuggagugcagaaccuucuuccugacccagggcgcccugcugaacgacaagcacagcaacggcaccgugaaggacagaagccccuacagagcccugaugagcugcccccugggcgaggcccccagccccuacaacagcaaguucgagagcguggccuggagcgccagcgccugccacgacggcaugggcuggcugaccaucggcaucagcggccccgacaacggcgccguggccgugcugaaguacaacggcaucaucaccgagaccaucaagagcuggaagaagcagauccugagaacccaggagagcgagugcgugugcgugaacggcagcugcuucaccaucaugaccgacggccccagcaacggcgccgccagcuacaagaucuucaagaucgagaagggcaaggugaccaagagcguggagcugaacgcccccaacuuccacuacgaggagugcagcugcuaccccgacaccggcaccgugaugugcgugugcagagacaacuggcacggcagcaacagacccugggugagcuucaaccagaaccuggacuaccagaucggcuacaucugcagcggcguguucggcgacaaccccagacccaaggacggcgagggcagcugcaaccccgugaccguggacggcgccaacggcgugaagggcuucagcuacaaguacggcaacggcguguggaucggcagaaccaagagcaacagacugagaaagggcuucgagaugaucugggaccccaacggcuggaccgacaccgacagcgacuucagcgugaagcaggacgugguggccaucaccgacuggagcggcuacagcggcagcuucgugcagcaccccgagcugaccggccuggacugcaucagacccugcuucuggguggagcuggugagaggccugcccaaggagaacaccaccaucuggaccagcggcagcagcaucagcuucugcggcgugaacagcgacaccgccaacuggagcuggcccgacggcgccgagcugcccuucaccaucgacaaguga

SEQ ID NO: 174512 - RNA, 1413 nt, Artificial Sequence; identical to SEQ ID NO: 174511
  derived and/or modified CDS sequence (opt4) from neuraminidase__InfluenzaA__ABB02828

SEQ ID NO: 174513 - RNA, 1410 nt, Artificial Sequence
  derived and/or modified CDS sequence (opt4) from neuraminidase__InfluenzaA__ABB02839
augaaccccaaccagaagaucaucaccaucggcagcgugagccugaccaucagcaccaucugcuucuucaugcagaucgccauccugaucaccaccgugacccugcacuucaagcaguacgaguucaacagcccccccaacaaccagguggugcugugcgagcccaccaucaucgagagaaacaucaccgagaucguguaccugaccaacaccaccaucgagaaggagaucugccccaagcuggccgaguacagaaacuggagcaagccccagugcgacaucaccggcuucgcccccuucagcaaggacaacagcaucagacugagcgccggcggcgacaucugggugaccagagagcccuacgugagcugcgaccccgacaagugcuaccaguucgcccugggccagggcaccacccugaacaacgugcacagcaacgacaccgugcacgacagaacccccuacagaacccugcugaugaacgagcugggcgugcccuuccaccugggcaccaagcaggugugcaucgccuggagcagcagcagcugccacgacggcaaggccuggcugcacgugugcgugaccggcgacgacaagaacgccaccgccagcuucaucuacaacggcagacugguggacagcaucgugagcuggagcaaggagauccugagaacccaggagagcgagugcgugugcaucaacggcaccugcaccguggugaugaccgacggcagcgccagcggcaaggccgacaccaagauccuguucaucgaggagggcaagaucgugcacaccagcacccugagcggcagcgcccagcacguggaggagugcagcugcuaccccagauaccccggcgugagaugcgugugcagagacaacuggaagggcagcaacagacccaucguggacaucaacaucaaggacuacagcaucgugagcagcuacgugugcagcggccuggugggcgacacccccagaaagaacgacagcagcagcagcagccacugccuggaccccaacaacgaggagggcggccacggcgugaagggcugggccuucgacgacggcaacgacguguggaugggcagaaccaucagcgagaagcugagaagcggcuacgagaccuucaaggugaucgagggcuggagcaaccccaacagcaagcugcagaucaacagacaggugaucguggacagaggcaacagaagcggcuacagcggcaucuucagcguggagggcaagagcugcaucaacagaugcuucuacguggagcugaucagaggcagaaaggaggagaccgaggugcuguggaccagcaacagcaucgugguguucugcggcaccagcggcaccuacggcaccggcagcuggcccgacggcgccgacaucaaccugaugcccaucuga

SEQ ID NO: 174514 - RNA, 1410 nt, Artificial Sequence
  derived and/or modified CDS sequence (opt4) from neuraminidase__InfluenzaA__ABB02850
augaaccccaaccagaagaucaucaccaucggcagcgugagccugaccaucagcaccaucugcuucuucaugcagaucgccauccugaucaccaccgugacccugcacuucaagcaguacgaguucaacagcccccccaacaaccaggugaugcugugcgagcccaccaucaucgagagaaacaucaccgagaucguguaccugaccaacaccaccaucgagaaggagaucugccccaagcccgccgaguacagaaacuggagcaagccccagugcgacaucaccggcuucgcccccuucagcaaggacaacagcaucagacugagcgccggcggcgacaucugggugaccagagagcccuacgugagcugcgaccccgacaagugcuaccaguucgcccugggccagggcaccacccugaacaacgugcacagcaacgacaccgugcacgacagaacccccuacagaacccugcugaugaacgagcugggcgugcccuuccaccugggcaccaagcaggugugcaucgccuggagcagcagcagcugccacgacggcaaggccuggcugcacgugugcgugaccggcgacgacaagaacgccaccgccagcuucaucuacaacggcagacugguggacagcaucgugagcuggagcaaggagauccugagaacccaggagagcgagugcgugugcaucaacggcaccugcgccguggugaucaccgacggcagcgccagcggcaaggccgacaccaagauccuguucaucgaggagggcaagaucgugcacaccagcaagcugagcggcagcgcccagcacguggaggagugcagcugcuaccccagauaccccggcaucagaugcgugugcagagacaacuggaagggcagcaacagacccaucguggacaucaacaucaaggacuacagcaucgugagcagcuacgugugcagcggccuggugggcgacacccccagaaagaacgacagcagcagcagcagccugugccuggaccccaacaacgaggagggcggccacggcgugaagggcugggccuucgacgacggcaacgacguguggaugggcagaaccaucagcgagaagcugagaagcggcuacgagaccuucaaggugaucgagggcuggagcaaccccaacagcaagcugcagaucaacagacaggugaucguggacagaggcaacagaagcggcuacagcggcaucuucagcguggagggcaagagcugcaucaacagaugcuucuacguggagcugaucagaggcagaaaggaggagaccgaggugcuguggaccagcaacagcaucgugguguucugcggcaccagcggcaccuacggcaccggcagcuggcccgacggcgccgacaucaaccugaugcccaucuga

SEQ ID NO: 174515 - RNA, 1410 nt, Artificial Sequence
  derived and/or modified CDS sequence (opt4) from neuraminidase__InfluenzaA__ABB02861
augaaccccaaccagaagaucaucaccaucggcagcgugagccugaccaucgccaccaucugcuuccugaugcagaucgccauccuggugaccaccgugacccugcacuucaagcaguacgagugcaacagcccccccaacaaccaggugaugcugugcgagcccgccaucaucgagagaaacaucaccgagaucguguaccugaccaacaccaccaucgagaaggagaucugccccaagcuggccgaguacagaaacuggagcaagccccagugcaacaucaccggcuucgcccccuucagcaaggacaacagcaucagacugagcgccggcggcgacaucugggugaccagagagcccuacgugagcugcgaccccgacaagugcuaccaguucgcccugggccagggcaccacccugaacaacggccacagcaacgacaccgugcacgacagaacccccuacagaacccugcugaugaacgagcugggcgugcccuuccaccugggcaccagacaggugugcaucgccuggagcagcagcagcugccacgacggcaaggccuggcugcacgugugcgugaccggcgacgacgagaacgccaccgccagcuucaucuacgacggcagacugguggacagcaucggcagcuggagcaagaagauccugagaacccaggagagcgagugcgugugcaucaacggcaccugcaccguggugaugaccgacggcagcgccagcggcaaggccgacaccaagauccuguucaucgaggagggcaagaucgugaacaucagcacccugagcggcagcgcccagcacguggaggagugcagcugcuaccccagauaccccggcgugagaugcgugugcagagacaacuggaagggcagcaacagacccaucguggacaucaacgugaaggacuacagcaucgugagcagcuacgugugcagcggccuggugggcgacacccccagaaagaacgacagcuucagcagcagccacugccuggaccccaacaacgaggagggcggccacggcgugaagggcugggccuucgacgacggcaacgacguguggaugggcagaaccaucagcgagaagcugagaagcggcuacgagaccuucaaggugaucgagggcuggagcaagcccaacagcaagcugcagaucaacagacaggugaucguggagagaggcaacagaagcggcuacagcggcaucuucagcguggagggcaagagcugcaucaacagaugcuucuacguggagcugaucagaggcagaaaggaggagaccgaggugugguggaccagcaacagcaucgugguguucugcggcaccagcggcaccuacggcaccggcagcuggcccgacggcgccgacaucgaccugaugcccaucuga

SEQ ID NO: 174516 - RNA, 1410 nt, Artificial Sequence; identical to SEQ ID NO: 174313
  derived and/or modified CDS sequence (opt4) from neuraminidase__InfluenzaA__ABB02872

SEQ ID NO: 174517 - RNA, 1410 nt, Artificial Sequence; identical to SEQ ID NO: 174313
  derived and/or modified CDS sequence (opt4) from neuraminidase__InfluenzaA__ABB02883

SEQ ID NO: 174518 - RNA, 1410 nt, Artificial Sequence
  derived and/or modified CDS sequence (opt4) from neuraminidase__InfluenzaA__ABB02894
augaaccccaaccagaagaucaucaccaucggcagcgugagccugaccaucgccaccaucugcuuccugaugcagaucgccauccuggugaccaccgugacccugcacuucaagcaguacgagugcaacagcccccccaacaaccaggugaugcugugcgagcccaccaucaucgagagaaacaucaccgagaugguguaccugaccaacaccaccaucgagaaggagaucugccccaagcuggccgaguacagaaacuggagcaagccccagugcaacaucaccggcuucgcccccuucagcaaggacaacagcaucagacugagcgccggcggcgacaucugggugaccagagagcccuacgugagcugcgaccccgacaagugcuaccaguucgcccugggccagggcaccacccugaacaacggccacagcaacgacaccgugcacgacagaacccccuacagaacccugcugaugaacgagcugggcgugcccuuccaccugggcaccaagcaggugugcaucgccuggagcagcagcagcugccacgacggcaaggccuggcugcacgugugcgugaccggcgacgacgagaacgccaccgccagcuucaucuacaacggcagacugguggacagcaucggcagcuggagcaagaagauccugagaacccaggagagcgagugcgugugcaucaacggcaccugcaccguggugaugaccgacggcagcgccagcggcaaggccgacaccaagauccuguucaucgaggagggcaagaucgugcacaccagccugcugagcggcagcgcccagcacguggaggagugcagcugcuaccccagauaccccggcgugagaugcgugugcagagacaacuggaagggcagcaacagacccaucguggacaucaacgugaaggacuacagcaucgugagcagcuacgugugcagcggccuggugggcgacacccccagaaagaacgacagcagcagcagcagccacugccuggaccccaacaacgaggagggcggccacggcgugaagggcugggccuucgacgacggcaacgacguguggaugggcagaaccaucagcgagaagcugagaagcggcuacgagaccuucaaggugaucgagggcuggagcaagcccaacagcaagcugcagaucaacagacaggugaucguggacagaggcaacagaagcggcuacagcggcaucuucagcguggagggcaagagcugcaucaacagaugcuucuacguggagcugaucagaggcagaaagcaggagaccgaggugcuguggaccagcaacagcaucgugguguucugcggcaccagcggcaccuacggcaccggcagcuggcccgacggcgccgacaucaaccugaugcccaucuga

SEQ ID NO: 174519 - RNA, 1410 nt, Artificial Sequence; identical to SEQ ID NO: 174121
  derived and/or modified CDS sequence (opt4) from neuraminidase__InfluenzaA__ABB02905

SEQ ID NO: 174520 - RNA, 1413 nt, Artificial Sequence
  derived and/or modified CDS sequence (opt4) from neuraminidase__InfluenzaA__ABB02916
augaaccccaaccagaagaucaucaccaucggcagcaucagcaucgccaucggcaucaucagccugaugcugcagaucggcaacaucaucagcaucugggccagccacagcauccagaccggcagccagaaccacaccggcgugugcaaccagagaaucaucaccuacgagaacagcaccugggugaaccacaccuacgugaacaucaacaacaccaacgugaucgccgagaaggacaagaccagcgugacccuggccggcaacagcagccugugcagcaucagcggcugggccaucuacaccaaggacaacagcaucagaaucggcagcaagggcgacguguucgugaucagagagcccuucaucagcugcagccaccuggagugcagaaccuucuuccugacccagggcgcccugcugaacgacaagcacagcaacggcaccgugaaggacagaagccccuacagagcccugaugagcugcccccugggcgaggcccccagccccuacaacagcaaguucgagagcguggccuggagcgccagcgccugccacgacggcaugggcuggcugaccaucggcaucagcggccccgacaacggcgccguggccgugcugaaguacaacggcaucaucaccgagaccaucaagagcuggaagaagcagauccugagaacccaggagagcgagugcgugugcgugaacggcagcugcuucaccaucaugaccgacggccccagcaacggcgccgccagcuacaagaucuucaagaucgagaagggcaaggugaccaagagcaucgagcugaacgcccccaacuuccacuacgaggagugcagcugcuaccccgacaccggcaccgugaugugcgugugcagagacaacuggcacggcagcaacagacccugggugagcuucaaccagaaccuggacuaccagaucggcuacaucugcagcggcguguucggcgacaaccccagacccagagacggcgagggcagcugcaaccccgugaccguggacggcgccaacggcgugaagggcuucagcuacaaguacggcaacggcguguggaucggcagaaccaagagcaacagacugagaaagggcuucgagaugaucugggaccccaacggcuggaccgacaccgacagcgacuucagcgugaagcaggacgugguggccaucaccgacuggagcggcuacagcggcagcuucgugcagcaccccgagcugaccggccuggacugcaucagacccugcuucuggguggagcuggugagaggccugcccagagagaacaccaccaucuggaccagcggcagcagcaucagcuucugcggcgugaacagcgacaccgccaacuggagcuggcccgacggcgccgagcugcccuucaccaucgacaaguga

SEQ ID NO: 174521 - RNA, 1413 nt, Artificial Sequence
  derived and/or modified CDS sequence (opt4) from neuraminidase__InfluenzaA__ABB02927
augaaccccaaccagaagaucaucaccaucggcagcaucagcaucgccaucggcaucaucagccugaugcugcagaucggcaacaucaucagcaucugggccagccacagcauccagaccggcagccagaaccacaccggcaucugcaaccagagaaucaucaccuacgagaacagcaccugggugaaccacaccuacgugaacaucaacaacaccaacgugguggccggcaaggacaagaccagcgugacccuggccggcaacagcagccugugcagcaucagcggcugggccaucuacaccaaggacaacagcaucagaaucggcagcaagggcgacguguucgugaucagagagcccuucaucagcugcagccaccuggagugcagaaccuucuuccugacccagggcgcccugcugaacgacaagcacagcaacggcaccgugaaggacagaagccccuacagagcccugaugagcugcccccugggcgaggcccccagccccuacaacagcaaguucgagagcguggccuggagcgccagcgccugccacgacggcaugggcuggcugaccaucggcaucagcggccccgacaacggcgccguggccgugcugaaguacaacggcaucaucaccgagaccaucaagagcuggaagaagagaauccugagaacccaggagagcgagugcgugugcgugaacggcagcugcuucaccaucaugaccgacggccccagcaacggcgccgccagcuacaagaucuucaagaucgagaagggcaaggugaccaagagcaucgagcugaacgcccccaacuuccacuacgaggagugcagcugcuaccccgacaccggcaccgugaugugcgugugcagagacaacuggcacggcagcaacagacccugggugagcuucaaccagaaccuggacuaccagaucggcuacaucugcagcggcguguucggcgacaaccccagacccaaggacggcgagggcagcugcaaccccgugaccguggacggcgccgacggcgugaagggcuucagcuacaaguacggcaacggcguguggaucggcagaaccaagagcaacaagcugagaaagggcuucgagaugaucugggaccccaacggcuggaccgacaccgacagcgacuucagcgugaagcaggacgugguggccaucaccgacuggagcggcuacagcggcagcuucgugcagcaccccgagcugaccggccuggacugcaucagacccugcuucuggguggagcuggugagaggccugcccagagagaacaccaccaucuggaccagcggcagcagcaucagcuucugcggcgugaacagcgacaccgccaacuggagcuggcccgacggcgccgagcugcccuucaccaucgacaaguga

SEQ ID NO: 174522 - RNA, 1413 nt, Artificial Sequence
  derived and/or modified CDS sequence (opt4) from neuraminidase__InfluenzaA__ABB02939
augaaccccaaccagaagaucaucaccaucggcagcaucagcaucgccaucggcaucaucagccugaugcugcagaucggcaacaucaucagcaucugggccagccacagcauccagaccggcagccagaaccacaccggcgugugcaaccagagaaucaucaccuacgagaacagcaccuggaugaaccacaccuacgugaacaucaacaacaccaacgugaucgccggcaaggacaagaccagcgugacccuggccggcaacagcagccugugcagcaucagcggcugggccaucuacaccaaggacaacagcaucagaaucggcagcaagggcgacguguucgugaucagagagcccuucaucagcugcagccaccuggagugcagaaccuucuuccugacccagggcgcccugcugaacgacaagcacagcaacggcaccgugaaggacagaagccccuacagagcccugaugagcugcccccugggcgaggcccccagccccuacaacagcaaguucgagagcguggccuggagcgccagcgccugccacgacggcaugggcuggcugaccaucggcaucagcggccccgacaacggcgccguggccgugcugaaguacaacggcaucaucaccgagaccaucaagagcuggaagaagcagauccugagaacccaggagagcgagugcgugugcgugaacggcagcugcuucaccaucaugaccgacggccccagcaacggcgccgccagcuacaagaucuucaagaucgagaagggcaaggugaccaagagcauggagcugaacgcccccaacuuccacuacgaggagugcagcugcuaccccgacaccggcaccgugaugugcgugugcagagacaacuggcacggcagcaacagacccugggugagcuucaaccagaaccuggacuaccagaucggcuacaucugcagcggcguguucggcgacaaccccagacccaaggacggcgagggcagcugcaaccccgugaccguggacggcgccaacggcgugaagggcuucagcuacaaguacggcaacggcguguggaucggcagaaccaagagcaacagacugagaaagggcuucgagaugaucugggaccccaacggcuggaccgacaccgacagcgacuucagcgugaagcaggacgugguggccaucaccgacuggagcggcuacagcggcagcuucgugcagcaccccgagcugaccggccuggacugcaucagacccugcuucuggguggagcuggugagaggccugcccaaggagaacaccaccaucuggaccagcggcagcagcaucagcuucugcggcgugaacagcgacaccgccaacuggagcuggcccgacggcgccgagcugcccuucaccaucgacaaguga

SEQ ID NO: 174523 - RNA, 1410 nt, Artificial Sequence; identical to SEQ ID NO: 174438
  derived and/or modified CDS sequence (opt4) from neuraminidase__InfluenzaA__ABB02950

SEQ ID NO: 174524 - RNA, 1410 nt, Artificial Sequence; identical to SEQ ID NO: 174339
  derived and/or modified CDS sequence (opt4) from neuraminidase__InfluenzaA__ABB02961

SEQ ID NO: 174525 - RNA, 1410 nt, Artificial Sequence; identical to SEQ ID NO: 174339
  derived and/or modified CDS sequence (opt4) from neuraminidase__InfluenzaA__ABB02972

SEQ ID NO: 174526 - RNA, 1410 nt, Artificial Sequence; identical to SEQ ID NO: 174339
  derived and/or modified CDS sequence (opt4) from neuraminidase__InfluenzaA__ABB02983

SEQ ID NO: 174527 - RNA, 1410 nt, Artificial Sequence; identical to SEQ ID NO: 174339
  derived and/or modified CDS sequence (opt4) from neuraminidase__InfluenzaA__ABB02994

SEQ ID NO: 174528 - RNA, 1410 nt, Artificial Sequence; identical to SEQ ID NO: 174339
  derived and/or modified CDS sequence (opt4) from neuraminidase__InfluenzaA__ABB03005

SEQ ID NO: 174529 - RNA, 1410 nt, Artificial Sequence; identical to SEQ ID NO: 174344
  derived and/or modified CDS sequence (opt4) from neuraminidase__InfluenzaA__ABB03016

SEQ ID NO: 174530 - RNA, 1410 nt, Artificial Sequence; identical to SEQ ID NO: 174339
  derived and/or modified CDS sequence (opt4) from neuraminidase__InfluenzaA__ABB03027

SEQ ID NO: 174531 - RNA, 1410 nt, Artificial Sequence; identical to SEQ ID NO: 174344
  derived and/or modified CDS sequence (opt4) from neuraminidase__InfluenzaA__ABB03038

SEQ ID NO: 174532 - RNA, 1410 nt, Artificial Sequence; identical to SEQ ID NO: 174339
  derived and/or modified CDS sequence (opt4) from neuraminidase__InfluenzaA__ABB03049

SEQ ID NO: 174533 - RNA, 1410 nt, Artificial Sequence
  derived and/or modified CDS sequence (opt4) from neuraminidase__InfluenzaA__ABB03060
augaaccccaaccagaagaucaucaccaucggcagcgugagccugaccaucagcaccaucugcuucuucaugcagaucgccauccugaucaccaccgugacccugcacuucaagcaguacgaguucaacagcccccccaacaaccaggugaugcugugcgagcccaccaucaucgagagaaacaucaccgagaucguguaccugaccaacaccaccaucgagaaggagaucugccccaagcuggccgaguacagaaacuggagcaagccccagugcgacaucaccggcuucgcccccuucagcaaggacaacagcaucagacugagcgccggcggcgacaucugggugaccagagagcccuacgugagcugcgaccccgacaagugcuaccaguucgcccugggccagggcaccacccugaacaacgugcacagcaacgacaccgugcacgacagaacccccuacagaacccugcugaugaacgagcugggcgugcccuuccaccugggcaccaagcaggugugcaucgccuggagcagcagcagcugccacgacggcaaggccuggcugcacgugugcgugaccggcgacgacaagaacgccaccgccagcuucaucuacaacggcagacugguggacagcaucgugagcuggagcaaggagauccugagaacccaggagagcgagugcgugugcaucaacggcaccugcaccguggugaugaccgacggcagcgccagcggcaaggccgacaccaagauccuguucaucgaggagggcaagaucgugcacaccagcacccugagcggcagcgcccagcacguggaggagugcagcugcuaccccagauaccccggcaucagaugcgugugcagagacaacuggaagggcagcaacagacccaucguggacaucaacaucaaggacuacagcaucgugagcagcuacgugugcagcggccuggugggcgacacccccagaaagaacgacagcagcagcagcagccacugccuggaccccaacaacgaggagggcggccacggcgugaagggcugggccuucgacgacggcaacgacguguggaugggcagaaccaucagcgagaagcugagaagcggcuacgagaccuucaaggugaucgagggcuggagcaaccccaacagcaagcugcagaucaacagacaggugaucguggacagaggcaacagaagcggcuacagcggcaucuucagcguggagggcaagagcugcaucaacagaugcuucuacguggagcugaucagaggcagaaaggaggagaccgaggugcuguggaccagcaacagcaucgugguguucugcggcaccagcggcaccuacggcaccggcagcuggcccgacggcgccgacaucaaccugaugcccaucuga

SEQ ID NO: 174534 - RNA, 1410 nt, Artificial Sequence
  derived and/or modified CDS sequence (opt4) from neuraminidase__InfluenzaA__ABB03071
augaaccccaaccagaagaucaucaccaucggcagcgugagccugaccaucagcaccaucugcuucuucaugcagaucgccauccugaucaccaccgugacccugcacuucaagcaguacgaguucaacagcccccccaacaaccaggugaugcugugcgagcccaccaucaucgagagaaacaucaccgagaucguguaccugaccaacaccaccaucgagaaggagaucugccccaagcuggccgaguacagaaacuggagcaagccccagugcggcaucaccggcuucgcccccuucagcaaggacaacagcaucagacugagcgccggcggcgacaucugggugaccagagagcccuacgugagcugcgaccccgacaagugcuaccaguucgcccugggccagggcaccacccugaacaacgugcacagcaacgacaccgugcacgacagaacccccuacagaacccugcugaugaacgagcugggcgugcccuuccaccugggcaccaagcaggugugcaucgccuggagcagcagcagcugccacgacggcaaggccuggcugcacgugugcgugaccggcgacgacaagaacgccaccgccagcuucaucuacaacggcagacugguggacagcaucgugagcuggagcaaggagauccugagaacccaggagagcgagugcgugugcaucaacggcaccugcaccguggugaugaccgacggcagcgccagcggcaaggccgacaccaagauccuguucaucgaggagggcaagaucgugcacaccagcacccugagcggcagcgcccagcacguggaggagugcagcugcuaccccagauaccccggcgugagaugcgugugcagagacaacuggaagggcagcaacagacccaucguggacaucaacaucaaggacuacagcaucgugagcagcuacgugugcagcggccuggugggcgacacccccagaaagaacgacagcagcagcagcagccacugccuggaccccaacaacgaggagggcggccacggcgugaagggcugggccuucgacgacggcaacgacguguggaugggcagaaccaucagcgagaagcugagaagcggcuacgagaccuucaaggugaucgagggcuggagcaaccccaacagcaagcugcagaucaacagacaggugaucguggacaagggcaacagaagcggcuacagcggcaucuucagcguggagggcaagagcugcaucaacagaugcuucuacguggagcugaucagaggcagaaaggaggagaccgaggugcuguggaccagcaacagcaucgugguguucugcggcaccagcggcaccuacggcaccggcagcuggcccgacggcgccgacaucaaccugaugcccaucuga

SEQ ID NO: 174535 - RNA, 1410 nt, Artificial Sequence
  derived and/or modified CDS sequence (opt4) from neuraminidase__InfluenzaA__ABB03093
augaaccccaaccagaagaucaucaccaucggcagcgugagccugaccaucagcaccaucugcuucuucaugcagaucgccauccugaucaccaccgugacccugcacuucaagcaguacgaguucaacagcccccccaacaaccaggugaugcugugcgagcccaccaucaucgagagaaacaucaccgagaucguguaccugaccaacaccaccaucgagaaggagaucugccccaagcuggccgaguacagaaacuggagcaagccccagugcgacaucaccggcuucgcccccuucagcaaggacaacagcaucagacugagcgccggcggcgacaucugggugaccagagagcccuacgugagcugcgaccccgacaagugcuaccaguucgcccugggccagggcaccacccugaacaacgugcacagcaacgacaccgugcacgacagaacccccuacagaacccugcugaugaacgagcugggcgugcccuuccaccugggcaccaagcaggugugcaucgccuggagcagcagcagcugccacgacggcaaggccuggcugcacgugugcgugaccggcgacgacaagaacgccaccgccagcuucaucuacaacggcagacugguggacagcaucgugagcuggagcaaggagauccugagaacccaggagagcgagugcgugugcaucaacggcaccugcaccguggugaugaccgacggcagcgccagcggcaaggccgacaccaagauccuguucaucgaggagggcaagaucgugcacaccagcacccugagcggcagcgcccagcacaucgaggagugcagcugcuaccccagauaccccggcgugagaugcgugugcagagacaacuggaagggcagcaacagacccaucguggacaucaacaucaaggacuacagcaucgugagcagcuacgugugcagcggccuggugggcgacacccccagaaagaacgacagcagcagcagcagccacugccuggaccccaacaacgaggagggcggccacggcgugaagggcugggccuucgacgacggcaacgacguguggaugggcagaaccaucagcgagaagcugagaagcggcuacgagaccuucaaggugaucgagggcuggagcaaccccaacagcaagcugcagaucaacagacaggugaucguggacagaggcaacagaagcggcuacagcggcaucuucagcguggagggcaagagcugcaucaacagaugcuucuacguggagcugaucagaggcagaaaggaggagaccgaggugcuguggaccagcaacagcaucgugguguucugcggcaccagcggcaccuacggcaccggcagcuggcccgacggcgccgacaucaaccugaugcccaucuga

SEQ ID NO: 174536 - RNA, 1410 nt, Artificial Sequence; identical to SEQ ID NO: 174442
  derived and/or modified CDS sequence (opt4) from neuraminidase__InfluenzaA__ABB03104

SEQ ID NO: 174537 - RNA, 1410 nt, Artificial Sequence
  derived and/or modified CDS sequence (opt4) from neuraminidase__InfluenzaA__ABB03115
augaaccccaaccagaagaucaucaccaucggcagcgugagccugaccaucagcaccaucugcuucuucaugcagaucgccauccugaucaccaccgugacccugcacuucaagcaguacgaguucaacagcccccccaacaaccaggugaugcugugcgagcccaccaucaucgagagaaacaucaccgagaucguguaccugaccaacaccaccaucgagaaggagaucugccccaagcuggccgaguacagaaacuggagcaagccccagugcaacaucaccggcuucgcccccuucagcaaggacaacagcaucagacugagcgccggcggcgacaucugggugaccagagagcccuacgugagcugcgaccccgacaagugcuaccaguucgcccugggccagggcaccacccugaacaacgugcacagcaacgacaccgugcacgacagaacccccuacagaacccugcugaugaacgagcugggcgugcccuuccaccugggcaccaagcaggugugcaucgccuggagcagcagcagcugccacgacggcaaggccuggcugcacgugugcgugaccggcgacgacgagaacgccaccgccagcuucaucuacaacggcagacugguggacagcaucgugagcuggagcaagaagauccugagaacccaggagagcgagugcgugugcaucaacggcaccugcaccguggugaugaccgacggcagcgccagcggcaaggccgacaccaagauccuguucaucgaggagggcaagaucgugcacaccagcacccugagcggcagcgcccagcacguggaggagugcagcugcuaccccagauaccccggcgugagaugcgugugcagagacaacuggaagggcagcaacagacccaucguggacaucaacaucaaggacuacagcaucgugagcagcuacgugugcagcggccuggugggcgacacccccagaaagaacgacagcagcagcagcagccacugccuggaccccaacaacgaggagggcggccacggcgugaagggcugggccuucgacgacggcaacgacguguggaugggcagaaccaucagcgagaagcugagaagcggcuacgagaccuucaaggugaucgagggcuggagcaaccccaacagcaagcugcagaucaacagacaggugaucguggacagaggcaacagaagcggcuacagcggcaucuucagcguggagggcaagagcugcaucaacagaugcuucuacguggagcugaucagaggcagaaagcaggagaacgaggugcuguggaccagcaacagcaucgugguguucugcggcaccagcggcaccuacggcaccggcagcuggcccgacggcgccgacaucaaccugaugcccaucuga

SEQ ID NO: 174538 - RNA, 1413 nt, Artificial Sequence; identical to SEQ ID NO: 174446
  derived and/or modified CDS sequence (opt4) from neuraminidase__InfluenzaA__ABB03126

SEQ ID NO: 174539 - RNA, 1413 nt, Artificial Sequence
  derived and/or modified CDS sequence (opt4) from neuraminidase__InfluenzaA__ABB03148
augaaccccaaccagaagaucaucaccaucggcagcaucagcaucgccaucggcaccaucagccugaugcugcagaucggcaacaucaucagcaucugggccagccacagcauccagaccggcagccagaaccacaccggcaucugcaaccagagaaucaucaccuacgagaacagcaccugggugaaccacaccuacgugaacaucaacaacaccaacgugguggccggcaaggacaagaccagcgugacccuggccggcaacagcagccugugcagcaucagcggcugggccaucuacaccaaggacaacagcaucagaaucggcagcaagggcgacguguucgugaucagagagcccuucaucagcugcagccaccuggagugcagaaccuucuuccugacccagggcgcccugcugaacgacaagcacagcaacggcaccgugaaggacagaagccccuacagagcccugaugagcugcccccugggcgaggcccccagccccuacaacagcaaguucgagagcguggccuggagcgccagcgccugccacgacggcaugggcuggcugaccaucggcaucagcggccccgacaacggcgccguggccgugcugaaguacaacggcaucaucaccgagaccaucaagagcuggaagaagagaauccugagaacccaggagagcgagugcgugugcgugaacggcagcugcuucaccaucaugaccgacggccccagcaacggcgccgccagcuacaagaucuucaagaucgagaagggcaaggugaccaagagcaucgagcugaacgcccccaacuuccacuacgaggagugcagcugcuaccccgacaccggcaccgugaugugcgugugcagagacaacuggcacggcagcaacagacccugggugagcuucaaccagaaccuggacuaccagaucggcuacaucugcagcggcguguucggcgacaaccccagacccaaggacggcaagggcagcugcaaccccgugaccguggacggcgccgacggcgugaagggcuucagcuacaaguacggcaacggcguguggaucggcagaaccaagagcaacagacugagaaagggcuucgagaugaucugggaccccaacggcuggaccgacaccgacagcgacuucagcgugaagcaggacgugguggccaucaccgacuggagcggcuacagcggcagcuucgugcagcaccccgagcugaccggccuggacugcaucagacccugcuucuggguggagcuggugagaggccugcccagagagaacaccaccaucuggaccagcggcagcagcaucagcuucugcggcguggacagcgacaccgccaacuggagcuggcccgacggcgccgagcugcccuucaccaucgacaaguga

SEQ ID NO: 174540 - RNA, 1410 nt, Artificial Sequence
  derived and/or modified CDS sequence (opt4) from neuraminidase__InfluenzaA__ABB04286
augaaccccaaccagaagaucaucaccaucggcagcgugagccugaccaucgccaccaucugcuuccugaugcagaucgccauccuggugaccaccgugacccugcacuucaagcaguacgagugcagcagcccccccaacaaccaggugaugcccugcgagcccaucaucaucgagagaaacaucaccgagaucguguaccugaccaacaccaccaucgagaaggagaucugccccaagcugguggaguacagaaacuggagcaagccccagugcaagaucaccggcuucgcccccuucagcaaggacaacagcaucagacugagcgccggcggcgacaucugggugaccagagagcccuacgugagcugcgaccccggcaagugcuaccaguucgcccugggccagggcaccacccuggacaacaagcacagcaacgacaccauccacgacagaaccccccacagaacccugcugaugaacgagcugggcgugcccuuccaccugggcaccagacaggugugcaucgccuggagcagcagcagcugccacgacggcaaggccuggcugcacgugugcgugaccggcuacgacaagaacgccaccgccagcuucaucuacgacggcagacugguggacagcaucggcagcuggagcaagaacauccugagaacccaggagagcgagugcgugugcaucaacggcaccugcaccguggugaugaccgacggcagcgccagcgagagagccgacaccaagauccuguucaucgaggagggcaagaucgugcacaucagcccccugagcggcagcgcccagcacguggaggagugcagcugcuaccccagauaccccggcgugagaugcgugugcagagacaacuggaagggcagcaacagacccgugguggacaucaacgugaaggacuacagcaucgugagcagcuacgugugcagcggccuggugggcgacacccccagaaagaacgacagaagcagcagcagcuacugcagaaaccccaacaacgagaagggcaaccacggcgugaagggcugggccuucgacgacggcaacgacguguggaugggcagaaccaucagcgaggagagcagaagcggcuacgagaccuucaaggugaucggcggcuggagcacccccaacagcaagagccagaucaacagacaggugaucguggacagcggcaacagaagcggcuacagcggcaucuucagcguggagggcaagagcugcaucaacagaugcuucuacguggagcugaucagaggcagagagcaggagaccagagugugguggaccagcaacagcaucgugguguucugcggcaccagcggcaccuacggcaccggcagcuggcccgacggcgccgacaucaaccugaugcccaucuga

SEQ ID NO: 174541 - RNA, 1410 nt, Artificial Sequence
  derived and/or modified CDS sequence (opt4) from neuraminidase__InfluenzaA__ABB04297
augaaccccaaccagaagaucaucaccaucggcagcgugagccugaccaucgccaccaucugcuuccugaugcagaucgccauccuggugaccaccgugacccugcacuucaagcaguacgagugcgacagccccgccaacaaccaggugauccccugcgagcccaucaccaucgagagaaacaucaccgagaucguguaccugaccaacaccaccaucgagaaggagaucugccccaagcugguggaguacagaaacuggagcaagccccagugcaagaucaccggcuucgcccccuucagcaaggacaacagcaucagacugagcgccggcggcgacaucugggugaccagagagcccuacgugagcugcgaccccggcaagugcuaccaguucgcccugggccagggcaccacccuggacaacaagcacagcaacgacaccauccacgacagaaccccccacagaacccugcugaugaacgagcugggcgugcccuuccaccugggcaccagacaggugugcaucgccuggagcagcagcagcugccacgacggcaaggccuggcugcacgugugcgugaccggcuacgacaagaacgccaccgccagcuucaucuacgacggcagacugguggacagcaucggcagcuggagccagaacauccugagaacccaggagagcgagugcgugugcaucaacggcaccugcaccguggugaugaccgacggcagcgccagcggcagagccgacaccaagauccuguucaucgaggagggcaagaucgugcacaucagcccccugagcggcagcgcccagcacguggaggagugcagcugcuaccccagauaccccggcgugagaugcaucugcagagacaacuggaagggcagcaacagacccgugguggacaucaacgugaaggacuacagcaucgacagcagcuacgugugcagcggccuggugggcgacacccccagaaacaacgacagaagcagcaacagcuacugcagaaaccccaacaacgagaagggcaaccacggcgugaagggcugggccuucgacgacggcaacgacguguggaugggcagaaccaucagcgaggacagcagaagcggcuacgagaccuucaaggugaucggcggcuggagcacccccaacagcaagcugcagaucaacagacaggugaucguggacagcgacaacagaagcggcuacagcggcaucuucagcguggagggcaagagcugcaucaacagaugcuucuacguggagcugaucagaggcagagagcaggagaccagagugugguggaccagcaacagcaucgugguguucugcggcaccagcggcaccuacggcaccggcagcuggcccgacggcgccgacaucaaccugaugcccaucuga

SEQ ID NO: 174542 - RNA, 1410 nt, Artificial Sequence
  derived and/or modified CDS sequence (opt4) from neuraminidase__InfluenzaA__ABB04319
augaaccccaaccagaagaucaucaccaucggcagcgugagccugaccaucgccaccaucugcuuccugaugcagaucgccauccuggugaccaccgugacccugcacuucaagcaguacgagugcagcagcccccccaacaaccaggugaugcccugcgagcccaccaucaucgagagaaacaucaccgagaucguguaccugaccaacaccaccaucgagaaggagaucugccccaagcugguggaguacagaaacuggagcaagccccagugcaagaucaccggcuucgcccccuucagcaaggacaacagcaucagacugagcgccggcggcgacaucugggugaccagagagcccuacgugagcugcgaccccggcaagugcuaccaguucgcccugggccagggcaccacccugaacaacagacacagcaacgacaccgugcacgacagaacccccuacagaacccugcugaugaacgagcugggcgugcccuuccaccugggcaccaagcaggugugcaucgccuggagcagcagcagcugccacgacggcaaggccuggcugcacgugugcgugaccggccacgacaagaacgccaccgccagcuucaucuacaacggcagacugguggacagcaucggcagcuggagcaagaacauccugagaacccaggagagcgagugcgugugcaucaacggcaccugcaccguggugaugaccgacggcagcgccagcgagagagccgacaccaagauccuguucaucgaggagggcaagaucgugcacaucagcccccugagcggcagcgcccagcacguggaggagugcagcugcuaccccagauaccccggcgugagaugcgugugcagagacaacuggaagggcagcaacagacccaucguggacaucaacgugaaggacuacagcaucgugagcagcuacgugugcagcggccuggugggcgacacccccagaaagaacgacagaagcagcagcagcuacugccagaaccccaacaacgagaagggcagccacggcgugaagggcugggccuucgacgacggcaacgacguguggaugggcagaaccaucggcgaggagcugagaagcggcuacgagaccuucaaggugaucggcggcuggagcacccccaacagcaagcugcagaucaacagacaggugaucguggacagcggcaacagaagcggcuacagcggcaucuucagcguggagggcaagagcugcaucaacagaugcuucuacguggagcugaucagaggcagaaagcaggagaccagagugugguggaccagcaacagcaucgugguguucugcggcaccagcggcaccuacggcaccggcagcuggcccgacggcgccgacaucaaccugaugcccaucuga

SEQ ID NO: 174543 - RNA, 1410 nt, Artificial Sequence
  derived and/or modified CDS sequence (opt4) from neuraminidase__InfluenzaA__ABB04341
augaaccccaaccagaagaucaucaccaucggcagcgugagccugaccaucgccaccaucugcuuccugaugcagaucgccauccuggugaccaccgugacccugcacuucaagcaguacgagugcgacagccccgccaacaaccaggugaugcccugcgagcccaucaucaucgagagaaacaucaccgagaucguguaccugaccaacaccaccaucgagaaggagaucugccccaagcugguggaguacagaaacuggagcaagccccagugcaagaucaccggcuucgcccccuucagcaaggacaacagcgugagacugagcgccggcggcgacaucugggugaccagagagcccuacgugagcugcgaccccggcaagugcuaccaguucgcccugggccagggcaccacccuggacaacaagcacagcaacgacaccauccacgacagaaccccccacagaacccugcugaugaacgagcugggcgugcccuuccaccugggcaccagacaggugugcaucgccuggagcagcagcagcugccacgacggcaaggccuggcugcacgugugcgugaccggcuacgacaagaacgccaccgccagcuucaucuacgacggcagacugguggacagcaucggcagcuggagccagaacauccugagaacccaggagagcgagugcgugugcaucaacggcaccugcaccguggugaugaccgacggcagcgccagcggcagagccgacaccaagauccuguucaucgaggagggcaagaucgugcacaucagcccccugagcggcagcgcccagcacguggaggagugcagcugcuaccccagauaccccggcgugagaugcaucugcagagacaacuggaagggcagcaacagacccgugguggacaucaacgugaaggacuacagcaucgacagcagcuacgugugcagcggccuggugggcgacacccccagaaagaacgacagaagcagcaacagcuacugcagaaaccccaacaacgagaagggcaaccacggcgugaagggcugggccuucgacgacggcaacgacguguggaugggcagaaccaucagcgaggacagcagaagcggcuacgagaccuucaaggugaucggcggcuggagcacccccaacagcaagcugcagaucaacagacaggugaucguggacagcgacaacagaagcggcuacagcggcaucuucagcguggagggcaagagcugcaucaacagaugcuucuacguggagcugaucagaggcagagagcaggagaccagagugugguggaccagcaacagcaucgugguguucugcggcaccagcggcaccuacggcaccggcagcuggcccgacggcgccgacaucaaccugaugcccaucuga

SEQ ID NO: 174544 - RNA, 1410 nt, Artificial Sequence
  derived and/or modified CDS sequence (opt4) from neuraminidase__InfluenzaA__ABB04352
augaaccccaaccagaagaucaucaccaucggcagcgugagccugaccaucgccaccaucugcuuccugaugcagaucgccauccuggugaccaccgugacccugcacuucaagcaguacgagugcagcagcccccccaacaaccaggugaugcccugcgagcccaucaucaucgagagaaacaucaccgagaucguguaccugaccaacaccaccaucgagaaggagaucugccccaagcugguggaguacagaaacuggagcaagccccagugcaagaucaccggcuucgcccccuucagcaaggacaacagcaucagacugagcgccggcggcgacaucugggugaccagagagcccuacgugagcugcgaccccggcaagugcuaccaguucgcccugggccagggcaccacccugaacaacaagcacagcaacgacaccgugcacgacagaacccccuacagaacccugcugaugaacgagcugggcgugcccuuccaccugggcaccaagcaggugugcaucgccuggagcagcagcagcugccacgacggcaaggccuggcugcacgugugcgugaccggccacgacaagaacgccaccgccagcuucaucuacgacggcagacugguggacagcaucggcagcuggagcaagaacauccugagaacccaggagagcgagugcgugugcaucaacggcaccugcaccguggugaugaccgacggcagcgccagcgagagagccgacaccaagauccuguucaucgaggagggcaagaucgugcacaucagcccccugagcggcagcgcccagcacguggaggagugcagcugcuaccccagauaccccggcgugagaugcgugugcagagacaacuggaagggcagcaacagacccaucguggacaucaacgugaaggacuacagcaucgugagcagcuacgugugcagcggccuggugggcgacacccccagaaagaacgacagaagcagcagcagcuacugcagaaaccccaacaacgagaagggcagccacggcgugaagggcugggccuucgacgacggcaacgacguguggaugggcagaaccaucggcgaggagcugagaagcggcuacgagaccuucaaggugaucggcggcuggagcacccccaacagcaagcugcagaucaacagacaggugaucguggacagcggcaacagaagcggcuacagcggcaucuucagcguggagggcaagagcugcaucaacagaugcuucuacguggagcugaucagaggcagagagcaggagaccagagugugguggaccagcaacagcaucgugguguucugcggcaccagcggcaccuacggcaccggcagcuggcccgacggcgccgacaucaaccugaugcccaucuga

SEQ ID NO: 174545 - RNA, 1410 nt, Artificial Sequence
  derived and/or modified CDS sequence (opt4) from neuraminidase__InfluenzaA__ABB04374
augaaccccaaccagaagaucaucaccaucggcagcgugagccugaccaucgccaccgugugcuuccugaugcagaucgccauccuggugaccaccgugacccugcacuucaagcaguacgagugcgacagccccgccaacaaccaggugaugcccugcgagcccaucaucaucgagagaaacaucaccgagaucguguaccugaccaacaccaccaucgagaaggagaucugccccaagcugguggaguacagaaacuggagcaagccccagugcaagaucaccggcuucgcccccuucagcaaggacaacagcaucagacugagcgccggcggcgacaucugggugaccagagagcccuacgugagcugcgaccccggcaagugcuaccaguucgcccugggccagggcaccacccuggacaacaagcacagcaacgacaccauccacgacagaaucccccacagaacccugcugaugaacgagcugggcgugcccuuccaccugggcaccagacaggugugcaucgccuggagcagcagcagcugccacgacggcaaggccuggcugcacgugugcgugaccggcgacgacgagaacgccaccgccagcuucaucuacgacggcagacugguggacagcaucggcagcuggagccagaacauccugagaacccaggagagcgagugcgugugcaucaacggcaccugcaccguggugaugaccgacggcagcgccagcggcagagccgacaccagaauccuguucaucgaggagggcaagaucgugcacaucagcccccugagcggcagcgcccagcacguggaggagugcagcugcuaccccagauaccccggcgugagaugcaucugcagagacaacuggaagggcagcaacagacccgugguggacaucaacgugaaggacuacagcaucgacagcagauacgugugcagcggccuggugggcgacacccccagaaacaacgacaagagcagcaacagcaacugcagaaaccccaacaacgacaagggcaaccacggcgugaagggcugggccuucgacgacggcaacgacguguggaugggcagaaccaucagcaaggacagcagaagcggcuacgagaccuucaaggugaucggcggcuggagcacccccaacagcaagagccagaucaacagacaggugaucguggacagcgacaacagaagcggcuacagcggcaucuucagcguggagggcaagagcugcaucaacagaugcuucuacguggagcugaucagaggcagagagcaggagaccaaggugugguggaccagcaacagcaucgugguguucugcggcaccagcggcaccuacggcaccggcagcuggcccgacggcgccgacaucaaccugaugcccaucuga

SEQ ID NO: 174546 - RNA, 1410 nt, Artificial Sequence
  derived and/or modified CDS sequence (opt4) from neuraminidase__InfluenzaA__ABB04931
augaaccccaaccagaagaucaucaccaucggcagcgugagccugaccaucgccaccaucugcuuccugaugcagaucgccauccuggugaccaccgugacccugcacuucaagcaguacgagugcgacagccccgccaacaaccaggugaugcccugcgagcccaucaucaucgagagaaacaucaccgagaucguguaccugaccaacaccaccaucgagaaggagaucugccccaagcugguggaguacagaaacuggagcaagccccagugcaagaucaccggcuucgcccccuucagcaaggacaacagcaucagacugagcgccggcggcgacaucugggugaccagagagcccuacgugagcugcgaccccggcaagugcuaccaguucgcccugggccagggcaccacccuggacaacaagcacagcaacgacaccauccacgacagaaccccccacagaacccugcugaugaacgagcugggcgugcccuuccaccugggcaccagacaggugugcaucgccuggagcagcagcagcugccacgacggcaaggccuggcugcacgugugcgugaccggcuacgacaagaacgccaccgccagcuucaucuacgacggcagacugguggacagcaucggcagcuggagccagaacauccugagaacccaggagagcgagugcgugugcaucaacggcaccugcaccguggugaugaccgacggcagcgccagcggcagagccgacaccaagauccuguucaucgaggagggcaagaucgugcacaucagcccccugagcggcagcgcccagcacguggaggagugcagcugcuaccccagauaccccggcgugagaugcaucugcagagacaacuggaagggcagcaacagacccgugguggacaucaacgugaaggacuacagcaucgacagcagcuacgugugcagcggccuggugggcgacacccccagaaacaacgacagaagcagcagcagcuacugcagaaaccccaacaacgagaagggcaagcacggcgugaagggcugggccuucgacgacggcaacgacguguggaugggcagaaccaucagcgaggacagcagaagcggcuacgagaccuucaaggugaucggcggcuggagcacccccaacagcaagcugcagaucaacagacaggugaucguggacagcgacaacagaagcggcuacagcggcaucuucagcguggagggcaagagcugcaucaacagaugcuucuacguggagcugaucagaggcagagagcaggagaccagagugugguggaccagcaacagcaucgugguguucugcggcaccagcggcaccuacggcaccggcagcuggcccgacggcgccgacaucaaccugaugcccaucuga

SEQ ID NO: 174547 - RNA, 1410 nt, Artificial Sequence
  derived and/or modified CDS sequence (opt4) from neuraminidase__InfluenzaA__ABB04942
augaaccccaaccagaagaucaucaccaucggcagcgugagccugaccaucgccaccaucugcuuccugaugcagaucgccauccuggugaccaccgugacccugcacuucaagcaguacgagugcagcagcccccccaacaaccaggugaugcccugcgagcccaucaucaucgagagaaacaucaccgagaucguguaccugaccaacaccaccaucgagaaggagaucugccccaagcugguggaguacagaaacuggagcaagccccagugcaagaucaccggcuucgcccccuucagcaaggacaacagcaucagacugagcgccggcggcgacaucugggugaccagagagcccuacgugagcugcgaccccggcaagugcuaccaguucgcccugggccagggcaccacccugaacaacaagcacagcaacgacaccauccacgacagaacccccuacagaacccugcugaugaacgagcugggcgugcccuuccaccugggcaccaagcaggugugcaucgccuggagcagcagcagcugccacgacggcaaggccuggcugcacgugugcgugaccggccacgacaagaacgccaccgccagcuucaucuacgacggcagacugguggacagcaucggcagcuggagcaagaacauccugagaacccaggagagcgagugcgugugcaucaacggcaccugcaccguggugaugaccgacggcagcgccagcgagagagccgacaccaagauccuguucaucgaggagggcaagaucgugcacaucagcccccugagcggcagcgcccagcacguggaggagugcagcugcuaccccagauaccccggcgugagaugcgugugcagagacaacuggaagggcagcaacagacccaucguggacaucaacgugaaggacuacagcaucgugagcagcuacgugugcagcggccuggugggcgacacccccagaaagaacgacagaagcagcagcagcuacugcagaaaccccaacaacgagaagggcaaccacggcgugaagggcugggccuucgacgacggcaacgacguguggaugggcagaaccaucggcgaggagcugagaagcggcuacgagaccuucaaggugaucggcggcuggagcacccccaacagcaagcugcagaucaacagacaggugaucguggacagcgacaacagaagcggcuacagcggcaucuucagcguggagggcaagagcugcaucaacagaugcuucuacguggagcugaucagaggcagagagcaggagaccagagugugguggaccagcaacagcaucgugguguucugcggcaccagcggcaccuacggcaccggcagcuggcccgacggcgccgacaucaaccugaugcccaucuga

SEQ ID NO: 174548 - RNA, 1410 nt, Artificial Sequence; identical to SEQ ID NO: 174544
  derived and/or modified CDS sequence (opt4) from neuraminidase__InfluenzaA__ABB04953

SEQ ID NO: 174549 - RNA, 1410 nt, Artificial Sequence; identical to SEQ ID NO: 174442
  derived and/or modified CDS sequence (opt4) from neuraminidase__InfluenzaA__ABB04975

SEQ ID NO: 174550 - RNA, 1410 nt, Artificial Sequence; identical to SEQ ID NO: 174240
  derived and/or modified CDS sequence (opt4) from neuraminidase__InfluenzaA__ABB04986

SEQ ID NO: 174551 - RNA, 1410 nt, Artificial Sequence
  derived and/or modified CDS sequence (opt4) from neuraminidase__InfluenzaA__ABB04997
augaaccccaaccagaagaucaucaccaucggcagcgugagccugaccaucgccaccaucugcuuccugaugcagaucgccauccuggugaccaccgugacccugcacuucaagcaguacgagugcaacagcccccccaacaaccaggugaugcugugcgagcccaccaucaucgagagaaacaucaccgagaucgugcaccugaccaacaccaccaucgagaaggagaucugccccaagcuggccgaguacagaaacuggagcaagccccagugcaacaucaccggcuucgcccccuucagcaaggacaacagcaucagacugagcgccggcggcgacaucugggugaccagagagcccuacgugagcugcgaccccgacaagugcuaccaguucgcccugggccagggcaccacccugaacaacggccacagcaacgacaccgugcacgacagaacccccuacagaacccugcugaugaacgagcugggcgugcccuuccaccugggcaccaagcaggugugcaucgccuggagcagcagcagcugccacgacggcaaggccuggcugcacgugugcgugaccggcgacgacgagaacgccaccgccagcuucaucuacaacggcagacugguggacagcaucggcagcuggagcaagaagauccugagaacccaggagagcgagugcgugugcaucaacggcaccugcaccguggugaugaccgacggcagcgccagcggcaaggccgacaccaagauccuguucaucgaggagggcaagaucgugcacaccagccugcugagcggcagcgcccagcacguggaggagugcagcugcuaccccagauaccccggcgugagaugcgugugcagagacaacuggaagggcagcaacagacccaucguggacaucaacgugaaggacuacagcaucgugagcagcuacgugugcagcggccuggugggcgacacccccagaaagaacgacagcagcagcagcagccacugccuggaccccaacaacgaggagggcggccacggcgugaagggcugggccuucgacgacggcaacgacguguggaugggcagaaccaucagcgagaagcugagaagcggcuacgagaccuucaaggugaucgagggcuggagcaagcccaacagcaagcugcagaucaacagacaggugaucguggacagaggcaacagaagcggcuacagcggcaucuucagcguggagggcaagagcugcaucaacagaugcuucuacguggagcugaucagaggcagaaagcaggagaccgaggugcuguggaccagcaacagcaucgugguguucugcggcaccagcggcaccuacggcaccggcagcuggcccgacggcgccgacaucaaccugaagcccaucuga

SEQ ID NO: 174552 - RNA, 1410 nt, Artificial Sequence; identical to SEQ ID NO: 174313
  derived and/or modified CDS sequence (opt4) from neuraminidase__InfluenzaA__ABB05008

SEQ ID NO: 174553 - RNA, 1410 nt, Artificial Sequence; identical to SEQ ID NO: 174121
  derived and/or modified CDS sequence (opt4) from neuraminidase__InfluenzaA__ABB05186

SEQ ID NO: 174554 - RNA, 1410 nt, Artificial Sequence; identical to SEQ ID NO: 174313
  derived and/or modified CDS sequence (opt4) from neuraminidase__InfluenzaA__ABB05219

SEQ ID NO: 174555 - RNA, 1410 nt, Artificial Sequence
  derived and/or modified CDS sequence (opt4) from neuraminidase__InfluenzaA__ABB46395
augaaccccaaccagaagaucaucaccaucggcagcgugagccugaccaucgccaccaucugcuuccugaugcagaucgccauccuggugaccaccgugacccugcacuucaagcaguacgagugcgacagccccgccaacaagcaggugaugcccugcgagcccaucaucaucgagagaaacaucaccgagaucguguaccugaccaacaccaccaucgagaaggagaucugccccaagcugguggaguacagaaacuggagcaagccccagugcaagaucaccggcuucgcccccuucagcaaggacaacagcaucagacugagcgccggcggcgacaucugggugaccagagagcccuacgugagcugcgaccccggcaagugcuaccaguucgcccugggccagggcaccacccuggacaacaagcacagcaacgacaccauccacgacagaaccccccacagaacccugcugaugaacgagcugggcgugcccuuccaccugggcaccagacaggugugcaucgccuggagcagcagcagcugccacgacggcaaggccuggcugcacgugugcgugaccggcuacgacaagaacgccaccgccagcuucaucuacgacggcagacugguggacagcaucggcagcuggagccagaacauccugagaacccaggagagcgagugcgugugcaucaacggcaccugcaccguggugaugaccgacggcagcgccagcggcagagccgacaccaagauccuguucaucgaggagggcaagaucgugcacaucagcccccugagcggcagcgcccagcacguggaggagugcagcugcuaccccagauaccccggcgugagaugcaucugcagagacaacuggaagggcagcaacagacccgugguggacaucaacgugaaggacuacagcaucgacagcagcuacgugugcagcggccuggugggcgacacccccagaaacaacgacagaagcagcagcagcuacugcagaaaccccaacaacgagaagggcacccacggcgugaagggcugggccuucgacgacggcaacgacguguggaugggcagaaccaucagcgaggacagcagaagcggcuacgagaccuucaaggugaucggcggcuggagcacccccaacagcaagcugcagaucaacagacaggugaucguggacagcgacaacagaagcggcuacagcggcaucuucagcguggagggcaagagcugcaucaacagaugcuucuacguggagcugaucagaggcagagagcaggagaccagagugugguggaccagcaacagcaucgugguguucugcggcaccagcggcaccuacggcaccggcagcuggcccgacggcgccgacaucaaccugaugcccaucuga

SEQ ID NO: 174556 - RNA, 1410 nt, Artificial Sequence; identical to SEQ ID NO: 174100
  derived and/or modified CDS sequence (opt4) from neuraminidase__InfluenzaA__ABB46417

SEQ ID NO: 174557 - RNA, 1410 nt, Artificial Sequence
  derived and/or modified CDS sequence (opt4) from neuraminidase__InfluenzaA__ABB46428
augaaccccaaccagaagaucaucaccaucggcagcgugagccugaccaucgccaccaucugcuuccugaugcagaucgccauccuggugaccaccgugacccugcacuucaagcaguacgagugcaacagcccccccaacaaccaggugaugcugugcgagcccaccaucaucgagagaaacaucaccgagaucguguaccugaccaacaccaccaucgagaaggagaucugccccaagcuggccgaguacagaaacuggagcaagccccagugcaacaucaccggcuucgcccccuucagcaaggacaacagcaucagacugagcgccggcggcgacaucugggugaccagagagcccuacgugagcugcgaccccgacaagugcuaccaguucgcccugggccagggcaccacccugaacaacggccacagcaacgacaccgugcacgacagaacccccuacagaacccugcugaugaacgagcugggcgugcccuuccaccugggcaccaagcaggugugcaucgccuggagcagcagcagcugccacgacggcaaggccuggcugcacgugugcgugaccggcgacgacgagaacgccaccgccagcuucaucuacaacggcagacugguggacagcaucggcagcuggagcaagaagauccugagaacccaggagagcgagugcgugugcaucaacggcaccugcaccguggugaugaccgacggcagcgccagcggcaaggccgacaccaagauccuguucaucgaggagggcaagaucgugcacaucagcccccugagcggcagcgcccagcacguggaggagugcagcugcuaccccagauaccccggcgugagaugcgugugcagagacaacuggaagggcagcaacagacccaucguggacaucaacgugaaggacuacagcaucgugagcagcuacgugugcagcggccuggugggcgacacccccagaaagaacgacagcuucagcagcagccacugccuggaccccaacaacgaggagggcggccacggcgugaagggcugggccuucgacgacggcaacgacguguggaugggcagaaccaucagcgagaagcugagaagcggcuacgagaccuucaaggugaucgagggcuggagcaagcccaacagcaagcugcagaucaacagacaggugaucguggacagaggcaacagaagcggcuacagcggcaucuucagcguggagggcaagagcugcaucaacagaugcuucuacguggagcugaucagaggcagaaaggaggagaccgaggugugguggaccagcaacagcaucgugguguucugcggcaccagcggcaccuacggcaccggcagcuggcccgacggcgccgacaucaaccugaugcccaucuga

SEQ ID NO: 174558 - RNA, 1410 nt, Artificial Sequence
  derived and/or modified CDS sequence (opt4) from neuraminidase__InfluenzaA__ABB46439
augaaccccaaccagaagaucaucaccaucggcagcgugagccugaccaucagcaccaucugcuucuucaugcagaucgccauccugaucaccaccgugacccugcacuucaagcaguacgaguucaacagcccccccaacaaccaggugaugcugugcgagcccaccaucaucgagagaaacaucaccgagaucguguaccugaccaacaccaccaucgagaaggagaucugccccaagcuggccgaguacagaaacuggagcaagccccagugcgacaucaccggcuucgcccccuucagcaaggacaacagcaucagacugagcgccggcggcgacaucugggugaccagagagcccuacgugagcugcgaccccgacaagugcuaccaguucgcccugggccagggcaccacccugaacaacgugcacagcaacgacaccgugcacgacagaacccccuacagaacccugcugaugaacgagcugggcgugcccuuccaccugggcaccaagcaggugugcaucgccuggagcagcagcagcugccacgacggcaaggccuggcugcacgugugcgugaccggcgacgacaagaacgccaccgccagcuucaucuacaacggcagacugguggacagcaucgugagcuggagcaaggagauccugagaacccaggagagcgagugcgugugcaucaacggcgccugcaccguggugaugaccgacggcagcgccagcggcaaggccgacaccaagauccuguucaucgaggagagaagaaucgugcacaccagcacccugagcggcagcgcccagcacguggaggagugcagcugcuaccccagauaccccggcgugagaugcgugugcagagacaacuggaagggcagcaacagacccaucguggacaucaacaucaaggacuacagcaucgugagcagcuacgugugcagcggccuggugggcgacacccccagaaagaacgacagcagcagcagcagcaacugccuggaccccaacaacgaggagggcggccacggcgugaagggcugggccuucgacgacggcaacgacguguggaugggcagaaccaucagcgagaagcugagaagcggcuacgagaccuucaaggugaucgagggcuggagcaaccccaacagcaagcugcagaucaacagacaggugaucguggacagaggcaacagaagcggcuacagcggcaucuucagcguggagggcaagagcugcaucaacagaugcuucuacguggagcugaucagaggcagaaaggaggagaccgaggugcuguggaccagcaacagcaucgugguguucugcggcaccagcggcgccuacggcaccggcagcuggcccgacggcgccgacaucaaccugaugcccaucuga

SEQ ID NO: 174559 - RNA, 1410 nt, Artificial Sequence; identical to SEQ ID NO: 174406
  derived and/or modified CDS sequence (opt4) from neuraminidase__InfluenzaA__ABB46450

SEQ ID NO: 174560 - RNA, 1410 nt, Artificial Sequence; identical to SEQ ID NO: 174387
  derived and/or modified CDS sequence (opt4) from neuraminidase__InfluenzaA__ABB46461

SEQ ID NO: 174561 - RNA, 1410 nt, Artificial Sequence
  derived and/or modified CDS sequence (opt4) from neuraminidase__InfluenzaA__ABB46550
augaaccccaaccagaagaucaucaccaucggcagcgugagccugaccaucgccaccaucugcuuccugaugcagaucgccauccuggugaccaccgugacccugcacuucaagcaguacgagugcagcagcccccccaacaaccaggugaugcccugcgagcccaucaucaucgagagaaacaucaccgagaucguguaccugaccaacaccaccaucgagaaggagaucugccccaagcugguggaguacagaaacuggagcaagccccagugcaagaucaccggcuucgcccccuucagcaaggacaacagcaucagacugagcgccggcggcgacaucugggugaccagagagcccuacgugagcugcgaccccggcaagugcuaccaguucgcccugggccagggcaccacccuggacaacaagcacagcaacgacaccauccacgacagaaccccccacagaacccugcugaugaacgagcugggcgugcccuuccaccugggcaccagacaggugugcaucgccuggagcagcagcagcugccacgacggcaaggccuggcugcacgugugcgugaccggcuacgacaagaacgccaccgccagcuucaucuacgacggcagacugguggacagcaucggcagcuggagcaagaacauccugagaacccaggagagcgagugcgugugcgugaacggcaccugcaccguggugaugaccgacggcagcgccagcgagagagccgacaccaagauccuguucaucgaggagggcaagaucgugcacaucagcccccugagcggcagcgcccagcacguggaggagugcagcugcuaccccagauaccccggcgugagaugcgugugcagagacaacuggaagggcagcaacagacccgugguggacaucaacgugaaggacuacagcaucgugagcagcuacgugugcagcggccuggugggcgacacccccagaaagaacgacagaagcagcagcagcuacugcagaaaccccaacaacgagaagggcaaccacggcgugaagggcugggccuucgacgacggcaacgacguguggaugggcagaaccaucagcgaggagagcagaagcggcuacgagaccuucaaggugaucggcggcuggagcacccccaacagcaagagccagaucaacagacaggugaucguggacagcggcaacagaagcggcuacagcggcaucuucagcguggagggcaagagcugcaucaacagaugcuucuacguggagcugaucagaggcagagagcaggagaccagagugugguggaccagcaacagcaucgugguguucugcggcaccagcggcaccuacggcaccggcagcuggcccgacggcgccgacaucaaccugaugcccaucuga

SEQ ID NO: 174562 - RNA, 1410 nt, Artificial Sequence
  derived and/or modified CDS sequence (opt4) from neuraminidase__InfluenzaA__ABB51955
augaaccccaaccagaagaucaucaccaucggcagcgugagccugaccaucagcaccaucugcuucuucaugcagaucgccauccuggugaccaccgugacccugcacuucaagcaguacgagugcaacagcccccccaacaaccaggugaugcugugcgagcccaccaucaucgagagaaacaucaccgagaucguguaccugaccaacaccaccaucgagaaggagaucugccccaagcuggccgaguacagaaacuggagcaagccccagugcaacaucaccggcuucgcccccuucagcaaggacaacagcaucagacugagcgccggcggcgacaucugggugaccagagagcccuacgugagcugcgaccccgacaagugcuaccaguucgcccugggccagggcaccacccugaacaacggccacagcaacgacaucgugcacgacagaacccccuacagaacccugcugaugaacgagcugggcgugcccuuccaccugggcaccaagcaggugugcaucgccuggagcagcagcagcugccacgacggcaaggccuggcugcacgugugcgugaccggcgacgacgagaacgccaccgccagcuucaucuacaacggcagacugguggacagcaucggcagcuggagcaagaaguucuucagaacccaggagagcgagugcgugugcauccacggcaccugcaccguggugaugaccgacggcagcgccagcagaaaggccgacaccaagauccuguucaucgaggagggcaagaucgugcacaccagcacccugagcggcagcgcccagcacguggaggagugcagcugcuaccccagauaccccggcgugagaugcgugugcagagacaacuggaagggcagcaacagacccaucguggacaucaacaucaaggacuacagcaucgugagcagcuacgugugcagcggccuggugggcgacacccccagaaagaacgacagcagcagcagcagccacugccuggaccccaacaacgaggagggcggccacggcgugaagggcugggccuucgacgacggcaacgacguguggaugggcagaaccaucagcgagaagcugagaagcggcuacgagaccuucaaggugaucgagggcuggagcaagcccaacagcaagcugcagaucaacagacaggugaucguggacagaggcaacagaagcggcuacagcggcaucuucagcguggagggcaagagcugcaucaacagaugcuucuacguggagcugaucagaggcagaaagcaggagaccgaggugcuguggaccagcaacagcaucgugguguucugcggcaccagcggcaccuacggcaccggcagcuggcccgacggcgccgacaucaaccugaugcccaucuga

SEQ ID NO: 174563 - RNA, 1413 nt, Artificial Sequence
  derived and/or modified CDS sequence (opt4) from neuraminidase__InfluenzaA__ABB51956
augaaccccaaccagaagaucaucaccaucggcagcaucagcaucgccaucggcaucaucagccugaugcugcagaucggcaacaucaucagcaucugggccagccacagcauccagaccggcagccagaaccacaccggcgugugcaaccagagaaucaucaccuacgagaacagcaccugggugaaccacaccuacgugaacaucaacaacaccaacgugaucgccggcaaggacaagaccagcgugaccguggccggcaacagcagccugugcagcaucagcggcugggccaucuacaccaaggacaacagcaucagaaucggcagcaagggcgacguguucgugaucagagagcccuucaucagcugcagccaccuggagugcagaaccuucuuccugacccagggcgcccugcugaacgacaagcacagcaacggcaccgugaaggacagaagccccuacagagcccugaugagcugcccccugggcgaggcccccagccccuacaacagcaaguucgagagcguggccuggagcgccagcgccugccacgacggcaugggcuggcugaccaucggcaucagcggccccgacaacggcgccguggccgugcugaaguacaacggcaucaucaccgagaccaucaagagcuggaagaagcccauccugggcacccaggagagcgagugggugugcgugaacggcagcugcuucaccaucaugaccgacgaccccagcuacgaggccgccagcuacaagaucuucaagaucgagagagagagagugaccaagagcaucgagcugaacgcccccaacuuccacuacgaggagugcagcugcuaccccgacaccggcaccgugaugugcgugugcagagacaacuggcacggcagcaacagacccugggugagcuucaaccagaaccuggacuaccagaucggcuacaucugcagcggcguguucggcgacaaccccagacccaaggacggcgagggcagcugcaaccccgugaccguggacggcgccaacggcgugaagggcuucagcuacaaguacggcaacggcguguggaucggcagaaccaagagcaacagacugagaaagggcuucgagaugaucugggaccccaacggcuggaccgacaccgacagcgacuucagcgugaagcaggacgugguggccaucaccgacuggagcggcuacagcggcagcuucgugcagcaccccgagcugaccggccuggacugcaucagacccugcuucuggguggagcuggugagaggccugcccaaggagaacaccaccaucuggaccagcggcagcagcaucagcuucugcggcgugaacagcgacaccgccaacuggagcuggcccgacggcgccgagcugcccuucaccaucgacaaguga

SEQ ID NO: 174564 - RNA, 1410 nt, Artificial Sequence
  derived and/or modified CDS sequence (opt4) from neuraminidase__InfluenzaA__ABB51957
augaaccccaaccagaagaucaucaccaucggcagcgugagccugaccaucgccaccaucugcuuccugaugcagaucgccauccuggugaccaccgugacccugcacuucaagcagcacgagugcaacagcccccccaacaaccaggugaugcugugcgagcccaccaucaucgagagaaacaucaccgagaucguguaccugaccaacaccaccaucgagaaggagaucugccccaagcuggccgaguacagaaacuggagcaagccccagugcaacaucaccggcuucgcccccuucagcaaggacaacagcaucagacugagcgccggcggcgacaucugggugaccagagagcccuacgugagcugcgaccccgacaagugcuaccaguucgcccugggccagggcaccacccugaacaacggccacagcaacgacaccgugagagacagaacccccuacagaacccugcugaugaacgagcugggcgugcccuuccaccugggcaccagacaggugugcaucgccuggagcagcagcagcugccacgacggcaaggccuggcugcacgugugcgugaccggcgacgacaagaacgccaccgccagcuucaucuacaacggcagacugguggacagcaucggcagcuggagcaagaagaucuucagaacccagaaguucgagugcgugugcauccacuggaccugcaccguggugaugaccgacggcagcgccagcggcaaggccgacaccaagauccuguucaucgaggagggcaagaucgugcacaucagcacccugagcggcagcgcccagcacguggaggagugcagcugcuaccccagauaccccggcgugagaugcgugugcagagacaacuggaagggcagcaacagacccaucguggacaucaacgugaaggacuacagcaucgugagcagcuacgugugcagcggccuggugggcgacacccccagaaagaacgacagcuucagcagcagccacugccuggaccccaacaacgaggagggcggccacggcgugaagggcugggccuucgacgacggcaacgacguguggaugggcagaaccaucagcgagaagcugagaagcggcuacgagaccuucaaggugaucgagggcuggagcaagcccaacagcaagcugcagaucaacagacaggugaucguggagagaggcaacagaagcggcuacagcggcaucuucagcguggagggcaagagcugcaucaacagaugcuucuacguggagcugaucagaggcagaaaggaggagaccgaggugugguggaccagcaacagcaucgugguguucugcggcaccagcggcaccuacggcaccggcagcuggcccgacggcgccgacaucaaccugaugcccaucuga

SEQ ID NO: 174565 - RNA, 1413 nt, Artificial Sequence
  derived and/or modified CDS sequence (opt4) from neuraminidase__InfluenzaA__ABB51958
augaaccccaaccagaagaucaucaccaucggcagcaucagcaucgccaucggcaucaucagccugaugcugcagaucggcaacaucaucagcaucugggccagccacagcauccagaccggcagccagaaccacaccggcgugugcaaccagagaaucaucaccuacgagaacagcaccugggugaaccacaccuacgugagcaucaacaacaccaacgugaucgccggcaaggacaagaccagcgugacccuggccggcaacagcagccugugccccaucagaggcugggccaucuacaccaagggcaacagcaucagaaucggcagcaagggcgacguguucgugaucagagagcccuucaucagcugcagccaccuggagugcagaaccuucuuccugacccagggcgcccugcugaacgacaagcacagcaacggcaccgugaaggacagaagccccuacagagcccugaugagcugcccccugggcgaggcccccagccccuacaacagcaaguucgagagcguggccuggagcgccagcgccugccacgacggcaugggcuggcugaccaucggcaucagcggccccgacaacggcgccguggccgugcugaaguacaacggcaucaucaccgagaccaucaagagcuggaagaagcagauccugagaacccaggagagcgagugcgugugcgugaacggcagcugcuucaccaucaugaccgacggccccagcaacggcgccgccagcuacaagaucuucaagaucgagaagggcaaggugaccaagagcaucgagcugaacgcccccaacuuccacuacgaggagugcagcagauaccccgacaccggcaccgugaugugcgugugcagagacaacuggcacggcagcaacagacccugggugagcuucaaccagaaccuggacuaccagaucggcuacaucugcagcggcguguucggcgacaaccccagacccaaggacggcgagggcagcugcaaccccgugaccguggacggcgccaacggcgugaagggcuucagcuacaaguacggcaacggcgugggcaucggcagaaccaucagcaacagacugagaaagggcuucgagaugaucugggaccccaacggcuggaccgacaccgacagcgacuucagcgugaagcaggacgugguggccaucaccgacuggagcggcuacagcggcagcuucgugcagcaccccgagcugaccggccuggacugcaucagacccugcuucuggguggagcuggugagaggccugcccaaggagaacaccaccaucuggaccagcggcagcagcaucagcuucugcggcgugaacagcgacaccgccaacuggagcuggcccgacggcgccgagcugcccuucaccaucgacaaguga

SEQ ID NO: 174566 - RNA, 1410 nt, Artificial Sequence
  derived and/or modified CDS sequence (opt4) from neuraminidase__InfluenzaA__ABB51959
augaaccccaaccagaagaucaucaccaucggcagcgugagccugaccaucagcaccaucugcuucuucaugcagaucgccauccugaucaccaccgugacccugcacuucaagcaguacgaguucaacagcccccccaacaaccaggugaugcugugcgagcccaccaucaucgagagaaacaucaccgagaucguguaccugaccaacaccaccaucgagaaggagaucugccccaagcuggccgaguacagaaacuggagcaagccccagugcgacaucaccggcuucgcccccuucagcaaggacaacagcaucagacugagcgccggcggcgacaucugggugaccagagagcccuacgugagcugcgaccccgacaagugcuaccaguucgcccugggccagggcaccacccugaacaacgugcacagcaacgacaccgugcacggcagaacccccuacagaacccugcugaugaacgagcugggcgugcccuuccaccugggcaccaagcaggugugcaucgccuggagcagcagcagcugccacgacggcaaggccuggcugcacgugugcgugaccggcgacgacaagaacgccaccgccagcuucaucuacaacggcagacugguggacagcaucgugagcuggagcaaggagauccugagaacccaggagagcgagugcgugugcaucaacggcaccugcaccguggugaugaccgacggcagcgccagcggcaaggccgacaccaagauccuguucaacgaggagggcaagaucgugcacaccagcaccugcagcggcagcgcccagcacguggaggagugcagcugcuacagcagauaccccggcgugagaugcgugugcagagacaacuggaagggcagcaacagacccaucguggacaucaacaucaaggacuacagcaucgugagcagcuacgugugcagcggccuggugggcgacacccccagaaagaacgacagcagcagcagcagccacugccuggaccccaacaacgaggagggcggccacggcgugaagggcagagccuucgacgacggcaacgacguguggaugggcagaaccaucagcgagaagcugagaagcggcuacgagaccuucaaggugaucgagggcuggagcaaccccaacagcaagcugcagaucaacagacaggugaucguggacagaggcaacagaagcggcuacagcggcaucuucagcguggagggcaagagcugcaucaacagaugcuucuacguggagcugaucagaggcagaaaggaggagaccgaggugcuguggaccagcaacagcaucgugguguucugcggcaccagcggcaccuacggcaccggcagcuggcccgacggcgccgacaucaaccugaugcccaucuga

SEQ ID NO: 174567 - RNA, 1413 nt, Artificial Sequence
  derived and/or modified CDS sequence (opt4) from neuraminidase__InfluenzaA__ABB51960
augaaccccaaccagaagaucaucaccaucggcagcaucagcaucgccaucggcaucaucagccugaugcugcagaucggcaacaucauccccaucugggccagccacagcauccagaccggcagccagaaccacaccggcgugugcaaccagagaaucaucaccuacgagaacagcaccugggugaaccacaccuacgugaacaucaacaacaccaacgugaucgccggcaaggacaagaccagcgugacccuggccggcaacagcagccugugcagcaucagcggcugggccaucuacaccaaggacaacagcaucagaaucggcagcaagggcgacguguucgugaucagagagcccuucaucagcugcagccaccuggagugcagaaccuucuuccugacccagggcgcccugcugaacgacaagcacagcaacggcaccgugaaggacagaagccccuacagagcccugaugagcugcccccugggcgaggcccccagccccuacaacagcgaguucgagagcguggccuggagcgccagcgccugccacgacggcaugggcuggcugaccaucggcaucagcggccccgacaacggcgccguggccgugcugaaguacaacggcaucaucaccgagaccaucaagagcuggaagaagcagauccugagaacccaggagagcgagugcgugugcgugaacggcagcugcuucaccaucaugaccgacggccccagcaacggcgccgccagcuacaagaucuucaagaucgagaagggcaagaucaccaagagcaucgagcugaacgcccccaacagccacuacgaggagugcagcugcuaccccgacaccggcaccgugaugugcgugugcagagacagcuggcacggcagcaacagacccugggugagcuucaaccagaaccuggacuaccagaucggcuacaucugcagcggcguguucggcgacaaccccagacccaaggacggcgagggcagcugcaaccccgugaccguggacggcgccaacggcgugaagggcuucagcuacgaguacggcaacggcgacuggaucggcagaaccaagagcaacagacugagaaagggcuucgagaugaucugggaccccgacggcuggaccgacaccaacagcgacuucagcgugaagcaggacgugguggccaucaccgacuggagcggcuacagcggcagcuucgugcagcaccccgagcugaccggccuggugugcaucagacccugcuucuggguggagcuggugagaggccugcccaaggagaacaccaccaucuggaccagcggcagcagcaucagcuucugcggcgugaacagcgacaccgccaacuggagcuggcccgacggcgccgagcugcccuucaccaucgacaaguga

SEQ ID NO: 174568 - RNA, 1410 nt, Artificial Sequence; identical to SEQ ID NO: 174403
  derived and/or modified CDS sequence (opt4) from neuraminidase__InfluenzaA__ABB53617

SEQ ID NO: 174569 - RNA, 1410 nt, Artificial Sequence
  derived and/or modified CDS sequence (opt4) from neuraminidase__InfluenzaA__ABB53721
augaaccccaaccagaagaucaucaccaucggcagcgugagccugaccaucagcaccaucugcuucuucaugcagaucgccauccugaucaccaccgugacccugcacuucaagcaguacgaguucaacagcccccccaacaaccaggugaugcugugcgagcccaccaucaucgagagaaacaucaccgagaucguguaccugaccaacaccaccaucgagaaggagaucugccccaagcuggccgaguacagaaacuggagcaagccccagugcgacaucaccggcuucgcccccuucagcaaggacaacagcaucagacugagcagcggcggcgacaucugggugaccagagagcccuacgugagcugcgaccccgacaagugcuaccaguucgcccugggccagggcaccacccugaacaacgugcacagcaacgacaccgugcacgacagaacccccuacagaacccugcugaugaacgagcugggcgugcccuuccaccugggcaccaagcaggugugcaucgccuggagcagcagcagcugccacgacggcaaggccuggcugcacgugugcgugaccggcgacgacaagaacgccaccgccagcuucaucuacaacggcagacugguggacagcaucgugagcuggagcaaggagauccugagaacccaggagagcgagugcgugugcaucaacggcaccugcaccguggugaugaccgacggcagcgccagcggcaaggccgacaccaagauccuguucaucgaggagggcaagaucgugcacaccagcacccugagcggcagcgcccagcacguggaggagugcagcugcuaccccagauaccccggcgugagaugcgugugcagagacaacuggaagggcagcaacagacccaucguggacaucaacaucaaggacuacagcaucgugagcagcuacgugugcagcggccuggugggcgacacccccagaaagaacgacagcagcagcagcagccacugccuggaccccaacaacgaggagggcggccacggcgugaagggcugggccuucgacgacggcaacgacguguggaugggcagaaccaucagcgagaagcugagaagcggcuacgagaccuucaaggugaucgagggcuggagcaaccccaacagcaagcugcagaucaacagacaggugaucguggacagaggcaacagaagcggcuacagcggcaucuucagcguggagggcaagagcugcaucaacagaugcuucuacguggagcugaucagaggcagaaaggaggagaccgaggugcuguggaccagcaacagcaucgugguguucugcggcaccagcggcaccuacggcaccggcagcuggcccgacggcgccgacaucaaccugaugcccaucuga

SEQ ID NO: 174570 - RNA, 1410 nt, Artificial Sequence
  derived and/or modified CDS sequence (opt4) from neuraminidase__InfluenzaA__ABB53754
augaaccccaaccagaagaucaucaccaucggcagcgugagccugaccaucgccaccaucugcuuccugaugcagaucgccauccuggugaccaccgugacccugcacuucaagcaguacgagugcagcagcccccccaacaaccaggugaugcccugcgagcccaucaucaucgagagaaacaucaccgagaucguguaccugaccaacaccaccaucgagaaggagaucugccccaagcugguggaguacagaaacuggagcaagccccagugcaagaucaccggcuucgcccccuucagcaaggacaacagcaucagacugagcgccggcggcgacaucugggugaccagagagcccuacgugagcugcgaccccggcaagugcuaccaguucgcccugggccagggcaccacccuggacaacaagcacagcaacgacaccauccacgacagaaccccccacagaacccugcugaugaacgagcugggcgugcccuuccaccugggcaccagacaggugugcaucgccuggagcagcagcagcugccacgacggcaaggccuggcugcacgugugcgugaccggcuacgacaagaacgccaccgccagcuucaucuacgacggcagacugguggacagcaucggcagcuggagcaagaacauccugagaacccaggagagcgagugcgugugcaucaacggcaccugcaccguggugaugaccgacggcagcgccagcgagagagccgacaccaagauccuguucaucgaggagggcaagaucgugcacaucagcccccugagcggcagcgcccagcacguggaggagugcagcugcuaccccagauaccccggcgugagaugcgugugcagagacaacuggaagggcagcaacagacccgugguggacaucaacgugaaggacuacagcaucgugagcagcuacgugugcagcggccuggugggcgacacccccagaaagaacgacagaagcagcagcagcuacugcagaaaccccaacaacgagaagggcaaccacggcgugaagggcugggccuucgacgacggcaacgacguguggaugggcagaaccaucagcgaggagagcagaagcggcuacgagaccuucaaggugaucggcggcuggagcacccccaacagcaagcugcagaucaacagacaggugaucguggacagcgacaacagaagcggcuacagcggcaucuucagcguggagggcaagagcugcaucaacagaugcuucuacguggagcugaucagaggcagagagcaggagaccagagugugguggaccagcaacagcaucgugguguucugcggcaccagcggcaccuacggcaccggcagcuggcccgacggcgccgacaucaaccugaugcccaucuga

SEQ ID NO: 174571 - RNA, 1410 nt, Artificial Sequence; identical to SEQ ID NO: 174163
  derived and/or modified CDS sequence (opt4) from neuraminidase__InfluenzaA__ABB54517

SEQ ID NO: 174572 - RNA, 1410 nt, Artificial Sequence
  derived and/or modified CDS sequence (opt4) from neuraminidase__InfluenzaA__ABB59999
augaaccccaaccagaagaucaucaccaucggcagcgugagccugaccaucgccaccaucugcuuccugaugcagaucgccauccuggugaccaccgugacccugcacuucaagcaguacgagugcagcagcccccccaacaaccaggugaugcugugcgagcccaccaucaucgagagaaacaucaccgagaucguguaccugaccaacaccaccaucgagaaggagaucugccccaagcuggccgaguacagaaacuggagcaagccccagugcaagaucaccggcuucgcccccuucagcaaggacaacagcaucagacugagcgccggcggcgacaucugggugaccagagagcccuacgugagcugcgaccccgacaagugcuaccaguucgcccugggccagggcaccacccugaacaacagacacagcaacgacaccgugcacgacagaacccccuacagaacccugcugaugaacgagcugggcgugcccuuccaccugggcaccaagcaggugugcaucgccuggagcagcagcagcugccacgacggcaaggccuggcugcacgugugcgugaccggccacgacgagaacgccaccgccagcuucaucuacgacggcagacugguggacagcaucggcagcuggagcaagaagauccugagaacccaggagagcgagugcgugugcaucaacggcaccugcaccguggugaugaccgacggcagcgccagcggcagagccgacaccaagauccuguucaucgaggagggcaagaucgugcacaucagcccccugagcggcagcgcccagcacguggaggagugcagcugcuaccccagauaccccggcgugagaugcgugugcagagacaacuggaagggcagcaacagacccaucguggacaucaacaucaaggacuacagcaucgugagcagcuacgugugcagcggccuggugggcgacacccccagaaagaacgacagcagcagcagcagccacugccugaaccccaacaacgaggagggcggccacggcgugaagggcugggccuucgacgacggcaacgacguguggaugggcagaaccaucagcgagaaguucagaagcggcuacgagaccuucaaggugaucgagggcuggagcaagcccaacagcaagcugcagaucaacagacaggugaucguggacagaggcaacagaagcggcuacagcggcaucuucagcguggagggcaagagcugcaucaacagaugcuucuacguggagcugaucagaggcagaaagcaggagaccgaggugugguggaccagcaacagcaucgugaccuucugcggcaccagcggcaccuacggcaccggcagcuggcccgacggcgccgacaucaaccugaugcccaucuga

SEQ ID NO: 174573 - RNA, 1410 nt, Artificial Sequence
  derived and/or modified CDS sequence (opt4) from neuraminidase__InfluenzaA__ABB60010
augaaccccaaccagaagaucaucaccaucggcagcgugagccugaccaucgccaccaucugcuuccugaugcagaucgccauccuggugaccaccgugacccugcacuucaagcaguacgaguacagcagcccccccaacaaccaggugaugcugugcgagcccaccaucaucgagagaaacaucaccgagaucguguaccugaccaacaccaccaucgagaaggagaucugccccaagcuggccgaguacagaaacuggagcaagccccagugcaagaucaccggcuucgcccccuucagcaaggacaacagcaucagacugagcgccggcggcgacaucugggugaccagagagcccuacgugagcugcgaccccgacaagugcuaccaguucgcccugggccagggcaccacccugaacaacagacacagcaacgacaccgugcacgacagaacccccuacagaacccugcugaugaacgagcugggcgugcccuuccaccugggcaccaagcaggugugcaucgccuggagcagcagcagcugccacgacggcaaggccuggcugcacgugugcgugaccggccacgacgagaacgccaccgccagcuucaucuacgacggcagacugguggacagcaucggcagcuggagcaagaagauccugagaacccaggagagcgagugcgugugcaucaacggcaccugcaccguggugaugaccgacggcagcgccagcggcagagccgacaccaagauccuguucaucgaggagggcaagaucgugcacaucagcccccugagcggcagcgcccagcacguggaggagugcagcugcuaccccagauaccccggcgugagaugcgugugcagagacaacuggaagggcagcaacagacccaucguggacaucaacgugaaggacuacagcaucgugagcagauacgugugcagcggccuggugggcgacacccccagaaagaacgacagcagcagcagcagccacugccugaaccccaacaacgaggagggcggccacggcgugaagggcugggccuucgacgacggcaacgacguguggaugggcagaaccaucagcgagaaguucagaagcggcuacgagaccuucaaggugaucgagggcuggagcaagcccaacagcaagcugcagaucaacagacaggugaucguggacagaggcaacagaagcggcuacagcggcaucuucagcguggagggcaagagcugcaucaacagaugcuucuacguggagcugaucagaggcagaaagcaggagaccgaggugugguggaccagcaacagcaucgugguguucugcggcaccagcggcaccuacggcaccggcagcuggcccgacggcgccgacaucaaccugaugcccaucuga

SEQ ID NO: 174574 - RNA, 1410 nt, Artificial Sequence
  derived and/or modified CDS sequence (opt4) from neuraminidase__InfluenzaA__ABB77867
augaaccccaaccagaagaucaucaccaucggcagcgugagccugaccaucgccaccaucugcuuccugaugcagaucgccauccuggugaccaccgugacccugcacuucaagcaguacgagugcaacagcccccccaacaaccaggugaugcugugcgagcccaccaucaucgagagaaacaucaccgagaucguguaccugaccaacaccaccaucgagaaggagaucugccccaagcuggccgaguacagaaacuggagcaagccccagugcaagaucaccggcuucgcccccuucagcaaggacaacagcaucagacugagcgccggcggcgacaucugggugaccagagagcccuacgugagcugcgaccccgacaagugcuaccaguucgcccugggccagggcaccacccugaacaacggccacagcaacgacaccgugcacgacagaacccccuacagaacccugcugaugaacgagcugggcgugcccuuccaccugggcaccaagcaggugugcaucgccuggagcagcagcagcugccacgacggcaaggccuggcugcacgugugcgugaccggccacgacgagaacgccaccgccagcuucaucuacgacggcagacugguggacagcaucggcagcuggagcaagaagauccugagaacccaggagagcgagugcgugugcaucaacggcaccugcaccguggugaugaccgacggcagcgccagcggcagagccgacaccaagauccuguucaucgaggagggcaagaucgugcacaucagccagcugagcggcagcgcccagcacguggaggagugcagcugcuaccccagauaccccggcgugagaugcgugugcagagacaacuggaagggcagcaacagacccaucguggacaucaacgugaaggaccacagcaucgugagcagcuacgugugcagcggccuggugggcgacacccccagaaagaacgacagcagcagcagcagccacugccugaaccccaacaacgaggagggcggccacggcgugaagggcugggccuucgacgacggcaacgacguguggaugggcagaaccaucagcgagaagcugagaagcggcuacgagaccuucaaggugaucgagggcuggagcaagcccaacagcaagcugcagaucaacagacaggugaucguggacagaggcaacagaagcggcuacagcggcaucuucagcguggagggcaagagcugcaucaacagaugcuucuacguggagcugaucagaggcagaaagcaggagaccgaggugugguggaccagcaacagcaucgugguguucugcggcaccagcggcaccuacggcaccggcagcuggcccgacggcgccgacaucaaccugaugcccaucuga

SEQ ID NO: 174575 - RNA, 1410 nt, Artificial Sequence; identical to SEQ ID NO: 174574
  derived and/or modified CDS sequence (opt4) from neuraminidase__InfluenzaA__ABB79719

SEQ ID NO: 174576 - RNA, 1410 nt, Artificial Sequence
  derived and/or modified CDS sequence (opt4) from neuraminidase__InfluenzaA__ABB79734
augaaccccaaccagaagaucaucaccaucggcagcgugagccugacccugagcaccaucugcuucuucaugcagaucgccauccugaucaccaccgugacccugcacuucaagcaguacgaguucaacagcccccccaacaaccaggugaugcugugcgagcccaccaucaucgagagaaacaucaccgagaucguguaccugaccaacaccaccaucgagaaggagaucugccccaagcuggccgaguacagaaacuggagcaagccccagugcgacaucaccggcuucgcccccuucagcaaggacaacagcaucagacugagcgccggcggcgacaucugggugaccagagagcccuacgugagcugcgaccccgacaagugcuaccaguucgcccugggccagggcaccacccugaacaacgugcacagcaacgacaccgugcacgacagaacccccuacagaacccugcugaugaacgagcugggcgugcccuuccaccugggcaccaagcaggugugcaucgccuggagcagcagcagcugccacgacggcaaggccuggcugcacgugugcgugaccggcgacgacaagaacgccaccgccagcuucaucuacaacggcagacugguggacagcaucgugagcuggagcaagaagauccugagaacccaggagagcgagugcgugugcaucaacggcaccugcaccguggugaugaccgacggcagcgccagcggcaaggccgacaccaagauccuguucaucgaggagggcaagaucgugcacaccagcacccugagcggcagcgcccagcacguggaggagugcagcugcuaccccagauaccccggcgugagaugcgugugcagagacaacuggaagggcagcaacagacccaucguggacaucaacaucaaggacuacagcaucgugagcagcuacgugugcagcggccuggugggcgacacccccagaaagaacgacagcagcagcagcagccacugccuggaccccaacaacgaggagggcggccacggcgugaagggcugggccuucgacgacggcaacgacguguggaugggcagaaccaucagcgagaagcugagaagcggcuacgagaccuucaaggugaucgagggcuggagcaaccccaacagcaagcugcagaucaacagacaggugaucguggacagaggcaacagaagcggcuacagcggcaucuucagcguggagggcaagagcugcaucaacagaugcuucuacguggagcugaucagaggcagaaaggaggagaccgaggugcuguggaccagcaacagcaucgugguguucugcggcaccagcggcaccuacggcaccggcagcuggcccgacggcgccgacaucaaccugaugcccaucuga

SEQ ID NO: 174577 - RNA, 1410 nt, Artificial Sequence; identical to SEQ ID NO: 174547
  derived and/or modified CDS sequence (opt4) from neuraminidase__InfluenzaA__ABB79791

SEQ ID NO: 174578 - RNA, 1410 nt, Artificial Sequence
  derived and/or modified CDS sequence (opt4) from neuraminidase__InfluenzaA__ABB79802
augaaccccaaccagaagaucaucaccaucggcagcgugagccugaccaucgccaccaucugcuuccugaugcagaucgccauccuggugaccaccgugacccugcacuucaagcaguacgagugcagcagcccccccaacaaccaggugaugcccugcgagcccaucaucaucgagagaaacaucaccgagaucguguaccugaccaacaccaccaucgagaaggagaucugccccaagcugguggaguacagaaacuggagcaagccccagugcaagaucaccggcuucgcccccuucagcaaggacaacagcaucagacugagcgccggcggcgacaucugggugaccagagagcccuacgugagcugcgaccccggcaagugcuaccaguucgcccugggccagggcaccacccugaacaacaagcacagcaacgacaccauccacgacagaacccccuacagaacccugcugaugaacgagcugggcgugcccuuccaccugggcaccaagcaggugugcaucgccuggagcagcagcagcugccacgacggcaaggccuggcugcacgugugcgugaccggccacgacgagaacgccaccgccagcuucaucuacgacggcagacugguggacagcaucggcagcuggagcaagaacauccugagaacccaggagagcgagugcgugugcaucaacggcaccugcaccguggugaugaccgacggcagcgccagcgagagagccgacaccaagauccuguucaucgaggagggcaagaucgugcacaucagcccccugagcggcagcgcccagcacguggaggagugcagcugcuaccccagauaccccggcgugagaugcgugugcagagacaacuggaagggcagcaacagacccaucguggacaucaacgugaaggacuacagcaucgugagcagcuacgugugcagcggccuggugggcgacacccccagaaagaacgacagaagcagcagcagcuacugcagaaaccccaacaacgagaagggcagccacggcgugaagggcugggccuucgacgacggcaacgacguguggaugggcagaaccaucggcgaggagcugagaagcggcuacgagaccuucaaggugaucggcggcuggagcacccccaacagcaagcugcagaucaacagacaggugaucguggacagcggcaacagaagcggcuacagcggcaucuucagcguggagggcaagagcugcaucaacagaugcuucuacguggagcugaucagaggcagagagcaggagaccagagugugguggaccagcaacagcaucgugguguucugcggcaccagcggcaccuacggcaccggcagcuggcccgacggcgccgacaucaaccugaugcccaucuga

SEQ ID NO: 174579 - RNA, 1410 nt, Artificial Sequence
  derived and/or modified CDS sequence (opt4) from neuraminidase__InfluenzaA__ABB79813
augaaccccaaccagaagaucaucaccaucggcagcgugagccugaccaucgccaccaucugcuuccugaugcagaucgccauccuggugaccaccgugacccugcacuucaagcaguacgagugcaacagcccccccaacaaccaggugaugcugugcgagcccaccaucaucgagagaaacaucaccgagaucguguaccugaccaacaccaccaucgagaaggaggugugccccaagcuggccgaguacagaaacuggagcaagccccagugcaagaucaccggcuucgcccccuucagcaaggacaacagcaucagacugagcgccggcggcgacaucugggugaccagagagcccuacgugagcugcgaccccggcaagugcuaccaguucgcccugggccagggcaccacccugaacaacagacacagcaacgacaccgugcacgacagaacccccuacagaacccugcugaugaacgagcugggcgugcccuuccaccugggcaccaagcaggugugcaucgccuggagcagcagcagcugccacgacggcaaggccuggcugcacgugugcgugaccggccacgacgagaacgccaccgccagcuucaucuacgacggcagacugguggacagcaucggcagcuggagcaagaacauccugagaacccaggagagcgagugcgugugcaucaacggcaccugcaccguggugaugaccgacggcagcgccagcgagagagccgacaccaagauccuguucaucgaggagggcaagaucgugcacaucagcccccugagcggcagcgcccagcacguggaggagugcagcugcuaccccagauaccccggcgugagaugcgugugcagagacaacuggaagggcagcaacagacccaucguggacaucaacgugaaggacuacagcaucgugagcagcuacgugugcagcggccuggugggcgacacccccagaaagaacgacagcagcagcagcagcuacugcagaaaccccaacaacgagaagggcagccacggcgugaagggcugggccuucgacgacggcaacgacguguggaugggcagaaccaucagcgaggagcugagaagcggcuacgagaccuucaaggugaucggcggcuggagcaagcccaacagcaagcugcagaucaacagacaggugaucguggacagaggcaacagaagcggcuacagcggcaucuucagcguggagggcaagagcugcaucaacagaugcuucuacguggagcugaucagaggcagaaagcaggagaccgaggugugguggaccagcaacagcaucgugguguucugcggcaccagcggcaccuacggcaccggcagcuggcccgacggcgccgacaucaaccugaugcccaucuga

SEQ ID NO: 174580 - RNA, 1410 nt, Artificial Sequence; identical to SEQ ID NO: 174579
  derived and/or modified CDS sequence (opt4) from neuraminidase__InfluenzaA__ABB79960

SEQ ID NO: 174581 - RNA, 1410 nt, Artificial Sequence; identical to SEQ ID NO: 174579
  derived and/or modified CDS sequence (opt4) from neuraminidase__InfluenzaA__ABB79971

SEQ ID NO: 174582 - RNA, 1413 nt, Artificial Sequence
  derived and/or modified CDS sequence (opt4) from neuraminidase__InfluenzaA__ABB79982
augaacgccaaccagaagaucaucaccaucggcagcaucagcaucgccaucggcaucaucagccugaugcugcagaucggcaacaucaucagcaucugggccagccacagcauccagaccggcagccagaaccacaccggcgugugcaaccagagaaucaucaccuacgagaacagcaccugggugaaccacaccuacgugaacaucaacaacaccaacgugaucgccggcaaggacaagaccagcgugacccuggccggcaacagcagccugugcagcaucagcggcugggccaucuacaccaaggacaacagcaucagaaucggcagcaagggcgacguguucgugaucagagagcccuucaucagcugcagccaccuggagugcagaaccuucuuccugacccagggcgcccugcugaacgacaagcacagcaacggcaccgugaaggacagaagccccuacagagcccugaugagcugcccccugggcgaggcccccagccccuacaacagcaaguucgagagcguggccuggagcgccagcgccugccacgacggcaugggcuggcugaccaucggcaucagcggccccgacaacggcgccguggccgugcugaaguacaacggcaucaucaccgagaccaucaagagcuggaagaagcagauccugagaacccaggagagcgagugcgugugcgugaacggcagcugcuucaccaucaugaccgacggccccagcaacggcgccgccagcuacaagaucuucaagaucgagaagggcaaggugaccaagagcaucgagcugaacgcccccaacuuccacuacgaggagugcagcugcuaccccgacaccggcaccgugaugugcgugugcagagacaacuggcacggcagcaacagacccugggugagcuucaaccagaaccuggacuaccagaucggcuacaucugcagcggcguguucggcgacaaccccagacccaaggacggcgagggcagcugcaaccccgugaccguggacggcgccaacggcgugaagggcuucagcuacaaguacggcaacggcguguggaucggcagaaccaagagcaacagacugagaaagggcuucgagaugaucugggaccccaacggcuggaccgacaccgacagcgacuucagcgugaagcaggacgugguggccaucaccgacuggagcggcuacagcggcagcuucgugcagcaccccgagcugaccggccuggacugcaucagacccugcuucuggguggagcuggugagaggccugcccaaggagaacaccaccaucuggaccagcggcagcagcaucagcuucugcggcgugaacagcgacaccgccaacuggagcuggcccgacggcgccgagcugcccuucaccaucgacaaguga

SEQ ID NO: 174583 - RNA, 1413 nt, Artificial Sequence; identical to SEQ ID NO: 174511
  derived and/or modified CDS sequence (opt4) from neuraminidase__InfluenzaA__ABB79993

SEQ ID NO: 174584 - RNA, 1410 nt, Artificial Sequence
  derived and/or modified CDS sequence (opt4) from neuraminidase__InfluenzaA__ABB80004
augaaccccaaccagaagaucaucaccaucggcagcgugagccugaccaucagcaccaucugcuucuucaugcagaucgccauccugaucaccaccgugacccugcacuucaagcaguacgaguucaacagcccccccaacaaccaggugaugcugugcgagcccaccaucaucgagagaaacaucaccgagaucguguaccugaccaacaccaccaucgagaaggagaucugccccaagcuggccgaguacagaaacuggagcaagccccagugcgacaucaccggcuucgcccccuucagcaaggacaacagcaucagacugagcgccggcggcgacaucugggugaccagagagcccuacgugagcugcgaccccgacaagugcuaccaguucgcccugggccagggcaccacccugaacaacgugcacagcaacgacaccgugcacgacagaacccccuacagaacccugcugaugaacgagcugggcgugcccuuccaccugggcaccaagcaggugugcaucgccuggagcagcagcagcugccacgacggcaaggccuggcugcacgugugcgugaccggcgacgacaagaacgccaccgccagcuucaucuacaacggcagacugguggacagcaucgugagcuggagcaaggagauccugagaacccaggagagcgagugcgugugcaucaacggcaccugcaccguggugaugaccgacggcagcgccagcggcaaggccgacaccaagauccuguucaucgaggagggcaagaucgugcacaccagcacccugagcggcagcgcccagcacguggaggagugcagcugcuaccccagauaccccggcgugagaugcgugugcagagacaacuggaagggcagcaacagacccaucguggacaucaacaucaaggacuacagcaccgugagcagcuacgugugcagcggccuggugggcgacacccccagaaagaacgacagcagcagcagcagccacugccuggaccccaacaacgaggagggcggccacggcgugaagggcugggccuucgacgacggcaacgacguguggaugggcagaaccaucagcgagaagcugagaagcggcuacgagaccuucaaggugaucgagggcuggagcaaccccaacagcaagcugcagaucaacagacaggugaucguggacagaggcaacagaagcggcuacagcggcaucuucagcguggagggcaagagcugcaucaacagaugcuucuacguggagcugaucagaggcagaaaggaggagaccgaggugcuguggaccagcaacagcaucgugguguucugcggcaccagcggcaccuacggcaccggcagcuggcccgacggcgccgacaucaaccugaugcccaucuga

SEQ ID NO: 174585 - RNA, 1410 nt, Artificial Sequence; identical to SEQ ID NO: 174569
  derived and/or modified CDS sequence (opt4) from neuraminidase__InfluenzaA__ABB80015

SEQ ID NO: 174586 - RNA, 1410 nt, Artificial Sequence
  derived and/or modified CDS sequence (opt4) from neuraminidase__InfluenzaA__ABB80037
augaaccccaaccagaagaucaucaccaucggcagcgugagccugaccaucgccaccgugugcuuccugaugcagaucgccauccuggugaccaccgugacccugcacuucaagcaguacgagugcgacagccccgccaacaaccaggugaugcccugcgagcccaucaucaucgagagaaacaucaccgagaucguguaccugaacaacaccaccaucgagaaggagaucugccccaagcugguggaguacagaaacuggagcaagccccagugcaagaucaccggcuucgcccccuucagcaaggacaacagcaucagacugagcgccggcggcgacaucugggugaccagagagcccuacgugagcugcgaccccggcaagugcuaccaguucgcccugggccagggcaccacccuggacaacaagcacagcaacgacaccauccacgacagaaucccccacagaacccugcugaugaacgagcugggcgugcccuuccaccugggcaccagacaggugugcaucgccuggagcagcagcagcugccacgacggcaaggccuggcugcacgugugcgugaccggcgacgacaagaacgccaccgccagcuucaucuacgacggcagacugguggacagcaucggcagcuggagccagaacauccugagaacccaggagagcgagugcgugugcaucaacggcaccugcaccguggugaugaccgacggcagcgccagcggcagagccgacaccagaauccuguucaucgaggagggcaagaucgugcacaucagcccccugagcggcagcgcccagcacguggaggagugcagcugcuaccccagauaccccggcgugagaugcaucugcagagacaacuggaagggcagcaacagacccgugguggacaucaacguggaggacuacagcaucgacagcagcuacgugugcagcggccuggugggcgacacccccagaaacaacgacagaagcagcaacagcaacugcagaaaccccaacaacgagagaggcaaccacggcgugaagggcugggccuucgacgacggcaacgacguguggaugggcagaaccaucagcaaggaccugagaagcggcuacgagaccuucaaggugaucggcggcuggagcacccccaacagcaagagccagaucaacagacaggugaucguggacagcgacaacagaagcggcuacagcggcaucuucagcguggagggcaagagcugcaucaacagaugcuucuacguggagcugaucagaggcagagagcaggagaccagagugugguggaccagcaacagcaucgugguguucugcggcaccagcggcaccuacggcaccggcagcuggcccgacggcgccgacaucaaccugaugcccaucuga

SEQ ID NO: 174587 - RNA, 1413 nt, Artificial Sequence
  derived and/or modified CDS sequence (opt4) from neuraminidase__InfluenzaA__ABB80048
augaaccccaaccagaagaucaucaccaucggcagcaucagcaucgccaucggcaucaucagccugaugcugcagaucggcaacaucaucagcaucugggccagccacagcauccagaccggcagccagaaccacaccggcgugugcaaccagagaaucaucaccuacgagaacagcaccugggugaaccacaccuacgugaacaucaacaacaccaacgugaucgccggcaaggacaagaccagcgugacccuggccggcaacagcagccugugcagcaucagcggcugggccaucuacaccaaggacaacagcaucagaaucggcagcaagggcgacguguucgugaucagagagcccuucaucagcugcagccaccuggagugcagaaccuucuuccugacccagggcgcccugcugaacgacaagcacagcaacggcaccgugaaggacagaagccccuacagagcccugaugagcugcccccugggcgaggcccccagccccuacaacagcaaguucgagagcguggccuggagcgccagcgccugccacgacggcaugggcuggcugaccaucggcaucagcggccccgacaacggcgccguggccgugcugaaguacaacggcaucaucaccgagaccaucaagagcuggaagaagcagauccugagaacccaggagagcgagugcgugugcgugaacggcagcugcuucaccaucaugaccgacggccccagcaacggcgccgccagcuacaagaucuucaagaucgagaagggcaaggugaccaagagcguggagcugaacgcccccaacuuccacuacgaggagugcagcugcuaccccgacaccggcaccgugaugugcgugugcagagacaacuggcacggcagcaacagacccugggugagcuucaaccagaaccuggacuaccagaucggcuacaucugcagcggcguguucggcgacaaccccagacccaaggacggcgagggcagcugcaaccccgugaccguggacggcgccaacggcgugaagggcuucagcuacaaguacggcaacggcguguggaucggcagaaccaagagcaacagacugagaaagggcuucgagaugaucugggaccccaacggcuggaccgacaccgacagcgacuucagcgugaagcaggacgugguggccaucaccgacuggagcggcuacagcggcagcuucgugcagcaccccgagcugaccggccuggacugcaucagacccugcuucuggguggagcuggugagaggccugcccaaggagaacaccaccaucuggaccagcggcagcagcaucagcuucugcggcgugaacggcgacaccgccaacuggagcuggcccgacggcgccgagcugcccuucaccaucgacaaguga

SEQ ID NO: 174588 - RNA, 1410 nt, Artificial Sequence
  derived and/or modified CDS sequence (opt4) from neuraminidase__InfluenzaA__ABB80084
augaaccccaaccagaagaucaucaccaucggcagcgugagccugaccaucgccaccaucugcuuccugaugcagaucgccauccuggugaccaccgugacccugcacuucaagcaguacgagugcaacagccccagcaacaaccaggugaugcugugcgagcccaccaucaucgagagaaacaucaccgagaucguguaccugaccaacaccaccaucgagaaggagaucugccccaagcuggccgaguacagaaacuggagcaagccccagugcaagaucaccggcuucgcccccuucagcaaggacaacagcaucagacugagcgccggcggcgacaucugggugaccagagagcccuacgugagcugcgaccccgacaagugcuaccaguucgcccugggccagggcaccacccugaacaacggccacagcaacgacaccgugcacgacagaacccccuacagaacccugcugaugaacgagcugggcgugcccuuccaccugggcaccaagcaggugugcaucgccuggagcagcagcagcugccacgacggcaaggccuggcugcacgugugcgugaccggccacgacgagaacgccaccgccagcuucaucuacgacggcagacugguggacagcaucggcagcuggagcaagaagauccugagaacccaggagagcgagugcgugugcaucaacggcaccugcaccguggugaugaccgacggcagcgccagcggcagagccgacaccaagauccuguucaucgaggagggcaagaucgugcacaucagccagcugagcggcagcgcccagcacguggaggagugcagcugcuaccccagauaccccggcgugagaugcgugugcagagacaacuggaagggcagcaacagacccaucguggacaucaacgugaaggaccacagcaucgugagcagcuacgugugcagcggccuggugggcgacacccccagaaagaacgacagcagcagcagcagccacugccugaaccccaacaacgaggagggcggccacggcgugaagggcugggccuucgacgacggcaacgacguguggaugggcagaaccaucagcgagaagcugagaagcggcuacgagaccuucaaggugaucgagggcuggagcaagcccaacagcaagcugcagaucaacagacaggugaucguggacagaggcaacagaagcggcuacagcggcaucuucagcguggagggcaagagcugcaucaacagaugcuucuacguggagcugaucagaggcagaaagcaggagaccgaggugugguggaccagcaacagcaucgugguguucugcggcaccagcggcaccuacggcaccggcagcuggcccgacggcgccgacaucaaccugaugcccaucuga

SEQ ID NO: 174589 - RNA, 1410 nt, Artificial Sequence; identical to SEQ ID NO: 174574
  derived and/or modified CDS sequence (opt4) from neuraminidase__InfluenzaA__ABB80095

SEQ ID NO: 174590 - RNA, 1410 nt, Artificial Sequence; identical to SEQ ID NO: 174574
  derived and/or modified CDS sequence (opt4) from neuraminidase__InfluenzaA__ABB80162

SEQ ID NO: 174591 - RNA, 1410 nt, Artificial Sequence; identical to SEQ ID NO: 174574
  derived and/or modified CDS sequence (opt4) from neuraminidase__InfluenzaA__ABB80199

SEQ ID NO: 174592 - RNA, 1410 nt, Artificial Sequence
  derived and/or modified CDS sequence (opt4) from neuraminidase__InfluenzaA__ABB80210
augaaccccaaccagaagaucaucaccaucggcagcgugagccugaccaucgccaccaucugcuuccugaugcagaucgccauccuggugaccaccgugacccugcacuucaagcaguacgagugcagcagcccccccaacaaccaggugaugcugugcgagcccaccaucaucgagagaaacaucaccgagaucguguaccugaccaacaccaccaucgagaaggagaucugccccaagcuggccgaguacagaaacuggagcaagccccagugcaagaucaccggcuucgcccccuucagcaaggacaacagcaucagacugagcgccggcggcgacaucugggugaccagagagcccuacgugagcugcgaccccgacaagugcuaccaguucgcccugggccagggcaccacccugaacaacagacacagcaacgacaccgugcacgacagaacccccuacagaacccugcugaugaacgagcugggcgugcccuuccaccugggcaccaagcaggugugcaucgccuggagcagcagcagcugccacgacggcaaggccuggcugcacgugugcgugaccggccacgacgagaacgccaccgccagcuucaucuacgacggcagacugguggacagcaucggcagcuggagcaagaagauccugagaacccaggagagcgagugcgugugcaucaacggcaccugcaccguggugaugaccgacggcagcgccagcggcagagccgacaccaagauccuguucaucgaggagggcaagaucgugcacaucagcccccugagcggcagcgcccagcacguggaggagugcagcugcuaccccagauaccccggcgugagaugcgugugcagagacaacuggaagggcagcaacagacccaucguggacaucaacgugaaggacuacagcaucgugagcagcuacgugugcagcggccuggugggcgacacccccagaaagaacgacagcagcagcagcagccacugccugaaccccaacaacgaggagggcggccacggcgugaagggcugggccuucgacgacggcaacgacguguggaugggcagaaccaucagcgagaaguucagaagcggcuacgagaccuucaaggugaucgagggcuggagcaagcccaacagcaagcugcagaucaacagacaggugaucguggacagaggcaacagaagcggcuacagcggcaucuucagcguggagggcaagagcugcaucaacagaugcuucuacguggagcugaucagaggcagaaagcaggagaccgaggugugguggaccagcaacagcaucgugguguucugcggcaccagcggcaccuacggcaccggcagcuggcccgacggcgccgacaucggccugaugcccaucuga

SEQ ID NO: 174593 - RNA, 1410 nt, Artificial Sequence
  derived and/or modified CDS sequence (opt4) from neuraminidase__InfluenzaA__ABB80232
augaaccccaaccagaagaucaucaccaucggcagcgugagccugaccaucgccaccaucugcuuccugaugcagaucgccauccuggugaccaccgugacccugcacuucaagcaguacgagugcaacagcccccccaacaaccaggugaugcugugcgagcccaccaucaucgagagaaacaucaccgagaucguguaccugaccaacaccaccaucgagaaggagaucugccccaagcuggccgaguacagaaacuggagcaagccccagugcaagaucaccggcuucgcccccuucagcaaggacaacagcaucagacuggccgccggcggcgacaucugggugaccagagagcccuacgugagcugcgaccccgacaagugcuaccaguucgcccugggccagggcaccacccugaacaacagacacagcaacgacaccgugcacgacagaacccccuacagaacccugcugaugaacgagcugggcgugcccuuccaccugggcaccaagcaggugugcaucgccuggagcagcagcagcugccacgacggcaaggccuggcugcacgugugcgugaccggccacgacgagaacgccaccgccagcuucaucuacgacggcagacugguggacagcaucggcagcuggagcaagaagauccugagaacccaggagagcgagugcgugugcaucaacggcaccugcaccguggugaugaccgacggcagcgccagcggcagagccgacaccaagauccuguucaucgaggagggcaagaucgugcacaucagccagcugagcggcagcgcccagcacguggaggagugcagcugcuaccccagauaccccggcgugagaugcgugugcagagacaacuggaagggcagcaacagacccaucguggacaucaacgugaaggacuacagcaucgugagcagcuacgugugcagcggccuggugggcgacacccccagaaagaacgacagcagcagcagcagccacugccugaaccccaacaacgaggagggcggccacggcgugaagggcugggccuucgacgacggcgacgacguguggaugggcagaaccaucagcgagaagcugagaagcggcuacgagaccuucaaggugaucgagggcuggagcaagcccaacagcaagcugcagaucaacagacaggugaucguggacagaggcaacagaagcggcuacagcggcaucuucagcguggagggcaagagcugcaucaacagaugcuucuacguggagcugaucagaggcagaaagcaggagaccgaggugugguggaccagcaacagcaucgugguguucugcggcaccagcggcaccuacggcaccggcagcuggcccgacggcgccgacaucaaccugaugcccaucuga

SEQ ID NO: 174594 - RNA, 1410 nt, Artificial Sequence
  derived and/or modified CDS sequence (opt4) from neuraminidase__InfluenzaA__ABB80243
augaaccccaaccagaagaucaucaccaucggcagcgugagccugaccaucgccaccaucugcuuccugaugcagaucgccauccuggugaccaccgugacccugcacuucaagcaguacgagugcaacagcccccccaacaaccaggugaugcugugcgagcccaccaucaucgagagaaacaucaccgagaucguguaccugaccaacaccaccaucgagaaggagaucugccccaagcuggccgaguacagaaacuggagcaagccccagugcaagaucaccggcuucgcccccuucagcaaggacaacagcaucagacugagcgccggcggcgacaucugggugaccagagagcccuacgugagcugcgaccccgacaagugcuaccaguucgcccugggccagggcaccacccugaacaacggccacagcaacgacaccgugcacgacagaacccccuacagaacccugcugaugaacgagcugggcgugcccuuccaccugggcaccaagcaggugugcaucgccuggagcagcagcagcugccacgacggcaaggccuggcugcacgugugcgugaccggccacgacgagaacgccaccgccagcuucaucuacgacggcagacugguggacagcaucggcagcuggagcaagaagauccugagaacccaggagagcgagugcgugugcaucaacggcaccugcaccguggugaugaccgacggcagcgccagcggcagagccgacaccaagauccuguucaucgaggagggcaagaucgugcacaucagccagcugagcggcagcgcccagcacguggaggagugcagcugcuaccccagauaccccggcgugagaugcgugugcagagacaacuggaagggcagcaacagacccaucguggacaucaacgugaaggaccacagcaucgugagcagcuacgugugcagcggccuggugggcgacacccccagaaagaacgacagcagcagcagcagccacugccugaaccccaacaacgaggagggcggccacggcgugaagggcugggccuucgacgacggcaacgacguguggaugggcagaaccaucagcgagaagcugagaagcggcuacgagaccuucaaggugaucgagggcuggagcaagcccaacagcaagcugcagaucaacagacaggugaucguggacagaggcaacagaagcggcuacagcggcaucuucagcguggagggcaagagcugcaucaacagaugcuucuacguggagcugaucagaggcagaaagaaggagaacgaggugugguggaccagcaacagcaucgugguguucugcggcaccagcggcaccuacggcaccggcagcuggcccgacggcgccgacaucaaccugaugcccaucuga

SEQ ID NO: 174595 - RNA, 1410 nt, Artificial Sequence
  derived and/or modified CDS sequence (opt4) from neuraminidase__InfluenzaA__ABB80254
augaaccccaaccagaagaucaucaccaucggcagcgugagccugaccaucgccaccaucugcuuccugaugcagaucgccauccuggugaccaccgugacccugcacuucaagcaguacgagugcagcagcccccccaacaaccaggugaugcugugcgagcccaccaucaucgagagaaacaucaccgagaucguguaccugaccaacaccaccaucgagaaggagaucugccccaagcuggccgaguacagaaacuggagcaagccccagugcaagaucaccggcuucgcccccuucagcaaggacaacagcaucagacugagcgccggcggcgacaucugggugaccagagagcccuacgugagcugcggccccgacaagugcuaccaguucgcccugggccagggcaccacccugaacaacagacacagcaacgacaccgugcacgacagaacccccuacagaacccugcugaugaacgagcugggcgugcccuuccaccugggcaccaagcaggugugcaucgccuggagcagcagcagcugccacgacggcaaggccuggcugcacgugugcgugaccggccacgacgagaacgccaccgccagcuucaucuacgacggcagacugguggacagcaucggcagcuggagcaagaagauccugagaacccaggagagcgagugcgugugcaucaacggcaucugcaccguggugaugaccgacggcagcgccagcggcagagccgacaccaagauccuguucaucgaggagggcaagaucgugcacaucagcccccugagcggcagcgcccagcacguggaggagugcagcugcuaccccagauaccccggcgugagaugcgugugcagagacaacuggaagggcagcaacagacccaucguggacaucaacgugaaggacuacagcaucgugagcagcuacgugugcagcggccuggugggcgacacccccagaaagaacgacagcagcagcagcagccacugccugaaccccaacaacgaggagggcggccacggcgugaagggcugggccuucgacgacggcaacgacguguggaugggcagaaccaucagcgagaaguucagaagcggcuacgagaccuucaaggugaucgagggcuggagcaagcccaacagcaagcugcagaucaacagacaggugaucguggacagaggcaacagaagcggcuacagcggcaucuucagcguggagggcaagagcugcaucaacagaugcuucuacguggagcugaucagaggcagaaagcaggagaccgaggugugguggaccagcaacagcaucgugguguucugcggcaccagcggcaccuacggcaccggcagcuggcccgacggcgccgacaucaaccugaugcccaucuga

SEQ ID NO: 174596 - RNA, 1410 nt, Artificial Sequence; identical to SEQ ID NO: 174187
  derived and/or modified CDS sequence (opt4) from neuraminidase__InfluenzaA__ABB80495

SEQ ID NO: 174597 - RNA, 1410 nt, Artificial Sequence; identical to SEQ ID NO: 174574
  derived and/or modified CDS sequence (opt4) from neuraminidase__InfluenzaA__ABB80506

SEQ ID NO: 174598 - RNA, 1410 nt, Artificial Sequence; identical to SEQ ID NO: 174574
  derived and/or modified CDS sequence (opt4) from neuraminidase__InfluenzaA__ABB80517

SEQ ID NO: 174599 - RNA, 1410 nt, Artificial Sequence; identical to SEQ ID NO: 174574
  derived and/or modified CDS sequence (opt4) from neuraminidase__InfluenzaA__ABB80532

SEQ ID NO: 174600 - RNA, 1410 nt, Artificial Sequence
  derived and/or modified CDS sequence (opt4) from neuraminidase__InfluenzaA__ABB80644
augaaccccaaccagaagaucaucaccaucggcagcgugagccugaccaucgccaccaucugcuuccugaugcagaucgccauccuggugaccaccgugacccugcacuucaagcaguacgagugcagcagcccccccaacaaccaggugaugcugugcgagcccaccaucaucgagagaaacaucaccgagaucguguaccugaccaacaccaccaucgagaaggagaucugccccaagcuggccgaguacagaaacuggagcaagccccagugcaagaucaccggcuucgcccccuucagcaaggacaacagcaucagacugagcgccggcggcgacaucugggugaccagagagcccuacgugagcugcgaccccgacaagugcuaccaguucgcccugggccagggcaccacccugaacaacagacacagcaacgacaccgugcacgacagaacccccuacagaacccugcugaugaacgagcugggcgugcccuuccaccugggcaccaagcaggugugcaucgccuggagcagcagcagcugccacgacggcaaggccuggcugcacgugugcgugaccggccacgacgagaacgccaccgccagcuucaucuacgacggcagacugguggacagcaucggcagcuggagcaacaagauccugagaacccaggagagcgagugcgugugcaucaacggcaccugcaccguggugaugaccgacggcagcgccagcggcagagccgacaccaagauccuguucaucgaggagggcaagaucgugcacaucagcccccugagcggcagcgcccagcacguggaggagugcagcugcuaccccagauaccccggcgugagaugcgugugcagagacaacuggaagggcagcaacagacccaucguggacaucaacgugaaggacuacagcaucgugagcagcuacgugugcagcggccuggugggcgacacccccagaaagaacgacagcagcagcagcagccacugccugaaccccaacaacgaggagggcggccacggcgugaagggcugggccuucgacgacggcaacgacguguggaugggcagaaccaucagcgagaaguucagaagcggcuacgagaccuucaaggugaucgagggcuggagcaagcccaacagcaagcugcagaucaacagacaggugaucguggacagaggcaacagaagcggcuacagcggcaucuucagcguggagggcaagagcugcaucaacagaugcuucuacguggagcugaucagaggcagaaagcaggagaccgaggugugguggaccagcaacagcaucgugguguucugcggcaccagcggcaccuacggcaccggcagcuggcccgacggcgccgacaucaaccugaugcccaucuga

SEQ ID NO: 174601 - RNA, 1410 nt, Artificial Sequence
  derived and/or modified CDS sequence (opt4) from neuraminidase__InfluenzaA__ABB80664
augaaccccaaccagaagaucaucaccaucggcagcgugagccugaccaucgccaccaucugcuuccugaugcagaucgccauccuggugaccaccgugacccugcacuucaagcaguacgagugcagcagcccccccaacaaccaggugaugcugugcgagcccaccaucaucgagagaaacaucaccgagaucguguaccugaccaacaccaccaucgagaaggagaucugccccaagcuggccgaguacagaaacuggagcaagccccagugcaagaucaccggcuucgcccccuucagcaaggacaacagcaucagacugagcgccggcggcgacaucugggugaccagagagcccuacgugagcugcgaccccgacaagugcuaccaguucgcccugggccagggcaccacccugaacaacagacacagcaacgacaccgugcacgacagaacccccuacagaacccugcugaugaacgagcugggcgugcccuuccaccugggcaccaagcaggugugcaucgccuggagcagcagcagcugccacgacggcaaggccuggcugcacgugugcgugaccggccacgacgagaacgccaccgccagcuucaucuacgacggcagacugguggacagcaucggcagcuggagcaagaagauccugagaacccaggagagcgagugcgugugcaucaacggcaccugcaccguggugaugaccgacggcagcgccagcggcagagccgacaccaaggugcuguucaucgaggagggcaagaucgugcacaucagcccccugagcggcagcgcccagcacguggaggagugcagcugcuaccccagauaccccggcgugagaugcgugugcagagacaacuggaagggcagcaacagacccaucguggacaucaacgugaaggacuacagcaucgugagcagcuacgugugcagcggccuggugggcgacacccccagaaagaacgacagcagcagcagcagccacugccugaaccccaacaacgaggagggcggccacggcgugaagggcugggccuucgacgacggcaacgacguguggaugggcagaaccaucagcgagaaguucagaagcggcuacgagaccuucaaggugaucgagggcuggagcaagcccaacagcaagcugcagaucaacagacaggugaucguggacagaggcaacagaagcggcuacagcggcaucuucagcguggagggcaagagcugcaucaacagaugcuucuacguggagcugaucagaggcagaaagcaggagaccgaggugugguggaccagcaacagcaucgugguguucugcggcaccagcggcaccuacggcaccggcagcuggcccgacggcgccgacaucaaccugaugcccaucuga

SEQ ID NO: 174602 - RNA, 1410 nt, Artificial Sequence
  derived and/or modified CDS sequence (opt4) from neuraminidase__InfluenzaA__ABB80675
augaaccccaaccagaagaucaucaccaucggcagcgugagccugaccaucgccaccaucugcuuccugaugcagaucgccauccuggugaccaccgugacccugcacuucaagcaguacgagugcaacagcccccccaacaaccaggugaugcugugcgagcccaccaucaucgagagaaacaucaccgagaucguguaccugaccaacaccaccaucgagaaggagaucugccccaagcuggccgaguacagaaacuggagcaagccccagugcaagaucaccggcuucgcccccuucagcaaggacaacagcaucagacuggccgccggcggcgacaucugggugaccagagagcccuacgugagcugcgaccccgacaagugcuaccaguucgcccugggccagggcaccacccugaacaacagacacagcaacgacaccgugcacgacagaacccccuacagaacccugcugaugaacgagcugggcgugcccuuccaccugggcaccaagcaggugugcaucgccuggagcagcagcagcugccacgacggcaaggccuggcugcacgugugcgugaccggccacgacgagaacgccaccgccagcuucaucuacgacggcagacugguggacagcaucggcagcuggagcaagaagauccugagaacccaggagagcgagugcgugugcaucaacggcaccugcaccguggugaugaccgacggcagcgccagcggcagagccgacaccaagauccuguucaucgaggagggcaagaucgugcacaucagccagcugagcggcagcgcccagcacguggaggagugcagcugcuaccccagauaccccggcgugagaugcgugugcagagacaacuggaagggcagcaacagacccaucguggacaucaacgugaaggacuacagcaucgugagcagcuacgugugcagcggccuggugggcgacacccccagaaagaacgacagcagcagcagcagcuacugccugaaccccaacaacgaggagggcggccacggcgugaagggcugggccuucgacgacggcgacgacguguggaugggcagaaccaucagcgagaagcugagaagcggcuacgagaccuucaaggugaucgagggcuggagcaagcccaacagcaagcugcagaucaacagacaggugaucguggacagaggcaacagaagcggcuacagcggcaucuucagcguggagggcaagagcugcaucaacagaugcuucuacguggagcugaucagaggcagaaagcaggagaccgaggugugguggaccagcaacagcaucgugguguucugcggcaccagcggcaccuacggcaccggcagcuggcccgacggcgccgacaucaaccugaugcccaucuga

SEQ ID NO: 174603 - RNA, 1410 nt, Artificial Sequence
  derived and/or modified CDS sequence (opt4) from neuraminidase__InfluenzaA__ABB80685
augaaccccaaccagaagaucaucaccaucggcagcgugagccugaccaucgccaccaucugcuuccugaugcagaucgccauccuggugaucaccgugacccugcacuucaagcaguacgagugcaacagcccccccaacaaccaggugaugcugugcgagcccaccaucaucgagagaaacaucaccgagaucguguaccugaccaacaccaccaucgagaaggagaucugccccaagcuggccgaguacagaaacuggagcaagccccagugcaagaucaccggcuucgcccccuucagcaaggacaacagcaucagacugagcgccggcggcgacaucugggugaccagagagcccuacgugagcugcgaccccgacaagugcuaccaguucgcccugggccagggcaccacccugaacaacggccacagcaacgacaccgugcacgacagaacccccuacagaacccugcugaugaacgagcugggcgugcccuuccaccugggcaccaagcaggugugcaucgccuggagcagcagcagcugccacgacggcaaggccuggcugcacgugugcgugaccggccacgacgagaacgccaccgccagcuucaucuacgacggcagacugguggacagcaucggcagcuggagcaagaagauccugagaacccaggagagcgagugcgugugcaucaacggcaccugcaccguggugaugaccgacggcagcgccagcggcagagccgacaccaagauccuguucaucgaggagggcaagaucgugcacaucagccagcugagcggcagcgcccagcacguggaggagugcagcugcuaccccagauaccccggcgugagaugcgugugcagagacaacuggaagggcagcaacagacccaucguggacaucaacgugaaggaccacagcaucgugagcagcuacgugugcagcggccuggugggcgacacccccagaaagaacgacagcagcagcagcagccacugccugaaccccaacaacgaggagggcggccacggcgugaagggcugggccuucgacgacggcaacgacguguggaugggcagaaccaucagcgagaagcugagaagcggcuacgagaccuucaaggugaucgagggcuggagcaagcccaacagcaagcugcagaucaacagacaggugaucguggacagaggcaacagaagcggcuacagcggcaucuucagcguggagggcaagagcugcaucaacagaugcuucuacguggagcugaucagaggcagaaagcaggagaccgaggugugguggaccagcaacagcaucgugguguucugcggcaccagcggcaccuacggcaccggcagcuggcccgacggcgccgacaucaaccugaugcccaucuga

SEQ ID NO: 174604 - RNA, 1410 nt, Artificial Sequence; identical to SEQ ID NO: 174574
  derived and/or modified CDS sequence (opt4) from neuraminidase__InfluenzaA__ABB80696

SEQ ID NO: 174605 - RNA, 1410 nt, Artificial Sequence
  derived and/or modified CDS sequence (opt4) from neuraminidase__InfluenzaA__ABB80707
augaaccccaaccagaagaucaucaccaucggcagcgugagccugaccaucgccaccaucugcuuccugaugcagaucgccauccuggugaccaccgugacccugcacuucaagcaguacgagugcagcagcccccccaacaaccaggugaugcugugcgagcccaccaucaucgagagaaacaucaccgagaucguguaccugaccaacaccaccaucgagaaggagaucugccccaagcuggccgaguacagaaacuggagcaagccccagugcaagaucaccggcuucgcccccuucagcaaggacaacagcaucagacugagcgccggcggcgacaucugggugaccagagagcccuacgugagcugcggccccgacaagugcuaccaguucgcccugggccagggcaccacccugaacaacagacacagcaacgacaccgugcacgacagaacccccuacagaacccugcugaugaacgagcugggcgugcccuuccaccugggcaccaagcaggugugcaucgccuggagcagcagcagcugccacgacggcaaggccuggcugcacgugugcgugaccggccacgacgagaacgccaccgccagcuucaucuacgacggcagacugguggacagcaucggcagcuggagcaagaagauccugagaacccaggagagcgagugcgugugcaucaacggcaccugcaccguggugaugaccgacggcagcgccagcggcagagccgacaccaagauccuguucaucgaggagggcaagaucgugcacaucagcccccugagcggcagcgcccagcacguggaggagugcagcugcuaccccagauaccccggcgugagaugcgugugcagagacaacuggaagggcagcaacagacccaucguggacaucaacgugaaggacuacagcaucgugagcagcuacgugugcagcggccuggugggcgacacccccagaaagaacgacagcagcagcagcagccacugccugaaccccaacaacgaggagggcggccacggcgugaagggcugggccuucgacgacggcaacgacguguggaugggcagaaccaucagcgagaaguucagaagcggcuacgagaccuucaaggugaucgagggcuggagcaagcccaacagcaagcugcagaucaacagacaggugaucguggacagaggcaacagaagcggcuacagcggcaucuucagcguggagggcaagagcugcaucaacagaugcuucuacguggagcugaucagaggcagaaagcaggagaccgaggugugguggaccagcaacagcaucgugguguucugcggcaccagcggcaccuacggcaccggcagcuggcccgacggcgccgacaucaaccugaugcccaucuga

SEQ ID NO: 174606 - RNA, 1410 nt, Artificial Sequence; identical to SEQ ID NO: 174574
  derived and/or modified CDS sequence (opt4) from neuraminidase__InfluenzaA__ABB80716

SEQ ID NO: 174607 - RNA, 1410 nt, Artificial Sequence
  derived and/or modified CDS sequence (opt4) from neuraminidase__InfluenzaA__ABB80725
augaaccccaaccagaagaucaucaccaucggcagcgugagccugaccaucgccaccaucugcuuccugaugcagaucgccauccuggugaccaccgugacccugcacuucaagcaguacgagugcagcagcccccccaacaaccaggugaugcugugcgagcccaccgugaucgagagaaacaucaccgagaucguguaccugaccaacaccaccaucgagaaggagaucugccccaagcuggccgaguacagaaacuggagcaagccccagugcaagaucaccggcuucgcccccuucagcaaggacaacagcaucagacugagcgccggcggcgacaucugggugaccagagagcccuacgugagcugcgaccccgacaagugcuaccaguucgcccugggccagggcaccacccugaacaacagacacagcaacgacaccgugcacgacagaacccccuacagaacccugcugaugaacgagcugggcgugcccuuccaccugggcaccaagcaggugugcaucgccuggagcagcagcagcugccacgacggcaaggccuggcugcacgugugcgugaccggccacgacgagaacgccaccgccagcuucaucuacgacggcagacugguggacagcaucggcagcuggagcaagaagauccugagaacccaggagagcgagugcgugugcaucaacggcaccugcaccguggugaugaccgacggcagcgccagcggcagagccgacaccaagauccuguucaucgaggagggcaagaucgugcacaucagcccccugagcggcagcgcccagcacguggaggagugcagcugcuaccccagauaccccggcgugagaugcgugugcagagacaacuggaagggcagcaacagacccaucguggacaucaacgugaaggacuacagcaucgugagcagcuacgugugcagcggccuggugggcgacacccccagaaagaacgacagcagcagcagcagccacugccugaaccccaacaacgaggagggcggccacggcgugaagggcugggccuucgacgacggcaacgacguguggaugggcagaaccaucagcgagaaguucagaagcggcuacgagaccuucaaggugaucgagggcuggagcaagcccaacagcaagcugcagaucaacagacaggugaucguggacagaggcaacagaagcggcuacagcggcaucuucagcguggagggcaagagcugcaucaacagaugcuucuacguggagcugaucagaggcagaaagcaggagaccgaggugugguggaccagcaacagcaucguggccuucugcggcaccagcggcaccuacggcaccggcagcuggcccgacggcgccgacaucaaccugaugcccaucuga

SEQ ID NO: 174608 - RNA, 1410 nt, Artificial Sequence
  derived and/or modified CDS sequence (opt4) from neuraminidase__InfluenzaA__ABB80740
augaaccccaaccagaagaucaucaccaucggcagcgugagccugaccaucgccaccaucugcuuccugaugcagaucgccauccuggugaccaccgugacccugcacuucaagcaguacgagugcugcagcccccccaacaaccaggugaugcugugcgagcccaccaucaucgagagaaacaucaccgagaucguguaccugaccaacaccaccaucgagaaggagaucugccccaagcuggccgaguacagaaacuggagcaagccccagugcaagaucaccggcuucgcccccuucagcaaggacaacagcaucagacugagcgccggcggcgacaucugggugaccagagagcccuacgugagcugcgaccccgacaagugcuaccaguucgcccugggccagggcaccacccugaacaacagacacagcaacgacaccgugcacgacagaacccccuacagaacccugcugaugaacgagcugggcgugcccuuccaccugggcaccaagcaggugugcaucgccuggagcagcagcagcugccacgacggcaaggccuggcugcacgugugcgugaccggccacgacgagaacgccaccgccagcuucaucuacgacggcagacugguggacagcaucggcagcuggagcaagaagauccugagaacccaggagagcgagugcgugugcaucaacggcaccugcaccguggugaugaccgacggcagcgccagcggcagagccgacaccaagauccuguucaucgaggagggcaagaucgugcacaucagcccccugagcggcagcgcccagcacguggaggagugcagcugcuaccccagauaccccggcgugagaugcgugugcagagacaacuggaagggcagcaacagacccaucguggacaucaacgugaaggacuacagcaucgugagcagcuacgugugcagcggccuggugggcgacacccccagaaagaacgacagcagcagcagcagccacugccugaaccccaacaacgaggagggcggccacggcgugaagggcugggccuucgacgacggcaacgacguguggaugggcagaaccaucagcgagaaguucagaagcggcuacgagaccuucaaggugaucgagggcuggagcaagcccaacagcaagcugcagaucaacagacaggugaucguggacagaggcaacagaagcggcuacagcggcaucuucagcguggagggcaagagcugcaucaacagaugcuucuacguggagcugaucagaggcagaaagcaggagaccgaggugugguggaccagcaacagcaucguggccuucugcggcaccagcggcaccuacggcaccggcagcuggcccgacggcgccgacaucaaccugaugcccaucuga

SEQ ID NO: 174609 - RNA, 1410 nt, Artificial Sequence; identical to SEQ ID NO: 174574
  derived and/or modified CDS sequence (opt4) from neuraminidase__InfluenzaA__ABB80751

SEQ ID NO: 174610 - RNA, 1410 nt, Artificial Sequence; identical to SEQ ID NO: 174293
  derived and/or modified CDS sequence (opt4) from neuraminidase__InfluenzaA__ABB82186

SEQ ID NO: 174611 - RNA, 1413 nt, Artificial Sequence; identical to SEQ ID NO: 174456
  derived and/or modified CDS sequence (opt4) from neuraminidase__InfluenzaA__ABB82197

SEQ ID NO: 174612 - RNA, 1413 nt, Artificial Sequence; identical to SEQ ID NO: 174446
  derived and/or modified CDS sequence (opt4) from neuraminidase__InfluenzaA__ABB82208

SEQ ID NO: 174613 - RNA, 1413 nt, Artificial Sequence
  derived and/or modified CDS sequence (opt4) from neuraminidase__InfluenzaA__ABB82219
augaaccccaaccagaagaucaucaccaucggcagcaucagcaucgccaucggcaucaucagccugaugcugcagaucggcaacaucaucagcaucugggccagccacagcauccagaccggcagccagaaccacaccggcaucugcaaccagagaaucaucaccuacgagaacagcaccugggugaaccacaccuacgugaacaucaacaacaccaacgugaucgccgagaaggacaagaccagcgugacccuggccggcaacagcagccugugcagcaucagcggcugggccaucuacaccaaggacaacagcaucagaaucggcagcaagggcgacguguucgugaucagagagcccuucaucagcugcagcaaccuggagugcagaaccuucuuccugacccagggcgcccugcugaacgacaagcacagcaacggcaccgugaaggacagaagccccuacagagcccugaugagcugcccccugggcgaggcccccagccccuacaacagcaaguucgagagcguggccuggagcgccagcgccugccacgacggcaugggcuggcugaccaucggcaucagcggccccgacaacggcgccguggccgugcugaaguacaacggcaucaucaccgagaccaucaagagcuggaagaagagaauccugagaacccaggagagcgagugcgugugcgugaacggcagcugcuucaccaucaugaccgacggccccagcaacggcgccgccagcuacaagaucuucaagaucgagaagggcaaggugaccaagagcaucgagcugaacgcccccaacuuccacuacgaggagugcagcugcuaccccgacaccggcaccgugaugugcgugugcagagacaacuggcacggcagcaacagacccugggugagcuucaaccagaaccuggacuaccagaucggcuacaucugcagcggcguguucggcgacaaccccagacccaaggacggcgagggcagcugcaaccccgugaccguggacggcgccgacggcgugaagggcuucagcuacaaguacggcaacggcguguggaucggcagaaccaagagcaacagacugagaaagggcuucgagaugaucugggaccccaacggcuggaccgacaccgacagcgacuucagcgugaagcaggacgugguggccaucaccgacuggagcggcuacagcggcagcuucgugcagcaccccgagcugaccggccuggacugcaucagacccugcuucuggguggagcuggugagaggccugcccagagagaacaccaccaucuggaccagcggcagcagcaucagcuucugcggcgugaacagcgacgccgccgacuggagcuggcccgacggcgccgagcugcccuucaccaucgacaaguga

SEQ ID NO: 174614 - RNA, 1410 nt, Artificial Sequence
  derived and/or modified CDS sequence (opt4) from neuraminidase__InfluenzaA__ABB82230
augaaccccaaccagaagaucaucaccaucggcagcgugagccugaccaucgccaccgugugcuuccugaugcagaucgccauccuggugaccaccgugacccugcacuucaagcaguacgagugcgacagccccgccaacaaccaggugaugcccugcgagcccaucaucaucgagagaaacaucaccgagaucguguaccugaccaacaccaccaucgagaaggagaucugccccaagcugguggaguacagaaacuggagcaagccccagugcaagaucaccggcuucgcccccuucagcaaggacaacagcaucagacugagcgccggcggcgacaucugggugaccagagagcccuacgugagcugcgaccccggcaagugcuaccaguucgcccugggccagggcaccacccuggacaacaagcacagcaacgacaccauccacgacagaaucccccacagaacccugcugaugaacgagcugggcgugcccuuccaccugggcaccagacaggugugcaucgccuggagcagcagcagcugccacgacggcaaggccuggcugcacgugugcgugaccggcgacgacaagaacgccaccgccagcuucaucuacgacggcagacugguggacagcaucggcagcuggagccagaacauccugagaacccaggagagcgagugcgugugcaucaacggcaccugcaccguggugaugaccgacggcagcgccagcggcagagccgacaccagaauccuguucaucgaggagggcaagaucgugcacaucagcccccugagcggcagcgcccagcacguggaggagugcagcugcuaccccagauaccccggcgugagaugcaucugcagagacaacuggaagggcagcaacagacccaucguggacaucaacgugaaggacuacagcaucgacagcagauacgugugcagcggccuggugggcgacacccccagaaacaacgacagaagcagcaacagcaacugcagaaaccccaacaacgacaagggcaaccacggcgugaagggcugggccuucgacgacggcaacgacguguggaugggcagaaccaucagcaaggacagcagaagcggcuacgagaccuucaaggugaucggcggcuggagcacccccaacagcaagagccagaucaacagacaggugaucguggacagcgacaacagaagcggcuacagcggcaucuucagcguggagggcaagagcugcaucaacagaugcuucuacguggagcugaucagaggcagagagcaggagaccagagugugguggaccagcaacagcaucgugguguucugcggcaccagcggcaccuacggcaccggcagcuggcccgacggcgccgacaucaaccugaugcccaucuga

SEQ ID NO: 174615 - RNA, 1410 nt, Artificial Sequence
  derived and/or modified CDS sequence (opt4) from neuraminidase__InfluenzaA__ABB83018
augaaccccaaccagaagaucaucaccaucggcagcgugagccugaccaucgccaccaucugcuuccugacccagaucgccauccuggugaccaccgugacccugcacuucaagcaguacggcugcaacagcccccccaacaaccaggugaugcugugcgagcccaccaucaucgagagaaacaucaccgagaucguguaccugaccaacaccaccaucgagaaggagaucugccccaagcuggccgaguacagaaacuggagcaagccccagugcaacaucaccggcuucgcccccuucagcaaggacaacagcaucagacugagcgccggcggcgacaucugggugaccagagagcccuacgugagcugcgaccccgacaagugcuaccaguucgcccugggccagggcaccacccugaacaacggccacagcaacgacaccgugcacgacagaacccccuacagaacccugcugaugaacgagcugggcgugcccuuccaccugggcaccaagcaggugugcaucgccuggagcagcagcagcugccacgacggcaaggccuggcugcacgugugcgugaccggcgacgacaagaacgccaccgccagcuucaucuacaacggcagacugguggacagcaucggcagcuggagcaagaagauccugagaacccaggagagcgagugcgugugcaucaacggcaccugcaccguggugaugaccgacggcagcgccagcggcaaggccgacaccaagauccuguucaucgaggagggcaagaucgugcacaccagccugcugagcggcagcgcccagcacguggaggagugcagcugcuaccccagauaccccggcgugagaugcgugugcagagacaacuggaagggcagcaacagacccaucguggacaucaacgugaaggacuacagcaucgugagcagcuacgugugcagcggccuggugggcgacacccccagaaagaacgacagcagcagcagcagccacugccuggaccccaacaacgaggagggcggccacggcgugaagggcugggccuucgacgacggcaacgacguguggaugggcagaaccaucagcgagaagcugagaagcggcuacgagaccuucaaggugaucgagggcuggagcaagcccaacagcaagcugcagaucaacagacaggugaucguggacagaggcaacagaagcggcuacagcggcaucuucagcguggagggcaagagcugcaucaacagaugcuucuacguggagcugaucagaggcagaaaccaggagaccgaggugcuguggaccagcaacagcaucgugguguucugcggcaccagcggcaccuacggcaccggcagcuggcccgacggcgccgacaucaaccugaugcccaucuga

SEQ ID NO: 174616 - RNA, 1410 nt, Artificial Sequence; identical to SEQ ID NO: 174615
  derived and/or modified CDS sequence (opt4) from neuraminidase__InfluenzaA__ABB83029

SEQ ID NO: 174617 - RNA, 1410 nt, Artificial Sequence; identical to SEQ ID NO: 174442
  derived and/or modified CDS sequence (opt4) from neuraminidase__InfluenzaA__ABB83130

SEQ ID NO: 174618 - RNA, 1410 nt, Artificial Sequence
  derived and/or modified CDS sequence (opt4) from neuraminidase__InfluenzaA__ABB83141
augaaccccaaccagaagaucaucaccaucggcagcgugagccugaccaucgccaccaucugcuuccugagccagaucgccauccuggugaccaccgugacccugcacuucaagcaguacgagugcaacagcccccccaacaaccaggugaugcugugcgagcccaccaucaucgagagaaacaucaccgagaucguguaccugaccaacaccaccaucgagaaggagaucugccccaagcuggccgaguacagaaacuggagcaagccccagugcaacaucaccggcuucgcccccuucagcaaggacaacagcaucagacugagcgccggcggcgacaucugggugaccagagagcccuacgugagcugcgaccccgacaagugcuaccaguucgcccugggccagggcaccacccugaacaacggccacagcaacgacaccgugcacgacagaacccccuacagaacccugcugaugaacgagcugggcgugcccuuccaccugggcaccaagcaggugugcaucgccuggagcagcagcagcugccacgacggcaaggccuggcugcacgugugcgugaccggcgacgacaagaacgccaccgccagcuucaucuacaacggcagacugguggacagcaucggcagcuggagcaagaagauccugagaacccaggagagcgagugcgugugcaucaacggcaccugcaccguggugaugaccgacggcagcgccagcggcaaggccgacaccaagauccuguucaucgaggagggcaagaucgugcacaccagccugcugagcggcagcgcccagcacguggaggagugcagcugcuaccccagauaccccggcgugagaugcgugugcagagacaacuggaagggcagcaacagacccaucguggacaucaacgugaaggacuacagcaucgugagcagcuacgugugcagcggccuggugggcgacacccccagaaagaacgacagcagcagcagcagccacugccuggaccccaacaacgaggagggcggccacggcgugaagggcugggccuucgacgacggcaacgacguguggaugggcagaaccaucagcgagaagcugagaagcggcuacgagaccuucaaggugaucgagggcuggagcaagcccaacagcaagcugcagaucaacagacaggugaucguggacagagacaacagaagcggcuacagcggcaucuucagcguggagggcaagagcugcaucaacagaugcuucuacguggagcugaucagaggcagaaaccaggagaccgaggugcuguggaccagcaacagcaucgugguguucugcggcaccagcggcaccuacggcaccggcagcuggcccgacggcgccgacaucaaccugaugcccaucuga

SEQ ID NO: 174619 - RNA, 1410 nt, Artificial Sequence
  derived and/or modified CDS sequence (opt4) from neuraminidase__InfluenzaA__ABB86876
augaacaccaaccagagaaucaucaccaucggcaccgugugccugaucgugggcaucaucagccugcugcugcagaucggcaacaucgugagccuguggaucagccacagcauccagaccggcggcaagaaccacagcgagaugugcaaccagaacgugaucaccuacgugaacaacaccugggugaacagaaccuacgugaacaucagcaacaccaacaucgccaccgugcaggacgugaccagcgugauccuggccggcaacagcagccugugcagcgugagcggcugggccaucuacagcaaggacaacagcaucagaaucggcagcaagggcgacaucuucgugaucagagagcccuucaucagcugcagccaccuggagugcagaaccuucuuccugacccagggcgcccugcugaacgacaagcacagcaacggcaccgugaaggacagaagccccuacagaacccugaugagcugccccaucggcgaggcccccagccccuacaacagcagauucgagagcguggccuggagcgccagcgccugccacgacggcaugggcuggcugaccaucggcaucagcggccccgacaacggcgccguggccgugcugaaguacaacggcaucaucaccgacaccaucaagagcuggagaaacaagauccugagaacccaggagagcgagugcgugugcaugaacggcagcugcuucaccgugcugaccgacggccccagcaacggccaggccagcuacaagaucuucaagguggagaagggcaagaucaucaagagcaucgagcuggacgcccccaacuaccacuacgaggagugcagcugcuaccccgacaccggcaaggugaugugcgugugcagagacaacuggcacgccagcaacagacccugggugagcuucgaccagaaccuggacuaccagaucggcuacaucugcagcggcguguucggcgacaaccccagaagcaacgacggcaagggcaacugcggccccgugcugagcaacggcgccaacggcgugaagggcuucagcuucagauacggcaacggcguguggaucggcagaaccaagagcaucaacagcagaagcggcuucgagaugaucugggaccccaacggcuggaccggcaccgacagcagcuucagcaugaagcaggacaucaucgcccugaccgacuggagcggcuacagcggcagcuucgugcagcaccccgagcugaccggcaugaacugcaucagacccugcuucuggguggagcugaucagaggccagcccaaggagagcaccaucugggccagcggcagcagcaucagcuucugcggcguggacagcgagaccaccagcuggagcuggcccgacggcgccgaccugcccuucaccaucgacaaguga

SEQ ID NO: 174620 - RNA, 1410 nt, Artificial Sequence
  derived and/or modified CDS sequence (opt4) from neuraminidase__InfluenzaA__ABB86886
augaacaccaaccagagaaucaucaccaucggcaccgccugccuggccaucggcaucgugagccugcugcugcagaucggcaacaucgugagccuguggaucagccacagcauccagaccgaggagaagaaccacagcgagaccugcagccagaacuucaucacccacgagaacaacaccugggugaaccagaccuacaucaacaucagcaacaccaacaacguggugggccagggcgugaccagcaucaugcuggccggcaacagcagccugugccccaucagcggcugggccaucuacagcaaggacaacagcaucagaaucggcagcaagggcgacaucuucgugaucagagagcccuucaucagcugcagccaccuggagugcagaaccuucuuccugacccagggcgcccugcugaacgacaagcacagcaacggcaccgugaaggacagaagccccuacagaacccugaugagcugccccaucggcgaggcccccagccccuacaacagcagauucgagagcguggccuggagcgccagcgccugccacgacggcaugggcuggcugaccaucggcaucagcggccccgacaacggcgccguggccguguucaaguacaacggcaucaucaccgacaccaucaagagcuggagaaacaagauccugagaacccaggagagcgagugcgugugcaucaacggcagcugcuucaccaucaugaccgacggccccagcaacggccaggccagcuacaagaucuucaagauggagaagggcaagaucaucaagagcguggagcuggacgcccccaacuaccacuacgaggagagcagcugcuaccccgacaccggcaagguggugugcgugugcagagacaacuggcacgccagcaacagacccugggugagcuucgaccagaaccuggacuaccagaucggcuacaucugcagcggcguguucggcgacaaccccagaagcaacgacggcaagggcaacugcggccccgugcugagcaacggcgccaacggcgugaaggaggugagcuucagauacggcaacggcguguggaucggcagaaccaagagcaucagcagcagaagcggcuucgagaugaucugggaccccaacggcuggaccgagaccgacagcagcuucagcaucaagcaggacaucaucgcccugaccgacuggagcggcuacagcggcagcuucgugcagcaccccgagcugaccggcaugaacugcaucaagcccugcuucuggguggagcugaucagaggccagcccaaggagagcaccaucuggaccagcggcagcagcaucagcuucugcggcguggacagcgagaccgccagcuggagcuggcccgacggcgccgaccugcccuucaccaucgacaaguga

SEQ ID NO: 174621 - RNA, 1410 nt, Artificial Sequence
  derived and/or modified CDS sequence (opt4) from neuraminidase__InfluenzaA__ABB86898
augaaccccaaccagaagaucaucaccaucggcagcgugagccugacccuggccaccaucugcuuccugaugcagaucgccauccuggugaccaccgugacccugcacuucaagcagcaggagugcaacagcccccccaacaaccaggugaugcugugcgagcccaccaucaucgagagaaacaucaccgagaucguguaccugaccaacaccaccaucgagaaggagaucugccccaagcuggccgaguacagaaacuggagcaagccccagugcaacaucaccggcuucgcccccuucagcaaggacaacagcaucagacugagcgccggcggcgacaucugggugaccagagagcccuacgugagcugcgaccccgacaagugcuaccaguucgcccugggccagggcaccacccugaacaacggccacagcaacaacaccgugcacgacagaacccccuacagaacccugcugaugaacgagcugggcgugcccuuccaccugggcaccagacaggugugcaucgccuggagcagcagcagcugccacgacggcaaggccuggcugcacgugugcaucaccggcgacgacaagaacgccaccgccagcuucaucuacaacggcagacugguggacagcaucggcagcuggagcaagaagauccugagaacccaggagagcgagugcgugugcaucaacggcaccugcaccguggugaugaccgacggcagcgccagcggcaaggccgacaccaagauccuguucaucgaggagggcaagaucgugcacaucagcacccugagcggcagcgcccagcacguggaggagugcagcugcuaccccagauaccccggcgugagaugcgugugcagagacaacuggaagggcagcaacagacccaucguggacaucaacgugaaggacuacagcaucgugagcagcuacgugugcagcggccuggugggcgacacccccagaaagaacgacagcuucagcagcagccacugccuggaccccaacaacgaggagggcggccacggcgugaagggcugggccuucgacgacggcaacgacguguggaugggcagaaccaucagcgagaagcugagaagcggcuacgagaccuucaaggugaucgagggcuggagcaagcccaacagcaagcugcagaucaacagacaggugaucguggagagaggcagcagaagcggcuacagcggcaucuucagcguggagggcaagagcugcaucaacagaugcuucuacguggagcugaucagaggcagaaaggaggagaccaaggugugguggaccagcaacagcaucgugguguucugcggcaccagcggcaccuacggcaccggcagcuggcccgacggcgccgacaucaaccugaugcccaucuga

SEQ ID NO: 174622 - RNA, 1410 nt, Artificial Sequence
  derived and/or modified CDS sequence (opt4) from neuraminidase__InfluenzaA__ABB86906
augaacaccaaccagagaaucaucaccaucggcaccgugugccugaucgugggcaucaucagccugcugcugcagaucggcaacaucgugagccuguggaucagccacagcauccagaccggcggcaagaaccacagcgagaugugcaaccagaacgugaucaccuacgugaacaacaccugggugaacagaaccuacgugaacaucagcaacaccaacaucgccaccgugcaggacgugaccagcgugauccuggccggcaacagcagccugugcagcgugagcggcugggccaucuacagcaaggacaacagcaucagaaucggcagcaagggcgacaucuucgugaucagagagcccuucaucagcugcagccaccuggagugcagaaccuucuuccugacccagggcgcccugcugaacgacaagcacagcaacggcaccgugaaggacagaagccccuacagaacccugaugagcugccccaucggcgaggcccccagccccuacaacagcagauucgagagcguggccuggagcgccagcgccugccacgacggcaugggcuggcugaccaucggcaucagcggccccgacaacggcgccguggccgugcugaaguacaacggcaucaucaccgacaccaucaagagcuggagaaacaagauccugagaacccaggagagcgagugcgugugcaugaacggcagcugcuucaccgugcugaccgacggccccagcaacggccaggccagcuacgagaucuucaagguggagaagggcaagaucaucaagagcaucgagcuggacgcccccaacuaccacuacgaggagugcagcugcuaccccgacaccggcaaggugaugugcgugugcagagacaacuggcacgccagcaacagacccugggugagcuucgaccagaaccugaacuaccagaucggcuacaucugcagcggcguguucggcgacaaccccagaagcaacgacggcaagggcaacugcggccccgugcugagcaacggcgccaacggcgugaagggcuucagcuucagauacggcaacggcguguggaucggcagaaccaagagcaucagcagcagaagcggcuucgagauggugugggaccccaacggcuggaccggcaccgacagcagauucagcaugaagcaggacaucaucgcccugaccgacuggagcggcuacagcggcagcuucgugcagcaccccgagcugaccggcaugaacugcaucagacccugcuucuggguggagcugaucagaggccagcccaaggagagcaccaucugggccagcggcagcagcaucagcuucugcggcgugaacagcgagaccgccagcuggagcuggcccgacggcgccgaccugcccuucaccaucgacaaguga

SEQ ID NO: 174623 - RNA, 1410 nt, Artificial Sequence
  derived and/or modified CDS sequence (opt4) from neuraminidase__InfluenzaA__ABB86916
augaaccccaaccagaagaucaucaccaucggcagcgugagccugaccaucgccaccaucugcuuccugacccagaucgccauccuggugaccaccgugacccugcacuucaagcaguacgagugcaacagcccccccaacaaccaggugaugcugugcgagcccaccaucaucgagagaaacaucaccgagaucguguaccugaccaacaccaccaucgagaaggagaucugccccaagcuggccgaguacagaaacuggagcaagccccagugcaacaucaccggcuucgcccccuucagcaaggacaacagcaucagacugagcgccggcggcgacaucugggugaccagagagcccuacgugagcugcgaccccgacaagugcuaccaguucgcccugggccagggcaccacccugaacaacggccacagcaacgacaccgugcacgacagaacccccuacagaacccugcugaugaacgagcugggcgugcccuuccaccugggcaccaagcaggugugcaucgccuggagcagcagcagcugccacgacggcaaggccuggcugcacgugugcaucaccggcgacgacaagaacgccaccgccagcuucaucuacaacggcagacugguggacagcaucagcagcuggagcaagaagauccugagaacccaggagagcgagugcgugugcaucaacggcaccugcaccguggugaugaccgacggcagcgccagcggcaaggccgacaccaagauccuguucaucgaggagggcaagaucgugcacaccagccugcugagcggcagcgcccagcacguggaggagugcagcugcuaccccagauaccccggcgugagaugcgugugcagagacaacuggaagggcagcaacagacccaucguggacaucaacgugaaggacuacagcaucgugagcagcuacgugugcagcggccuggugggcgacacccccagaaagaacgacagcagcagcagcagccacugccuggaccccaacaacgaggagggcggccacggcgugaagggcugggccuucgacgacggcaacgacguguggaugggcagaaccaucagcgagaagcugagaagcggcuacgagaccuucaaggugaucgagggcuggagcaagcccaacagcaagcugcagaucaacagacaggugaucguggacagagacaacagaagcggcuacagcggcaucuucagcguggagggcaagagcugcaucaacagaugcuucuacguggagcugaucagaggcagaaaccaggagaccgaggugcuguggaccagcaacagcaucgugguguucugcggcaccagcggcaccuacggcaccggcagcuggcccgacggcgccgacaucaaccugaugcccaucuga

SEQ ID NO: 174624 - RNA, 1410 nt, Artificial Sequence
  derived and/or modified CDS sequence (opt4) from neuraminidase__InfluenzaA__ABB86928
augaaccccaaccagaagaucaucaccaucggcagcgugagccugaccaucgccaccaucugcuuccugaugcagaucgccauccuggugaccaccgugacccugcacuucaagcaguacgagugcaacagcccccccaacaaccaggugaugcugugcgagcccaccaucaucgagagaaacaucaccgagaucguguaccugaccaacaccaccaucgagaaggagaucugccccaagcuggccgaguacagaaacuggagcaagccccagugcaacaucaccggcuucgcccccuucagcaaggacaacagcaucagacugagcgccggcggcgacaucugggugaccagagagcccuacgugagcugcgaccccgacaagugcuaccaguucgcccugggccagggcaccacccugaacaacggccacagcaacgacaccgugcacgacagaacccccuacagaacccugcugaugaacgagcugggcgugcccuuccaccugggcaccagacaggugugcaucgccuggagcagcagcagcugccacgacggcaaggccuggcugcacgugugcaucaccggcgacgacaagaacgccaccgccagcuucaucuacaacggcagacugguggacagcaucggcagcuggagcaagaagauccugagaacccaggagagcgagugcgugugcaucaacggcaccugcaccguggugaugaccgacggcagcgccagcggcaaggccgacaccaagauccuguucaucgaggagggcaagaucgugcacaucagcacccugagcggcagcgcccagcacguggaggagugcagcugcuaccccagauaccccggcgugagaugcgugugcagagacaacuggaagggcagcaacagacccaucguggacaucaacgugaaggacuacagcaucgugagcagcuacgugugcagcggccuggugggcgacacccccagaaagaacgacagcuucagcagcagccacugccugaaccccaacaacgaggagggcggccacggcgugaagggcugggccuucgacgacggcaacgacguguggaugggcagaaccaucagcgagaagcugagaagcggcuacgagaccuucaaggugaucgagggcuggagcaagcccaacagcaagcugcagaucaacagacaggugaucguggagagaggcaacagaagcggcuacagcggcaucuucagcaucgagggcaagagcugcaucaacagaugcuucuacguggagcugaucagaggcagaaaggaggagaccaaggugugguggaccagcaacagcaucgugguguucugcggcaccagcggcaccuacggcaccggcagcuggcccgacggcgccgacaucaaccugaugcccaucuga

SEQ ID NO: 174625 - RNA, 1410 nt, Artificial Sequence
  derived and/or modified CDS sequence (opt4) from neuraminidase__InfluenzaA__ABB86936
augaacaccaaccagagaaucaucaccaucggcaccgugugccugaucgugggcaucaucagccugcugcugcagaucggcaacaucgugagccuguggaucaaccacagcauccagaccgagggcaagaaccacagcgagaugugcaaccagaacgugaucaccuacgugaacaacaccugggugaacagaaccuacgugaacaucagcaacaccaacaucgccaccgugcaggacgugaccagcgugauccuggccggcaacagcagccugugccccgugagcggcugggccaucuacagcaaggacaacagcaucagaaucggcagcaagggcgacaucuucgugaucagagagcccuucaucagcugcagccaccuggagugcagaaccuucuuccugacccagggcgcccugcugaacgacaagcacagcaacggcaccgugagagacagaagccccuacagaacccugaugagcugccccaccggcgaggcccccagccccuacaacagcagauucgagagcguggccuggagcgccagcgccugccacgacggcaugggcuggcugaccaucggcaucagcggccccgacaacggcgccguggccgugcugaaguacaacggcaucaucaccgacaccaucaagagcuggagaaacaagauccugagaacccaggagagcgagugcgugugcaugaacggcagcugcuucaccgugcugaccgacggccccagcaacggccaggccagcuacaagaucuucaagguggagaagggcaagaucaucaagagcaucgagcuggacgcccccaacuaccacuacgaggagugcagcugcuaccccgacaccggcaaggugaugugcgugugcagagacaacuggcacgccagcaacagacccuggaucuacuucgaccagaaccuggacuaccagaucggcuacaucugcagcggcguguucggcgacaaccccagaagcaacgacggcaagggcaacugcggccccgugcugagcaacggcgccaacggcgugaagggcuucagcuucagauacggcaacggcguguggaucggcagaaccaagagcaucaacagcagaagcggcuucgagaugaucugggaccccaacggcuggaccggcaccgacagcagcuucagcaugaagcaggacauccuggccaccaccgacuggagcggcuacagcggcagcuucgugcagcaccccgagcugaccggcaugaacugcaucagacccugcuucuggguggagcugaucagaggccagcccaaggagagcaccaucugggccagcggcagcagcaucagcuucugcggcgugaacagcgagaccgccaacuggagcuggcccgacggcgccgaccugcccuucaccaucgacaaguga

SEQ ID NO: 174626 - RNA, 1410 nt, Artificial Sequence
  derived and/or modified CDS sequence (opt4) from neuraminidase__InfluenzaA__ABB86947
augaacaccaaccagagaaucaucaccaucggcaccgugugccugaucgugggcaucaucagccugcugagccagaucggcaacaucgugagccuguggaucauccacagcauccagaccggcggcaagaaccacagcgagaugugcaaccagaacgugaucaccuacgugaacaacaccugggugaacagaaccuacaucaacaucagcaacaccaacaucgccaccgugaaggacgugaccagcgugauccuggccggcaacagcagccugugccccgugagcggcugggccaucuacagcaaggacaacagcaucagaaucggcagcaagggcgacaucuucgugaucagagagcccuucaucagcugcagccaccuggagugcagaaccuucuuccugacccagggcgcccugcugaacgacaagcacagcaacggcaccgugaaggacagaagccccuacagaacccugaugagcugccccaucggcgaggcccccagccccuacaacagcagauucgagagcguggccuggagcgccagcgccugccacgacggcaugggcuggcugaccaucggcaucagcggccccgacaacggcgccguggccgugcugaaguacaacggcaucaucaccgacaccaucaagagcuggagaaacaagauccugagaacccaggagagcgagugcgugugcaugaacggcagcugcuucaccgugcugaccgacggccccagcaacggccaggccagcuacaagaucuucaagguggagaagggcaagaucaucaagagcaucgagcuggacgcccccaacuaccacuacgaggagugcagcugcuaccccgacgccggcaaggugaugugcgugugcagagacaacuggcacgccagcaacagacccugggugagcuucgaccagaaccuggacuaccagaugggcuacaucugcagcggcguguucggcgacaaccccagaagcaacgacggcaagggcaacugcggccccgugcugagcaacggcgccaacggcgugaagggcuucagcuucagauacggcaacggcguguggaucggcagaaccaagagcaucaacagcagaagcggcuucgagaugaucugggaccccaacggcuggaccggcaccgacagcagcuucagcaugaagcaggacaucaucgcccugaccgacuggagcggcuacagcggcagcuucgugcagcaccccgagcugaccggcaugaacugcaucagacccugcuucuggguggagcugaucagaggccagcccaaggagagcaccaucugggccagcggcagcagcaucagcuucugcggcgugaacagcgagaccgccagcuggagcuggcccgacggcgccgaccugcccuucaccaucgacaaguga

SEQ ID NO: 174627 - RNA, 1410 nt, Artificial Sequence
  derived and/or modified CDS sequence (opt4) from neuraminidase__InfluenzaA__ABB86957
augaacaccaaccagagaaucaucaccgugggcaccgugugccugaucgugggcaucgugagccugcugcugcagaucggcaacaucgugagccuguggaucagccacagcauccagaccggcgagaagaaccacagcgaggugugcaaccagaacaucaucaccuacgagaacaagaccugggugaaccagaccuacgugaacaucagcaacaccaacaucgccgagggccagggcgugaccagcaucaucauggccggcaacagcagccugugccccgugagcggcugggccaucuacagcaaggacaacagcaucagaaucggcagcaagggcgacaucuucgugaucagagagcccuucaucagcugcagccaccuggagugcagaaccuucuuccugacccagggcgcccugcugaacgacagacacagcaacggcaccgugaaggacagaagccccuacagaacccugaugagcugccccaucggcgaggcccccagccccuacaacagcagauucgagagcguggccuggagcgccagcgccugccacgacggcaugggcuggcugaccaucggcaucagcggcagcgacaacgaggccguggccgugcugaaguacaacggcaucaucaccgacaccaucaagagcuggagaaacaagauccugagaacccaggagagcgagugcgugugcaucaacggcagcugcuucaccaucaugaccgacggccccagcaacggccaggccagcuacaagaucuucaagauggagaagggcaagaucaucaagagcguggagcuggaggcccccaacuaccacuacgaggagugcagcugcuaccccgacaccggcaagguggugugcgugugcagagacaacuggcacgccagcaacagacccugggugagcuucaaccagaaccuggacuaccagaucggcuacaucugcagcggcguguucggcgacaaccccagaagcaacgacggcaagggcaacugcggccccgugcccagcaacggcgccaacggcgugaagggcuucagcuucagauacggcaacggcguguggaucggcagaaccaagagcaucuucagcagaagcggcuucgagaugaucugggaccccaacggcuggaccgagaccgacagcagcuucagcaucaagcaggacaucaucgcccugaccgacuggagcggcuacagcggcagcuucgugcagcaccccgagcugaccggcaugaacugcaucagacccugcuucuggguggagcugaucagaggccagcccaaggagagcaccaucuggaccagcggcagcagcaucagcuucugcggcguggacagcgagaccgccagcuggagcuggcccgacggcgccgaccugcccuucaccaucgacaaguga

SEQ ID NO: 174628 - RNA, 1410 nt, Artificial Sequence
  derived and/or modified CDS sequence (opt4) from neuraminidase__InfluenzaA__ABB96333
augaaccccaaccagaagaucaucaccaucggcagcgugagccugaccaucgccaccaucugcuuccugaugcagaucgccauccuggugaccaccgugacccugcacuucaagcaguacgacugcgacagccccgccaacaaccaggugaugcccugcgagcccaucaucaucgagagaaacaucaccgagaucguguaccugaccaacaccaccaucgagaaggagaucugccccaagcugguggaguacagaaacuggagcaagccccagugcaagaucaccggcuucgcccccuucagcaaggacaacagcaucagacugagcgccggcggcgacaucugggugaccagagagcccuacgugagcugcgaccccggcaagugcuaccaguucgcccugggccagggcaccacccuggacaacaagcacagcaacgacaccauccacgacagaaccccccacagaacccugcugaugaacgagcugggcgugcccuuccaccugggcaccagacaggugugcaucgccuggagcagcagcagcugccacgacggcaaggccuggcugcacgugugcgugaccggcuacgacaagaacgccaccgccagcuucaucuacgacggcagacugguggacagcaucggcagcuggagcaagaacauccugagaacccaggagagcgagugcgugugcaucaacggcaccugcaccguggugaugaccgacggcagcgccagcgagagagccgacaccaagauccuguucaucgaggagggcaagaucgugcacaucagcccccugagcggcagcgcccagcacguggaggagugcagcugcuaccccagauaccccggcgugagaugcgugugcagagacaacuggaagggcagcaacagacccgugguggacaucaacgugaaggacuacagcaucgccagcagcuacgugugcagcggccuggugggcgacacccccagaaagaacgacagauacagcagcagcuacugcagaaaccccaacaacgagaagggcaaccacggcgugaagggcugggccuucgacgacggcaacgacguguggaugggcagaaccaucagcgacgagagcagaagcggcuacgagaccuucaaggugaucggcggcuggagcacccccaacagcaagcugcagaucaacagacaggugaucguggacagcgacaacagaagcggcuacagcggcaucuucagcguggagggcaagagcugcaucaacagaugcuucuacguggagcugaucagaggcagagagcaggagaccagagugugguggaccagcaacagcaucgugguguucugcggcaccagcggcaccuacggcaccggcagcuggcccgacggcgccgacaucaaccugaugcccaucuga

SEQ ID NO: 174629 - RNA, 1410 nt, Artificial Sequence
  derived and/or modified CDS sequence (opt4) from neuraminidase__InfluenzaA__ABB96344
augaaccccaaccagaagaucaucaccaucggcagcgugagccugaccaucgccaccaucugcuuccugaugcagaucgccauccuggugaccaccgugacccugcacuucaagcaguacgagugcgacagccccgccaacaaccaggugaugcccugcgagcccaucaucaucgagagaaacaucaccgagaucguguaccugaccaacaccaccaucgagaaggagaucugccccaagcugguggaguacagaaacuggagcaagccccagugcaagaucaccggcuucgcccccuucagcaaggacaacagcaucagacugagcgccggcggcgacaucugggugaccagagagcccuacgugagcugcgaccccggcagaugcuaccaguucgcccugggccagggcaccacccuggacaacaagcacagcaacgacaccauccacgacagaaccccccacagaacccugcugaugaacgagcugggcgugcccuuccaccugggcaccagacaggugugcaucgccuggagcagcagcagcugccacgacggcaaggccuggcugcacgugugcgugaccggcuacgacaagaacgccaccgccagcuucaucuacgacggcagacugguggacagcaucggcagcuggagcaagaacauccugagaacccaggagagcgagugcgugugcaucaacggcaccugcaccguggugaugaccgacggcagcgccagcgagagagccgacaccaaggugcuguucaucgaggagggcaagaucgugcacaucagcccccugagcggcagcgcccagcacguggaggagugcagcugcuaccccagauaccccggcgugagaugcgugugcagagacaacuggaagggcagcaacagacccgugguggacaucaacgugaaggacuacagcaucgccagcagcuacgugugcagcggccuggugggcgacacccccagaaagaacgacagauacagcagcagcuacugcagaaaccccaacaacgagaagggcaaccacggcgugaagggcugggccuucgacgacggcaacgacguguggaugggcagaaccaucagcgacgagagcagaagcggcuacgagaccuucaaggugaucggcggcuggagcacccccaacagcaagcugcagaucaacagacaggugaucguggacagcgacaacagaagcggcuacagcggcaucuucagcguggagggcaagagcugcaucaacagaugcuucuacguggagcugaucagaggcagagagcaggagaccagagugugguggaccagcaacagcaucgugguguucugcggcaccagcggcaccuacggcaccggcagcuggcccgacggcgccgacaucaaccugaugcccaucuga

SEQ ID NO: 174630 - RNA, 1410 nt, Artificial Sequence
  derived and/or modified CDS sequence (opt4) from neuraminidase__InfluenzaA__ABB96398
augaaccccaaccagaagaucaucaccaucggcagcgugagccugaccaucgccaccaucugcuuccugaugcagaucgccauccuggugaccaccgugacccugcacuucaagcaguacgagugcgacagccccgccaacaaccaggugaugcccugcgagcccaucaucaucgagagaaacaucaccgagaucguguaccugaccaacaccaccaucgagaaggagaccugccccaagcugguggaguacagaaacuggagcaagccccagugcaagaucaccggcuucgcccccuucagcaaggacaacagcaucagacugagcgccggcggcgacaucugggugaccagagagcccuacgugagcugcgaccccggcaagugcuaccaguucgcccugggccagggcaccacccuggacaacaagcacagcaacgacaccauccacgacagaacccccuacagaacccugcugaugaacgagcugggcgugcccuuccaccugggcaccagacaggugugcaucgccuggagcagcagcagcugccacgacggcaaggccuggcugcacgugugcgugaccggcuacgacaagaacgccaccgccagcuucaucuacgacggcagacugguggacagcaucggcagcuggagcaagaacauccugagaacccaggagagcgagugcgugugcaucaacggcaccugcaccguggugaugaccgacggcagcgccagcgagagagccgacaccaagauccuguucaucgaggagggcaagaucgugcacaucagcccccugagcggcagcgcccagcacguggaggagugcagcugcuaccccagauaccccggcgugagaugcgugugcagagacaacuggaagggcagcaacagacccgugguggacaucaacgugaaggacuacagcaucgccagcagcuacgugugcagcggccuggugggcgacacccccagaaagaacgacagaagcagcagcagcuacugcagaaaccccaacaacgagaagggcaaccacggcgugaagggcugggccuucgacgacggcaacgacguguggaugggcagaaccaucagcgaggagagcagaagcggcuacgagaccuucaaggugaucggcggcuggagcacccccaacagcaagcugcagaucaacagacaggugaucguggacagcgacaacagaagcggcuacagcggcaucuucagcguggagggcaagagcugcaucaacagaugcuucuacguggagcugaucagaggcagagagcaggagaccagagugugguggaccagcaacagcaucgugguguucugcggcaccagcggcaccuacggcaccggcagcuggcccgacggcgccgacaucaaccugaugcccaucuga

SEQ ID NO: 174631 - RNA, 1410 nt, Artificial Sequence; identical to SEQ ID NO: 174442
  derived and/or modified CDS sequence (opt4) from neuraminidase__InfluenzaA__ABB96490

SEQ ID NO: 174632 - RNA, 1410 nt, Artificial Sequence
  derived and/or modified CDS sequence (opt4) from neuraminidase__InfluenzaA__ABB96501
augaaccccaaccagaagaucaucaccaucggcagcgugagccugaccaucgccaccaucugcuuccugaugcagaucgccauccuggugaccaccgugacccugcacuucaagcaguacgagugcagcagcccccccaacaaccaggugaugcccugcgagcccaucaucaucgagagaaacaucaccgagaucguguaccugaccaacaccaccaucgagaaggagaucugccccaagcugguggaguacagaaacuggagcaagccccagugcaagaucaccggcuucgcccccuucagcaaggacaacagcaucagacugagcgccggcggcgacaucugggugaccagagagcccuacgugagcugcgaccccagcaagugcuaccaguucgcccugggccagggcaccacccuggacaacaagcacagcaacgacaccauccacgacagaaccccccacagaacccugcugaugaacgagcugggcgugcccuuccaccugggcaccagacaggugugcaucgccuggagcagcagcagcugccacgacggcaaggccuggcugcacgugugcgugaccggcuacgacaagaacgccaccgccagcuucaucuacgacggcagacugguggacagcaucggcagcuggagcaagaacauccugagaacccaggagagcgagugcgugugcaucaacggcaccugcaccguggugaugaccgacggcagcgccagcgagagagccgacaccaagauccuguucaucgaggagggcaagaucgugcacaucagcccccugagcggcagcgcccagcacguggaggagugcagcugcuaccccagauaccccggcgugagaugcgugugcagagacaacuggaagggcagcaacagacccgugguggacaucaacgugaaggacuacagcaucgugagcagcuacgugugcagcggccuggugggcgacacccccagaaagaacgacagaagcagcagcagcuacugcagaaaccccaacaacgagaagggcaaccacggcgugaagggcugggccuucgacgacggcaacgacguguggaugggcagaaccaucagcgaggagagcagaagcggcuacgagaccuucaaggugaucggcggcuggagcacccccaacagcaagagccagaucaacagacaggugaucguggacagcggcaacagaagcggcuacagcggcaucuucagcguggagggcaagagcugcaucaacagaugcuucuacguggagcugaucagaggcagagagcaggagaccagagugugguggaccagcaacagcaucgugguguucugcggcaccagcggcaccuacggcaccggcagcuggcccgacggcgccgacaucaaccugaugcccaucuga

SEQ ID NO: 174633 - RNA, 1410 nt, Artificial Sequence
  derived and/or modified CDS sequence (opt4) from neuraminidase__InfluenzaA__ABB96534
augaaccccaaccagaagaucaucaccaucggcagcgugagccugaccaucgccaccaucugcuuccugaugcagaucgccauccuggugaccaccgugacccugcacuucaagcaguacgagugcagcagcccccccaacaaccaggugaugcugugcgagcccaccaucaucgagagaaacaucaccgagaucguguaccugaccaacaccaccaucgagaaggagaucugccccaagcuggccgaguacagaaacuggagcaagccccagugcaagaucaccggcuucgcccccuucagcaaggacaacagcaucagacugagcgccggcggcgacaucugggugaccagagagcccuacgugagcugcgaccccgacaagugcuaccaguucgcccugggccagggcaccacccugaacaacagacacagcaacgacaccgugcacgacagaacccccuacagaacccugcugaugaacgagcugggcgugcccuuccaccugggcaccaagcaggugugcaucgccuggagcagcagcagcugccacgacggcaaggccuggcugcacgugugcgugaccggccacgacgagaacgccaccgccagcuucaucuacgacggcagacugguggacagcaucggcagcuggagcaagaagauccugagaacccaggagagcgagugcgugugcaucaacggcaccugcaccguggugaugaccgacggcagcgccagcggcagagccgacaccaagauccuguucaucgaggagggcaagaucgugcacaucagcccccugagcggcagcgcccagcacguggaggagugcagcugcuaccccagauaccccggcgugagaugcgugugcagagacaacuggaagggcagcaacagacccaucguggacaucaacgugaaggacuacagcaucgugagcagcuacgugugcagcggccuggugggcgacacccccagaaagaacgacagcagcagcagcagccacugccugaaccccaacaacgaggagggcggccacggcgugaagggcugggccuucgacgacggcaacgacguguggaugggcagaaccaucagcgagaaguucagaagcggcuacgagaccuucaaggugaucgagggcuggagcaagcccaacagcaagcugcagaucaacagacaggugaucguggacagaggcaacagaagcggcuacagcggcaucuucagcguggagggcaagagcugcaucaacagaugcuucuacguggagcugaucagaggcagaaagcaggagaccgaggugugguggaccagcaacagcaucgugguguucugcggcaccagcggcaccuacggcaccggcagcuggcccgacggcgccgacaucaaccugaugcccaucuga

SEQ ID NO: 174634 - RNA, 1410 nt, Artificial Sequence
  derived and/or modified CDS sequence (opt4) from neuraminidase__InfluenzaA__ABC02237
augaaccccaaccagaagaucaucaccaucggcagcgugagccugaccaucgccaccaucugcuuccugaugcagaucgccauccuggugaccaccgugacccugcacuucaagcaguacgagugcagcagcccccccaacaaccaggugaugcugugcgagcccaccaucaucgagagaaacaucaccgagaucguguaccugaccaacaccaccaucgagaaggagaucugccccaagcuggccgaguacagaaacuggagcaagccccagugcaagaucaccggcuucgcccccuucagcaaggacaacagcaucagacugagcgccggcggcgacaucugggugaccagagagcccuacgugagcugcgaccccgacaagugcuaccaguucgcccugggccagggcaccacccugaacaacagacacagcaacgacaccgugcacgacagaacccccuacagaacccugcugaugaacgagcugggcgugcccuuccaccugggcaccaagcaggugugcaucgccuggagcagcagcagcugccacgacggcaaggccuggcugcacgugugcgugaccggccacgacgagaacgccaccgccagcuucaucuacgacggcagacugguggacagcaucggcagcuggagcaagaagauccugagaacccaggagagcgagugcgugugcaucaacggcaccugcaccguggugaugaccgacggcagcgccagcggcagagccgacaccaagauccuguucaucgaggagggcaagaucgugcacaucagccagcugagcggcagcgcccagcacguggaggagugcagcugcuaccccagauaccccggcgugagaugcgugugcagagacaacuggaagggcagcaacagacccaucguggacaucaacaucaaggacuacagcaucgugagcagcuacgugugcagcggccuggugggcgacacccccagaaagaacgacagcagcagcagcagccacugccugaaccccaacaacgaggagggcggccacggcgugaagggcugggccuucgacgacggcaacgacguguggaugggcagaaccaucagcgagaaguucagaagcggcuacgagaccuucaaggugaucgagggcuggagcaagcccaacagcaagcugcagaucaacagacaggugaucguggacagaggcaacagaagcggcuacagcggcaucuucagcguggagggcaagagcugcaucaacagaugcuucuacguggagcugaucagaggcagaaagcaggagaccgaggugugguggaccagcaacagcaucguggccuucugcggcaccagcggcaccuacggcaccggcagcuggcccgacggcgccgacaucaaccugaugcccaucuga

SEQ ID NO: 174635 - RNA, 1410 nt, Artificial Sequence
  derived and/or modified CDS sequence (opt4) from neuraminidase__InfluenzaA__ABC02258
augaaccccaaccagaagaucaucaccaucggcagcgugagccugaccaucgccaccaucugcuuccugaugcagaucgccauccuggugaccaccgugacccugcacuucaagcaguacgagugcgacagccccgccaacaaccagaucaugcccugcgagcccaccaucaucgagagaaacaucaccgagaucguguaccugaccaacaucaccaucgagaaggagaucugccccaagcugguggaguacagaaacuggagcaagccccagugcaagaucaccggcuucgcccccuucagcaaggacaacagcaucagacugagcgccggcggcgacaucugggugaccagagagcccuacgugagcugcgaccccagcaagugcuaccaguucgcccugggccagggcaccacccuggacaacaagcacagcaacgacaccauccacgacagaaccccccacagaacccugcugaugaacgagcugggcgugcccuuccaccugggcaccagacaggugugcaucgccuggagcagcagcagcugccacgacggcaaggccuggcugcacgugugcgugaccggcuacgacaagaacgccaccgccagcuucaucuacgacggcagacugguggacagcaucggcagcuggagccagaacauccugagaacccaggagagcgagugcgugugcaucaacggcaccugcaccguggugaugaccgacggcagcgccagcggcagagccgacaccaagauccuguucaucgaggagggcaagaucgugcacaucagcccccugagcggcagcgcccagcacguggaggagugcagcugcuaccccagauaccccggcgugagaugcaucugcagagacaacuggaagggcagcaacagacccgugguggacaucaacgugaaggacuacagcaucgacagcagcuacgugugcagcggccuggugggcgacacccccagaaagaacgacagaagcagcaacagcuacugcagaaaccccaacaacgagaagggcaaccacggcgugaagggcugggccuucgacgacggcaacgacguguggaugggcagaaccaucagcgaggacagcagaagcggcuacgagaccuucaaggugaucggcggcuggagcacccccaacagcaagcugcagaucaacagacaggugaucguggacagcgacaacagaagcggcuacagcggcaucuucagcguggagggcaagagcugcaucaacagaugcuucuacguggagcugaucagaggcagagagcaggagaccagagugugguggaccagcaacagcaucgugguguucugcggcaccagcggcaccuacggcgccggcagcuggcccgacggcgccgacaucaaccugaugcccaucuga

SEQ ID NO: 174636 - RNA, 1410 nt, Artificial Sequence
  derived and/or modified CDS sequence (opt4) from neuraminidase__InfluenzaA__ABC02269
augaaccccaaccagaagaucaucaccaucggcagcgugagccugaccaucgccaccaucugcuuccugaugcagaucgccauccuggugaccaccgugacccugcacuucaagcaguacgagugcgacagccccgccaacaaccaggugaugcccugcgagcccaucaucaucgagagaaacaucaccgagaucguguaccugaccaacaccaccaucgagaaggagaucugccccaagcugguggaguacagaaacuggagcaagccccagugcaagaucaccggcuucgcccccuucagcaaggacaacagcaucagacugagcgccggcggcgacaucugggugaccagagagcccuacgugagcugcgaccccggcaagugcuaccaguucgcccugggccagggcaccacccuggacaacaagcacagcaacgacaccauccacgacagaaccccccacagaacccugcugaugaacgagcugggcgugcccuuccaccugggcaccagacaggugugcaucgccuggagcagcagcagcugccacgacggcaaggccuggcugcacgugugcgugaccggcuacgacaagaacgccaccgccagcuucaucuacgacggcagacugguggacagcaucggcagcuggagccagaacauccugagaacccaggagagcgagugcgugugcaucaacggcaccugcaccguggugaugaccgacggcagcgccagcggcagagccgacaccaagauccuguucaucgaggagggcaagaucgugcacaccagcccccugagcggcagcgcccagcacguggaggagugcagcugcuaccccagauaccccggcgugagaugcaucugcagagacaacuggaagggcagcaacagacccgugguggacaucaacgugaaggacuacagcaucgacagcagcuacgugugcagcggccuggugggcgacacccccagaaacaacgacagaagcagcagcagcuacugcagaaaccccaacaacgagaagggcacccacggcgugaagggcugggccuucgacgacggcaacgacguguggaugggcagaaccaucagcgaggacagcagaagcggcuacgagaccuucaaggugaucggcggcuggagcacccccaacagcaagcugcagaucaacagacaggugaucguggacagcgacaacagaagcggcuacagcggcaucuucagcguggagggcaagagcugcaucaacagaugcuucuacguggagcugaucagaggcagagagcaggagaccagagugugguggaccagcaacagcaucgugguguucugcggcaccagcggcaccuacggcaccggcagcuggcccgacggcgccgacaucaaccugaugcccaucuga

SEQ ID NO: 174637 - RNA, 1413 nt, Artificial Sequence
  derived and/or modified CDS sequence (opt4) from neuraminidase__InfluenzaA__ABC02280
augaaccccaaccagaagaucaucaccaucggcagcaucagcaucgccaucggcaucaucagccugaugcugcagaucggcaacaucaucagcaucugggccagccacagcauccagaccggcagccagaaccacaccggcgugugcaaccagagaaucaucaccuacgagaacagcaccugggugaaccacaccuacgugaacaucaacaacaccaacgugaucgccggcaaggacaagaccagcgugacccuggccggcaacagcagccugugcagcaucagcggcugggccaucuacaccaaggacaacagcaucagaaucggcagcaagggcgacguguucgugaucagagagcccuucaucagcugcagccaccuggagugcagaaccuucuuccugacccagggcagccugcugaacgacaagcacagcaacggcaccgugaaggacagaagccccuacagagcccugaugagcugcccccugggcgaggcccccagccccuacaacagcaaguucgagagcguggccuggagcgccagcgccugccacgacggcaugggcuggcugaccaucggcaucagcggccccgacaacggcgccguggccgugcugaaguacaacggcaucaucaccgagaccaucaagagcuggaagaagcagauccugagaacccaggagagcgagugcgugugcgugaacggcagcugcuucaccaucaugaccgacggccccagcaacggcgccgccagcuacaagaucuucaagaucgagaagggcaaggugaccaagagcaucgagcugaacgcccccaacuuccacuacgaggagugcagcugcuaccccgacaccggcaccgugaugugcgugugcagagacaacuggcacggcagcaacagacccugggugagcuucaaccagaaccuggacuaccagaucggcuacaucugcagcggcguguucggcgacaaccccagacccaaggacggcgagggcagcugcaaccccgugaccguggacggcgccaacggcgugaagggcuucagcuacaaguacggcaacggcguguggaucggcagaaccaagagcaacagacugagaaagggcuucgagaugaucugggaccccaacggcuggaccgacaccgacagcgacuucagcgugaagcaggacgugguggccaucaccgacuggagcggcuacagcggcagcuucgugcagcaccccgagcugaccggccuggacugcaucagacccugcuucuggguggagcuggugagaggccugcccaaggagaacaccaccaucuggaccagcggcagcagcaucagcuucugcggcgugaacagcgacaccgccaacuggagcuggcccgacggcgccgagcugcccuucaccaucgacaaguga

SEQ ID NO: 174638 - RNA, 1410 nt, Artificial Sequence; identical to SEQ ID NO: 174633
  derived and/or modified CDS sequence (opt4) from neuraminidase__InfluenzaA__ABC02302

SEQ ID NO: 174639 - RNA, 1410 nt, Artificial Sequence; identical to SEQ ID NO: 174630
  derived and/or modified CDS sequence (opt4) from neuraminidase__InfluenzaA__ABC02313

SEQ ID NO: 174640 - RNA, 1410 nt, Artificial Sequence; identical to SEQ ID NO: 174635
  derived and/or modified CDS sequence (opt4) from neuraminidase__InfluenzaA__ABC02324

SEQ ID NO: 174641 - RNA, 1410 nt, Artificial Sequence
  derived and/or modified CDS sequence (opt4) from neuraminidase__InfluenzaA__ABC02335
augaaccccaaccagaagaucaucaccaucggcagcgugagccugaccaucgccaccaucugcuuccugaugcagaucgccauccuggugaccaccgugacccugcacuucaagcaguacgagugcgacagccccgccaacaaccaggugaugcccugcgagcccaucaucaucgagagaaacaucaccgagaucguguaccugaccaacaccaccaucgagaaggagaucugccccaagcugguggaguacagaaacuggagcaagccccagugcaagaucaccggcuucgcccccuucagcaaggacaacagcaucagacugagcgccggcggcgacaucugggugaccagagagcccuacgugagcugcgaccccggcaagugcuaccaguucgcccugggccagggcaccacccuggacaacaagcacagcaacgacaccauccacgacagaaccccccacagaacccugcugaugaacgagcugggcgugcccuuccaccugggcaccagacaggugugcaucgccuggagcagcagcagcugccacgacggcaaggccuggcugcacgugugcgugaccggcuacgacaagaacgccaccgccagcuucaucuacgacggcagacugguggacagcaucggcagcuggagccagaacauccugagaacccaggagagcgagugcgugugcaucaacggcaccugcaccguggugaugaccgacggcagcgccagcggcagagccgacaccaagauccuguucaucaaggagggcaagaucgugcacaucagcccccugagcggcagcgcccagcacguggaggagugcagcugcuaccccagauaccccggcgugagaugcaucugcagagacaacuggaagggcagcaacagacccgugguggacaucaacgugaaggacuacagcaucgacagcagcuacgugugcagcggccuggugggcgacacccccagaaacaacgacagaagcagcaacagcuacugcagaaaccccaacaacgagaagggcaaccacggcgugaagggcugggccuucgacgacggcaacgacguguggaugggcagaaccaucagcgaggacagcagaagcggcuacgagaccuucaaggugaucggcggcuggagcacccccaacagcaagcugcagaucaacagacaggugaucguggacagcgacaacagaagcggcuacagcggcaucuucagcguggagggcaagagcugcaucaacagaugcuucuacguggagcugaucagaggcagagagcaggagaccagagugugguggaccagcaacagcaucgugguguucugcggcaccagcggcaccuacggcaccggcagcuggcccgacggcgccgacaucaaccugaugcccaucuga

SEQ ID NO: 174642 - RNA, 1410 nt, Artificial Sequence
  derived and/or modified CDS sequence (opt4) from neuraminidase__InfluenzaA__ABC39808
augaaccccaaccagaagaucaucaccaucggcagcgugagccugaccaucgccaccaucugcuuccugaugcagaucgccauccuggugaccaccgugacccugcacuucaagcaguacgagugcagcagcccccccaacaaccaggugaugcccugcgagcccaucaucaucgagagaaacaucaccgagaucguguaccugaccaacaccaccaucgagaaggagaucugccccaagcugguggaguacagaaacuggagcaagccccagugcaagaucaccggcuucgcccccuucagcaaggacaacagcaucagacugagcgccggcggcgacaucugggugaccagagagcccuacgugagcugcgaccccagcaagugcuaccaguucgcccugggccagggcaccacccuggacaacaagcacagcaacgacaccauccacgacagaaccccccacagaacccugcugaugaacgagcugggcgugcccuuccaccugggcaccagacaggugugcaucgccuggagcagcagcagcugccacgacggcaaggccuggcugcacgugugcgugaccggcuacgacaagaacgccaccgccagcuucaucuacgacggcagacugguggacagcaucggcagcuggagcaagaacauccugagaacccaggagagcgagugcgugugcaucaacggcaccugcaccguggugaugaccgacggcagcgccagcgagagagccgacaccaagauccuguucaucgaggagggcaagaucgugcacaucagcccccugagcggcagcgcccagcacguggaggagugcagcugcuaccccagauaccccggcgugagaugcgugugcagagacaacuggaagggcagcaacagacccgugguggacaucaacgugaaggacuacagcaucgugagcagcuacgugugcagcggccuggugggcgacacccccagaaagaacgacagaagcagcagcagcuacugcagaaaccccaacaacgagaagggcgaccacggcgugaagggcugggccuucgacgacggcaacgacguguggaugggcagaaccaucagcgaggagagcagaagcggcuacgagaccuucaaggugaucggcggcuggagcacccccaacagcaagagccagaucaacagacaggugaucguggacagcggcaacagaagcggcuacagcggcaucuucagcguggagggcaagagcugcaucaacagaugcuucuacguggagcugaucagaggcagaaagcaggagaccagagugugguggaccagcaacagcaucgugguguucugcggcaccagcggcaccuacggcaccggcagcuggcccgacggcgccgacaucaaccugaugcccaucuga

SEQ ID NO: 174643 - RNA, 1410 nt, Artificial Sequence; identical to SEQ ID NO: 174442
  derived and/or modified CDS sequence (opt4) from neuraminidase__InfluenzaA__ABC40525

SEQ ID NO: 174644 - RNA, 1413 nt, Artificial Sequence
  derived and/or modified CDS sequence (opt4) from neuraminidase__InfluenzaA__ABC40536
augaaccccaaccagaagaucaucaccaucggcagcaucagcaucgccaucggcaucaucagccugaugcugcagaucggcaacaucaucagcaucugggccagccacagcauccagaccggcagccagaaccacaccggcgugugcaaccagagaaucaucaccuacgagaacagcaccugggugaaccacaccuacgugaacaucaacaacaccaacgugaucgccggcaaggacaagaccagcgugacccuggccggcaacagcagccugugcagcaucagcggcugggccaucuacaccaaggacaacagcaucagaaucggcagcaagggcgacguguucgugaucagagagcccuucaucagcugcagccaccuggagugcagaaccuucuuccugacccagggcgcccugcugaacgacaagcacagcaacggcaccgugaaggacagaagccccuacagagcccugaugagcugcccccugggcgaggcccccagccccuacaacagcaaguucgagagcguggccuggagcgccagcgccugccacgacggcaugggcuggcugaccaucggcaucagcggccccgacaacggcgccguggccgugcugaaguacaacggcaucaucaccgagaccaucaagagcuggaagaagcagauccugagaacccaggagagcgagugcgugugcgugaacggcagcugcuucaccaucaugaccgacggccccagcaacggcgccgccagcuacaagaucuucaagaucgagaagggcaaggugaucaagagcaucgagcugaacgcccccaacuuccacuacgaggagugcagcugcuaccccgacaccggcaccgugaugugcgugugcagagacaacuggcacggcagcaacagacccugggugagcuucaaccagaaccuggacuaccagaucggcuacaucugcagcggcguguucggcgacaaccccagacccaaggacggcgagggcagcugcaaccccgugaccguggacggcgccaacggcgugaagggcuucagcuacaaguacggcaacggcguguggaucggcagaaccaagagcaacagacugagaaagggcuucgagaugaucugggaccccaacggcuggaccgacaccgacagcgacuucagcgugaagcaggacgugguggccaucaccgacuggagcggcuacagcggcagcuucgugcagcaccccgagcugaccggccuggacugcaucagacccugcuucuggguggagcuggugagaggccugcccaaggagaacaccaccaucuggaccagcggcagcagcaucagcuucugcggcgugaacagcgacaccgccaacuggagcuggcccgacggcgccgagcugcccuucaccaucgacaaguga

SEQ ID NO: 174645 - RNA, 1410 nt, Artificial Sequence; identical to SEQ ID NO: 174636
  derived and/or modified CDS sequence (opt4) from neuraminidase__InfluenzaA__ABC40547

SEQ ID NO: 174646 - RNA, 1410 nt, Artificial Sequence
  derived and/or modified CDS sequence (opt4) from neuraminidase__InfluenzaA__ABC40558
augaaccccaaccagaagaucaucaccaucggcagcgugagccugaccaucgccaccaucugcuuccugaugcagaucgccauccuggugaccaccgugacccugcacuucaagcaguacgagugcagcagcccccccaacaaccaggugaugcccugcgagcccaucaucaucgagagaaacaucaccgagaucguguaccugaccaacaccaccaucgagaaggagaucugccccaagcugguggaguacagaaacuggagcaagccccagugcaagaucaccggcuucgcccccuucagcaaggacaacagcaucagacugagcgccggcggcgacaucugggugaccagagagcccuacgugagcugcgaccccggcaagugcuaccaguucgcccugggccagggcaccacccuggacaacaagcacagcaacgacaccauccacgacagaacccccuacagaacccugcugaugaacgagcugggcgugcccuuccaccugggcaccagacaggugugcaucgccuggagcagcagcagcugccacgacggcaaggccuggcugcacgugugcgugaccggccacgacaagaacgccaccgccagcuucaucuacgacggcagacugguggacagcaucggcagcuggagcaagagcauccugagaacccaggagagcgagugcgugugcaucaacggcaccugcaccguggugaugaccgacggcagcgccagcgagagagccgacaccaagauccuguucaucgaggagggcaagaucgugcacaucagcccccugagcggcagcgcccagcacguggaggagugcagcugcuaccccagauaccccggcgugagaugcgugugcagagacaacuggaagggcagcaacagacccgugguggacaucaacgugaaggacuacagcaucgugagcagcuacgugugcagcggccuggugggcgacacccccagaaagaacgacagaagcagcagcagcuacugccagaaccccaacaacgagaagggcaaccacggcgugaagggcugggccuucgacgacggcaacgacguguggaugggcagaaccaucagcgaggagagcagaagcggcuacgagaccuucaaggugaucggcggcuggagcacccccaacagcaagcugcagaucaacagacaggugaucguggacaucgacaacagaagcggcuacagcggcaucuucagcguggagggcaagagcugcaucaacagaugcuucuacguggagcugaucagaggcagagagcaggagaccagagugugguggaccagcaacagcaucgugguguucugcggcaccagcggcaccuacggcaccggcagcuggcccgacggcgccgacaucaaccugaugcccaucuga

SEQ ID NO: 174647 - RNA, 1410 nt, Artificial Sequence
  derived and/or modified CDS sequence (opt4) from neuraminidase__InfluenzaA__ABC40611
augaaccccaaccagaagaucaucaccaucggcagcaucagccugaccaucgccaccaucugcuuccugaugcagaucgccauccuggugaccaccgugacccugcacuucaagcaguacgagugcaacagccugcccaacaaccaggugaugcugugcgagcccaccaucaucgagagaaacaucaccgagaucguguaccugaccaacaccaccaucgagaaggagaucugccccaagcuggccgaguacagaaacuggagcaagccccagugcaagaucaccggcuucgcccccuucagcaaggacaacagcaucagacugagcgccggcggcgacaucugggugaccagagagcccuacgugagcugcgaccccgacaagugcuaccaguucgcccugggccagggcaccacccugaacaacagacacagcaacgacaccgugcacgacagaacccccuacagaacccugcugaugaacgagcugggcgugcccuuccaccugggcaccaagcaggugugcaucgccuggagcagcagcagcugccacgacggcaaggccuggcugcacgugugcgugaccggccacgacgagaacgccaccgccagcuucaucuacgacggcagacugguggacagcaucggcagcuggagcaagaagauccugagaacccaggagagcgagugcgugugcaucaacggcaccugcaccguggugaugaccgacggcagcgccagcggcagagccgacaccaagauccuguucaucgaggagggcaagaucauccacaucagccagcugagcggcagcgcccagcacguggaggagugcagcugcuaccccagauaccccggcgugagaugcgugugcagagacaacuggaagggcagcaacagacccaucguggacaucaacgugaaggacuacagcaucgugagcagcuacgugugcagcggccuggugggcgacacccccagaaagaacgacagcagcagcagcagccacugccugaaccccaacaacgaggagggcggccacggcgugaagggcugggccuucgacgacggcaacgacguguggaugggcagaaccaucagcgagaaguucagaagcggcuacgagaccuucaaggugaucgagggcuggagcaagcccaacagcaagcugcagaucaacagacaggugaucguggacagagacaacagaagcggcuacagcggcaucuucagcguggagggcaagagcugcaucaacagaugcuucuacguggagcugaucagaggcagaaagcaggagaccgaggugugguggaccagcaacagcaucgugguguucugcggcaccagcggcaccuacggcaccggcagcuggcccgacggcgccgacaucaaccugaugcccaucuga

SEQ ID NO: 174648 - RNA, 1410 nt, Artificial Sequence
  derived and/or modified CDS sequence (opt4) from neuraminidase__InfluenzaA__ABC40622
augaaccccaaccagaagaucaucaccaucggcagcgugagccugaccaucgccaccaucugcuuccugaugcagaucgccauccuggugaccaccgugacccugcacuucaagcaguacgagugcgacagccccgccaacaaccaggugaugcccugcgagcccaucaucaucgagagaaacaucaccgagaucguguaccugaccaacaccaccaucgagaaggagaucugccccaagcugguggaguacagaaacuggagcaagccccagugcaagaucaccggcuucgcccccuucagcaaggacaacagcaucagacugagcgccggcggcgacaucugggugaccagagagcccuacgugagcugcgaccccggcaagugcuaccaguucgcccugggccagggcaccacccuggacaacaagcacagcaacgacaccauccacgacagaaccccccacagaacccugcugaugaacgagcugggcgugcccuuccaccugggcaccagacaggugugcaucgccuggagcagcagcagcugccacgacggcaaggccuggcugcacgugugcgugaccggcuacgacaagaacgccaccgccagcuucaucuacgacggcagacugguggacagcaucggcagcuggagccagaacauccugagaacccaggagagcgagugcgugugcaucaacggcaccugcaccguggugaugaccgacggcaacgccagcggcagagccgacaccaagauccuguucaucgaggagggcaagaucgugcacaucagcccccugagcggcagcgcccagcacguggaggagugcagcugcuaccccagauaccccggcgugagaugcaucugcagagacaacuggaagggcagcaacagacccgugguggacaucaacgugaaggacuacagcaucgacagcagcuacgugugcagcggccuggugggcgacacccccagaaacaacgacagaagcagcaacagcuacugcagaaaccccaacaacgagaagggcaaccacggcgugaagggcugggccuucgacgacggcaacgacguguggaugggcagaaccaucagcgaggacagcagaagcggcuacgagaccuucaaggugaucggcggcuggagcacccccaacagcaagcugcagaucaacagacaggugaucguggacagcgacaacagaagcggcuacagcggcaucuucagcguggagggcaagagcugcaucaacagaugcuucuacguggagcugaucagaggcagagagcaggagaccagagugugguggaccagcaacagcaucgugguguucugcggcaccagcggcaccuacggcaccggcagcuggcccgacggcgccgacaucaaccugaugcccaucuga

SEQ ID NO: 174649 - RNA, 1410 nt, Artificial Sequence
  derived and/or modified CDS sequence (opt4) from neuraminidase__InfluenzaA__ABC40634
augaaccccaaccagaagaucaucaccaucggcagcgugagccugaccaucgccaccaucugcuuccugacccagaucgccauccuggugaccaccgugacccugcacuucaagcaguacgagugcaacagcccccccaacaaccaggugaugcugugcgagcccaccaucaucgagagaaacaucaccgagaucguguaccugaccaacaccaccaucgagaaggagaucugccccaagcuggccgaguacagaaacuggagcaagccccagugcaacaucaccggcuucgcccccuucagcaaggacaacagcaucagacugagcgccggcggcgacaucugggugaccagagagcccuacgugagcugcgaccccgacaagugcuaccaguucgcccugggccagggcaccacccugaacaacggccacagcaacgacaccgugcacgacagaacccccuacagaacccugcugaugaacgagcugggcgugcccuuccaccugggcaccaagcaggugugcaucgccuggagcagcagcagcugccacgacggcaaggccuggcugcacgugugcgugaccggcgacgacaagaacgccaccgccagcuucaucuacaacggcagacugguggacagcaucggcagcuggagcaagaagauccugagaacccaggagagcgagugcgugugcaucgacggcaccugcaccguggugaugaccgacggcagcgccagcggcaaggccgacaccaagauccuguucaucgaggagggcaagaucgugcacaccagccugcugagcggcagcgcccagcacguggaggagugcagcugcuaccccagauaccccggcgugagaugcgugugcagagacaacuggaagggcagcaacagacccaucguggacaucaacgugaaggacuacagcaucgugagcagcuacgugugcagcggccuggugggcgacacccccagaaagaacgacagcagcagcagcagccacugccuggaccccaacaacgaggagggcggccacggcgugaagggcugggccuucgacgacggcaacgacguguggaugggcagaaccaucagcgagaagcugagaagcggcuacgagaccuucaaggugaucgagggcuggagcaagcccaacagcaagcugcagaucaacagacaggugaucguggacagaggcaacagaagcggcuacagcggcaucuucagcguggagggcaagagcugcaucaacagaugcuucuacguggagcugaucagaggcagaaaccaggagaccgaggugcuguggaccagcaacagcaucgugguguucugcggcaccagcggcaccuacggcaccggcagcuggcccgacggcgccgacaucaaccugaugcccaucuga

SEQ ID NO: 174650 - RNA, 1410 nt, Artificial Sequence
  derived and/or modified CDS sequence (opt4) from neuraminidase__InfluenzaA__ABC40645
augaaccccaaccagaagaucaucaccaucggcagcgugagccugaccaucagcaccaucugcuucuucaugcagaucgccauccugaucaccaccgugacccugcacuucaagcaguacgaguucaacagcccccccaacaaccaggugaugcugugcgagcccaccaucaucgagagaaacaucaccgagaucguguaccugaccaacaccaccaucgagaaggagaucugccccaagcuggccgaguacagaaacuggagcaagccccagugcaacaucaccggcuucgcccccuucagcaaggacaacagcaucagacugagcgccggcggcgacaucugggugaccagagagcccuacgugagcugcgaccccgacaagugcuaccaguucgcccugggccagggcaccacccugaacaacgugcacagcaacgacaccgugcacgacagaacccccuacagaacccugcugaugaacgagcugggcgugcccuuccaccugggcaccaagcaggugugcaucgccuggagcagcagcagcugccacgacggcaaggccuggcugcacgugugcgugaccggcgacgacgagaacgccaccgccagcuucaucuacaacggcagacugguggacagcguggugagcuggagcaagaagauccugagaacccaggagagcgagugcgugugcaucaacggcaccugcaccguggugaugaccgacggcagcgccagcggcaaggccgacaccaagauccuguucaucgaggagggcaagaucgugcacaccagcacccugagcggcagcgcccagcacguggaggagugcagcugcuaccccagauaccccggcgugagaugcgugugcagagacaacuggaagggcagcaacagacccaucguggacaucaacaucaaggacuacagcaucgugagcagcuacgugugcagcggccuggugggcgacacccccagaaagaacgacagcagcagcagcagccacugccuggaccccaacaacgaggagggcggccacggcgugaagggcugggccuucgacgacggcaacgacguguggaugggcagaaccaucagcgagaagcugagaagcggcuacgagaccuucaaggugaucgagggcuggagcaaccccaacagcaagcugcagaucaacagacaggugaucguggacagaggcaacagaagcggcuacagcggcaucuucagcguggagggcaagagcugcaucaacagaugcuucuacguggagcugaucagaggcagaaagcaggagaccgaggugcuguggaccagcaacagcaucgugguguucugcggcaccagcggcaccuacggcaccggcagcuggcccgacggcgccgacaucaaccugaugcccaucuga

SEQ ID NO: 174651 - RNA, 1410 nt, Artificial Sequence
  derived and/or modified CDS sequence (opt4) from neuraminidase__InfluenzaA__ABC41706
augaaccccaaccagaagaucaucaccaucggcagcgugagccugaccaucgccaccaucugcuuccugaugcagaucgccauccuggugaccaccgugacccugcacuucaagcagcacgagugcaacagcccccccaacaaccaggugaugcugugcgagcccaccaucaucgagagaaacaucaccgagaucguguaccugaccaacaccaccaucgagaaggagaucugccccaagcugguggaguacagaaacuggagcaagccccagugcaacaucaccggcuucgcccccuucagcaaggacaacagcaucagacugagcgccggcggcgacaucugggugaccagagagcccuacgugagcugcgaccccgacaagugcuaccaguucgcccugggccagggcaccacccugaacaacggccacagcaacgacaccgugcacgacagaacccccuacagaacccugcugaugaacgagcugggcgugcccuuccaccugggcaccagacaggugugcaucgccuggagcagcagcagcugccacgacggcaaggccuggcugcacgugugcgugaccggcgacgacaagaacgccaccgccagcuucaucuacaacggcagacugguggacagcaucggcagcuggagcaagaagauccugagaacccaggagagcgagugcgugugcaucaacggcaccugcaccguggugaugaccgacggcagcgccagcggcaaggccgacaccaagauccuguucaucgaggagggcaagaucgugcacaucagcacccugagcggcagcgcccagcacguggaggagugcagcugcuaccccagauaccccggcgugagaugcgugugcagagacaacuggaagggcagcaacagacccaucguggacaucaacgugaaggacuacagcaucgugagcagcuacgugugcagcggccuggugggcgacacccccagaaagaacgacagcuucagcagcagccacugccuggaccccaacaacgaggagggcggccacggcgugaagggcugggccuucgacgacggcaacgacguguggaugggcagaaccaucagcgagaagcugagaagcggcuacgagaccuucaaggugaucgagggcuggagcaagcccaacagcaagcugcagaucaacagacaggugaucguggagagaggcaacagaagcggcuacagcggcaucuucagcguggagggcaagagcugcaucaacagaugcuucuacguggagcugaucagaggcagaaaggaggagaccgaggugugguggaccagcaacagcaucgugguguucugcggcaccagcggcaccuacggcaccggcagcuggcccgacggcgccgacaucaaccugaugcccaucuga

SEQ ID NO: 174652 - RNA, 1413 nt, Artificial Sequence
  derived and/or modified CDS sequence (opt4) from neuraminidase__InfluenzaA__ABC41717
augaaccccaaccagaagaucaucaccaucggcagcaucagcaucgccaucggcaucaucagccugaugcugcagaucggcaacaucaucagcaucugggccagccacagcauccagaccggcagccagaaccacaccggcaucugcaaccagagaaucaucaccuacgagaacagcaccugggugaaccacaccuacgugaacaucaacaacaccaacgugguggccggcaaggacaagaccagcgugacccuggccggcaacagcagccugugcagcaucagcggcugggccaucuacaccaaggacaacagcaucagaaucggcagcaagggcgacguguucgugaucagagagcccuucaucagcugcagccaccuggagugcagaaccuucuuccugacccagggcgcccugcugaacgacaagcacagcaacggcaccgugaaggacagaagccccuacagagcccugaugagcugcccccugggcgaggcccccagccccuacaacagcaaguucgagagcguggccuggagcgccagcgccugccacgacggcaugggcuggcugaccaucggcaucagcggccccgacaacggcgccguggccgugcugaaguacaacggcaucaucaccgagaccaucaagagcuggaagaagagaauccugagaacccaggagagcgagugcgugugcgugaacggcagcugcuucaccaucaugaccgacggccccagcaacggcgccgccagcuacaagaucuucaagaucgagaagggcaaggugaccaagagcaucgagcugaacgcccccaacuuccacuacgaggagugcagcugcuaccccgacaccggcaccgugaugugcgugugcagagacaacuggcacggcagcaacagacccugggugagcuucaaccagaaccuggacuaccagaucggcuacaucugcagcggcguguucggcgacaaccccagacccaaggacggcaagggcagcugcaaccccgugaccguggacggcgccgacggcgugaagggcuucagcuacaaguacggcaacggcguguggaucggcagaaccaagagcaacagacugagaaagggcuucgagaugaucugggaccccaacggcuggaccgacaccgacagcgacuucagcgugaagcaggacgugguggccgugaccgacuggagcggcuacagcggcagcuucgugcagcaccccgagcugaccggccuggacugcaucagacccugcuucuggguggagcuggugagaggccugcccagagagaacaccaccaucuggaccagcggcagcagcaucagcuucugcggcguggacagcgacaccgccaacuggagcuggcccgacggcgccgagcugcccuucaccaucgacaaguga

SEQ ID NO: 174653 - RNA, 1410 nt, Artificial Sequence
  derived and/or modified CDS sequence (opt4) from neuraminidase__InfluenzaA__ABC41728
augaaccccaaccagaagaucaucaccaucggcagcgugagccugaccaucgccaccaucugcuuccugaugcagaucgccauccuggugaccaccgugacccugcacuucaagcagcacgagugcaacagcccccccaacaaccaggugaugcugugcgagcccaccaucaucgagagaaacaucaccgagaucguguaccugaccaacaccaccaucgagaaggagaucugccccaagcugguggaguacagaaacuggagcaagccccagugcaacaucaccggcuucgcccccuucagcaaggacaacagcaucagacugagcgccggcggcgacaucugggugaccagagagcccuacgugagcugcgaccccgacaagugcuaccaguucgcccugggccagggcaccacccugaacaacggccacagcaacgacaccgugcacgacagaacccccuacagaacccugcugaugaacgagcugggcgugcccuuccaccugggcaccagacaggugugcaucgccuggagcagcagcagcugccacgacggcaaggccuggcugcacgugugcgugaccggcgacgacaagaacgccaccgccagcuucaucuacaacggcagacugguggacagcaucggcagcuggagcaagaacauccugagaacccaggagagcgagugcgugugcaucaacggcaccugcaccguggugaugaccgacggcagcgccagcggcaaggccgacaccaagauccuguucaucgaggagggcaagaucgugcacaucagcacccugagcggcagcgcccagcacguggaggagugcagcugcuaccccagauaccccggcgugagaugcgugugcagagacaacuggaagggcagcaacagacccaucguggacaucaacgugaaggacuacagcaucgugagcagcuacgugugcagcggccuggugggcgacacccccagaaagaacgacagcuucagcagcagccacugccuggaccccaacaacgaggagggcggccacggcgugaagggcugggccuucgacgacggcaacgacguguggaugggcagaaccaucagcgagaagcugagaagcggcuacgagaccuucaaggugaucgagggcuggagcaagcccaacagcaagcugcagaucaacagacaggugaucguggagagaggcaacagaagcggcuacagcggcaucuucagcguggagggcaagagcugcaucaacagaugcuucuacguggagcugaucagaggcagaaaggaggagaccgaggugugguggaccagcaacagcaucgugguguucugcggcaccagcggcaccuacggcaccggcagcuggcccgacggcgccgacaucaaccugaugcccaucuga

SEQ ID NO: 174654 - RNA, 1410 nt, Artificial Sequence; identical to SEQ ID NO: 174651
  derived and/or modified CDS sequence (opt4) from neuraminidase__InfluenzaA__ABC41742

SEQ ID NO: 174655 - RNA, 1410 nt, Artificial Sequence; identical to SEQ ID NO: 174651
  derived and/or modified CDS sequence (opt4) from neuraminidase__InfluenzaA__ABC41956

SEQ ID NO: 174656 - RNA, 1410 nt, Artificial Sequence; identical to SEQ ID NO: 174651
  derived and/or modified CDS sequence (opt4) from neuraminidase__InfluenzaA__ABC41967

SEQ ID NO: 174657 - RNA, 1410 nt, Artificial Sequence; identical to SEQ ID NO: 174651
  derived and/or modified CDS sequence (opt4) from neuraminidase__InfluenzaA__ABC42017

SEQ ID NO: 174658 - RNA, 1410 nt, Artificial Sequence; identical to SEQ ID NO: 174651
  derived and/or modified CDS sequence (opt4) from neuraminidase__InfluenzaA__ABC42117

SEQ ID NO: 174659 - RNA, 1410 nt, Artificial Sequence; identical to SEQ ID NO: 174651
  derived and/or modified CDS sequence (opt4) from neuraminidase__InfluenzaA__ABC42128

SEQ ID NO: 174660 - RNA, 1410 nt, Artificial Sequence; identical to SEQ ID NO: 174651
  derived and/or modified CDS sequence (opt4) from neuraminidase__InfluenzaA__ABC42139

SEQ ID NO: 174661 - RNA, 1410 nt, Artificial Sequence
  derived and/or modified CDS sequence (opt4) from neuraminidase__InfluenzaA__ABC42150
augaaccccaaccagaagaucaucaccaucggcagcgugagccugaccaucgccaccaucugcuuccugaugcagaucgccauccuggccaccaccgugacccugcacuucaagcagcacgagugcaacagcccccccaacaaccaggugaugcugugcgagcccaccaucaucgagagaaacaucaccgagaucguguaccugaccaacaccaccaucgagaaggagaucugccccaagcugguggaguacagaaacuggagcaagccccagugcaacaucaccggcuucgcccccuucagcaaggacaacagcaucagacugagcgccggcggcgacaucugggugaccagagagcccuacgugagcugcgaccccgacaagugcuaccaguucgcccugggccagggcaccacccugaacaacggccacagcaacgacaccgugcacgacagaacccccuacagaacccugcugaugaacgagcugggcgugcccuuccaccugggcaccagacaggugugcaucgccuggagcagcagcagcugccacgacggcaaggccuggcugcacgugugcgugaccggcgacgacaagaacgccaccgccagcuucaucuacaacggcagacugguggacagcaucggcagcuggagcaagaagauccugagaacccaggagagcgagugcgugugcaucaacggcaccugcaccguggugaugaccgacggcagcgccagcggcaaggccgacaccaagauccuguucaucgaggagggcaagaucgugcacaucagcacccugagcggcagcgcccagcacguggaggagugcagcugcuaccccagauaccccggcgugagaugcgugugcagagacaacuggaagggcagcaacagacccaucguggacaucaacgugaaggacuacagcaucgugagcagcuacgugugcagcggccuggugggcgacacccccagaaagaacgacagcuucagcagcagccacugccuggaccccaacaacgaggagggcggccacggcgugaagggcugggccuucgacgacggcaacgacguguggaugggcagaaccaucagcggcaagcugagaagcggcuacgagaccuucaaggugaucgagggcuggagcaagcccaacagcaagcugcagaucaacagacaggugaucguggagagaggcaacagaagcggcuacagcggcaucuucagcguggagggcaagagcugcaucaacagaugcuucuacguggagcugaucagaggcagaaaggaggagaccgaggugugguggaccagcaacagcaucgugguguucugcggcaccagcggcaccuacggcaccggcagcuggcccgacggcgccgacaucaaccugaugcccaucuga

SEQ ID NO: 174662 - RNA, 1410 nt, Artificial Sequence; identical to SEQ ID NO: 174651
  derived and/or modified CDS sequence (opt4) from neuraminidase__InfluenzaA__ABC42161

SEQ ID NO: 174663 - RNA, 1410 nt, Artificial Sequence
  derived and/or modified CDS sequence (opt4) from neuraminidase__InfluenzaA__ABC42172
augaaccccaaccagaagaucaucaccaucggcagcgugagccugaccaucgccaccaucugcagccugaugcagaucgccauccuggugaccaccgugacccugcacuucaagcagcacgagugcaacagcccccccaacaaccaggugaugcugugcgagcccaccaucaucgagagaaacaucaccgagaucguguaccugaccaacaccaccaucgagaaggagaucugccccaagcugguggaguacagaaacuggagcaagccccagugcaacaucaccggcuucgcccccuucagcaaggacaacagcaucagacugagcgccggcggcgacaucugggugaccagagagcccuacgugagcugcgaccccgacaagugcuaccaguucgcccugggccagggcaccacccugaacaacggccacagcaacgacaccgugcacgacagaacccccuacagaacccugcugaugaacgagcugggcgugcccuuccaccugggcaccagacaggugugcaucgccuggagcagcagcagcugccacgacggcaaggccuggcugcacgugugcgugaccggcgacgacaagaacgccaccgccagcuucaucuacaacggcagacugguggacagcaucggcagcuggagcaagaagauccugagaacccaggagagcgagugcgugugcaucaacggcaccugcaccguggugaugaccgacggcagcgccagcggcaaggccgacaccaagauccuguucaucgaggagggcaagaucgugcacaucagcacccugagcggcagcgcccagcacguggaggagugcagcugcuaccccagauaccccggcgugagaugcgugugcagagacaacuggaagggcagcaacagacccaucguggacaucaacgugaaggacuacagcaucgugagcagcuacgugugcagcggccuggugggcgacacccccagaaagaacgacagcuucagcagcagccacugccuggaccccaacaacgaggagggcggccacggcgugaagggcugggccuucgacgacggcaacgacguguggaugggcagaaccaucagcgagaagcugagaagcggcuacgagaccuucaaggugaucgagggcuggagcaagcccaacagcaagcugcagaucaacagacaggugaucguggagagaggcaacagaagcggcuacagcggcaucuucagcguggagggcaagagcugcaucaacagaugcuucuacguggagcugaucagaggcagaaaggaggagaccgaggugugguggaccagcaacagcaucgugguguucugcggcaccagcggcaccuacggcaccggcagcuggcccgacggcgccgacaucaaccugaugcccaucuga

SEQ ID NO: 174664 - RNA, 1410 nt, Artificial Sequence; identical to SEQ ID NO: 174651
  derived and/or modified CDS sequence (opt4) from neuraminidase__InfluenzaA__ABC42183

SEQ ID NO: 174665 - RNA, 1410 nt, Artificial Sequence; identical to SEQ ID NO: 174651
  derived and/or modified CDS sequence (opt4) from neuraminidase__InfluenzaA__ABC42195

SEQ ID NO: 174666 - RNA, 1410 nt, Artificial Sequence; identical to SEQ ID NO: 174651
  derived and/or modified CDS sequence (opt4) from neuraminidase__InfluenzaA__ABC42310

SEQ ID NO: 174667 - RNA, 1410 nt, Artificial Sequence; identical to SEQ ID NO: 174651
  derived and/or modified CDS sequence (opt4) from neuraminidase__InfluenzaA__ABC42321

SEQ ID NO: 174668 - RNA, 1410 nt, Artificial Sequence; identical to SEQ ID NO: 174651
  derived and/or modified CDS sequence (opt4) from neuraminidase__InfluenzaA__ABC42349

SEQ ID NO: 174669 - RNA, 1410 nt, Artificial Sequence; identical to SEQ ID NO: 174651
  derived and/or modified CDS sequence (opt4) from neuraminidase__InfluenzaA__ABC42464

SEQ ID NO: 174670 - RNA, 1410 nt, Artificial Sequence; identical to SEQ ID NO: 174651
  derived and/or modified CDS sequence (opt4) from neuraminidase__InfluenzaA__ABC42497

SEQ ID NO: 174671 - RNA, 1410 nt, Artificial Sequence; identical to SEQ ID NO: 174651
  derived and/or modified CDS sequence (opt4) from neuraminidase__InfluenzaA__ABC42508

SEQ ID NO: 174672 - RNA, 1410 nt, Artificial Sequence; identical to SEQ ID NO: 174651
  derived and/or modified CDS sequence (opt4) from neuraminidase__InfluenzaA__ABC42519

SEQ ID NO: 174673 - RNA, 1410 nt, Artificial Sequence; identical to SEQ ID NO: 174651
  derived and/or modified CDS sequence (opt4) from neuraminidase__InfluenzaA__ABC42530

SEQ ID NO: 174674 - RNA, 1410 nt, Artificial Sequence; identical to SEQ ID NO: 174651
  derived and/or modified CDS sequence (opt4) from neuraminidase__InfluenzaA__ABC42577

SEQ ID NO: 174675 - RNA, 1410 nt, Artificial Sequence; identical to SEQ ID NO: 174651
  derived and/or modified CDS sequence (opt4) from neuraminidase__InfluenzaA__ABC42588

SEQ ID NO: 174676 - RNA, 1410 nt, Artificial Sequence; identical to SEQ ID NO: 174387
  derived and/or modified CDS sequence (opt4) from neuraminidase__InfluenzaA__ABC42599

SEQ ID NO: 174677 - RNA, 1410 nt, Artificial Sequence; identical to SEQ ID NO: 174387
  derived and/or modified CDS sequence (opt4) from neuraminidase__InfluenzaA__ABC42610

SEQ ID NO: 174678 - RNA, 1410 nt, Artificial Sequence; identical to SEQ ID NO: 174387
  derived and/or modified CDS sequence (opt4) from neuraminidase__InfluenzaA__ABC42621

SEQ ID NO: 174679 - RNA, 1410 nt, Artificial Sequence; identical to SEQ ID NO: 174387
  derived and/or modified CDS sequence (opt4) from neuraminidase__InfluenzaA__ABC42632

SEQ ID NO: 174680 - RNA, 1410 nt, Artificial Sequence; identical to SEQ ID NO: 174387
  derived and/or modified CDS sequence (opt4) from neuraminidase__InfluenzaA__ABC42643

SEQ ID NO: 174681 - RNA, 1410 nt, Artificial Sequence; identical to SEQ ID NO: 174387
  derived and/or modified CDS sequence (opt4) from neuraminidase__InfluenzaA__ABC42654

SEQ ID NO: 174682 - RNA, 1410 nt, Artificial Sequence; identical to SEQ ID NO: 174387
  derived and/or modified CDS sequence (opt4) from neuraminidase__InfluenzaA__ABC42665

SEQ ID NO: 174683 - RNA, 1410 nt, Artificial Sequence; identical to SEQ ID NO: 174387
  derived and/or modified CDS sequence (opt4) from neuraminidase__InfluenzaA__ABC42676

SEQ ID NO: 174684 - RNA, 1410 nt, Artificial Sequence; identical to SEQ ID NO: 174387
  derived and/or modified CDS sequence (opt4) from neuraminidase__InfluenzaA__ABC42687

SEQ ID NO: 174685 - RNA, 1410 nt, Artificial Sequence; identical to SEQ ID NO: 174387
  derived and/or modified CDS sequence (opt4) from neuraminidase__InfluenzaA__ABC42698

SEQ ID NO: 174686 - RNA, 1410 nt, Artificial Sequence; identical to SEQ ID NO: 174387
  derived and/or modified CDS sequence (opt4) from neuraminidase__InfluenzaA__ABC42709

SEQ ID NO: 174687 - RNA, 1410 nt, Artificial Sequence; identical to SEQ ID NO: 174387
  derived and/or modified CDS sequence (opt4) from neuraminidase__InfluenzaA__ABC42720

SEQ ID NO: 174688 - RNA, 1410 nt, Artificial Sequence
  derived and/or modified CDS sequence (opt4) from neuraminidase__InfluenzaA__ABC42742
augaaccccaaccagaagaucaucaccaucggcagcgugagccugaccaucagcaccaucugcuucuucaugcagaucgccauccugaugaccaccgugacccugcacuucaagcaguacgaguucaacagcccccccaacaaccaggugaugcugugcgagcccaccaucaucgagagaaacaucaccgagaucguguaccugaccaacaccaccaucgagaaggagaucugccccaagcuggccgaguacagaaacuggagcaagccccagugcgacaucaccggcuucgcccccuucagcaaggacaacagcaucagacugagcgccggcggcgacaucugggugaccagagagcccuacgugagcugcgaccccgacaagugcuaccaguucgcccugggccagggcaccacccugaacaacgugcacagcaacgacaccgugcacgacagaacccccuacagaacccugcugaugaacgagcugggcgugcccuuccaccugggcaccaagcaggugugcaucgccuggagcagcagcagcugccacgacggcaaggccuggcugcacgugugcgugaccggcgacgacaagaacgccaccgccagcuucaucuacaacggcagacugguggacagcaucgugagcuggagcaaggagauccugagaacccaggagagcgagugcgugugcaucaacggcaccugcaccguggugaugaccgacggcagcgccagcggcaaggccgacaccaagauccuguucaucgaggagggcaagaucgugcacaccagcacccugagcggcagcgcccagcacguggaggagugcagcugcuaccccagauaccccggcgugagaugcgugugcagagacaacuggaagggcagcaacagacccaucguggacaucaacaucaaggacuacagcaucgugagcagcuacgugugcagcggccuggugggcgacacccccagaagaaacgacagcagcagcagcagccacugccuggaccccaacaacgaggagggcggccacggcgugaagggcugggccuucgacgacggcaacgacguguggaugggcagaaccaucagcgagaagcugagaagcggcuacgagaccuucaaggugaucgagggcuggagcaaccccaacagcaagcugcagaucaacagacaggugaucguggacagaggcaacagaagcggcuacagcggcaucuucagcguggagggcaagagcugcaucaacagaugcuucuacguggagcugaucagaggcagaaaggaggagaccgaggugcuguggaccagcaacagcaucgugguguucugcggcaccagcggcaccuacggcaccggcagcuggcccgacggcgccgacaucaaccugaugcccaucuga

SEQ ID NO: 174689 - RNA, 1410 nt, Artificial Sequence; identical to SEQ ID NO: 174387
  derived and/or modified CDS sequence (opt4) from neuraminidase__InfluenzaA__ABC42764

SEQ ID NO: 174690 - RNA, 1410 nt, Artificial Sequence; identical to SEQ ID NO: 174387
  derived and/or modified CDS sequence (opt4) from neuraminidase__InfluenzaA__ABC42775

SEQ ID NO: 174691 - RNA, 1410 nt, Artificial Sequence; identical to SEQ ID NO: 174387
  derived and/or modified CDS sequence (opt4) from neuraminidase__InfluenzaA__ABC42786

SEQ ID NO: 174692 - RNA, 1410 nt, Artificial Sequence; identical to SEQ ID NO: 174387
  derived and/or modified CDS sequence (opt4) from neuraminidase__InfluenzaA__ABC42797

SEQ ID NO: 174693 - RNA, 1410 nt, Artificial Sequence; identical to SEQ ID NO: 174387
  derived and/or modified CDS sequence (opt4) from neuraminidase__InfluenzaA__ABC42808

SEQ ID NO: 174694 - RNA, 1410 nt, Artificial Sequence; identical to SEQ ID NO: 174387
  derived and/or modified CDS sequence (opt4) from neuraminidase__InfluenzaA__ABC42819

SEQ ID NO: 174695 - RNA, 1410 nt, Artificial Sequence
  derived and/or modified CDS sequence (opt4) from neuraminidase__InfluenzaA__ABC42841
augaaccccaaccagaagaucaucaccaucggcagcgugagccugaccaucagcaccaucugcuucuucaugcagaucgccauccugaucaccaccgugacccugcacuucaagcaguacgaguucaacagcccccccaacaaccaggugaugcugugcgagcccaccaucaucgagagaaacaucaccgagaucguguaccugaccaacaccaccaucgagaaggagaucugccccaagcuggccgaguacagaaacuggagcaagccccagugcgacaucaccggcuucgcccccuucagcaaggacaacagcaucagacugagcgccggcggcgacaucugggugaccagagagcccuacgugagcugcgaccccgacaagugcuaccaguucgcccugggccagggcaccacccugaacaacgugcacagcaacgacaccgugcacgacagaacccccuacagaacccugcugaugaacgagcugggcgugcccuuccaccugggcaccaagcaggugugcaucgccuggagcagcagcagcugccacgacggcaaggccuggcugcacgugugcgugaccggcgacgacaagaacgccaccgccagcuucaucuacaacggcagacugguggacagcaucgugagcuggagcaaggagauccugagaacccaggagagcgagugcgugugcaucaacggcaccugcaccguggugaugaccgacggcagcgccagcagaaaggccgacaccaagauccuguucaucgaggagggcaagaucgugcacaccagcacccugagcggcagcgcccagcacguggaggagugcagcugcuaccccagauaccccggcgugagaugcgugugcagagacaacuggaagggcagcaacagacccaucguggacaucaacaucaaggacuacagcaucgugagcagcuacgugugcagcggccuggugggcgacacccccagaaagaacgacagcagcagcagcagccacugccuggaccccaacaacgaggagggcggccacggcgugaagggcugggccuucgacgacggcaacgacguguggaugggcagaaccaucagcgagaagcugagaagcggcuacgagaccuucaaggugaucgagggcuggagcaaccccaacagcaagcugcagaucaacagacaggugaucguggacagaggcaacagaagcggcuacagcggcaucuucagcguggagggcaagagcugcaucaacagaugcuucuacguggagcugaucagaggcagaaaggaggagaccgaggugcuguggaccagcaacagcaucgugguguucugcggcaccagcggcaccuacggcaccggcagcuggcccgacggcgccgacaucaaccugaugcccaucuga

SEQ ID NO: 174696 - RNA, 1410 nt, Artificial Sequence; identical to SEQ ID NO: 174387
  derived and/or modified CDS sequence (opt4) from neuraminidase__InfluenzaA__ABC42852

SEQ ID NO: 174697 - RNA, 1410 nt, Artificial Sequence; identical to SEQ ID NO: 174387
  derived and/or modified CDS sequence (opt4) from neuraminidase__InfluenzaA__ABC42863

SEQ ID NO: 174698 - RNA, 1410 nt, Artificial Sequence; identical to SEQ ID NO: 174226
  derived and/or modified CDS sequence (opt4) from neuraminidase__InfluenzaA__ABC42874

SEQ ID NO: 174699 - RNA, 1410 nt, Artificial Sequence; identical to SEQ ID NO: 174226
  derived and/or modified CDS sequence (opt4) from neuraminidase__InfluenzaA__ABC42885

SEQ ID NO: 174700 - RNA, 1410 nt, Artificial Sequence; identical to SEQ ID NO: 174226
  derived and/or modified CDS sequence (opt4) from neuraminidase__InfluenzaA__ABC42896

SEQ ID NO: 174701 - RNA, 1410 nt, Artificial Sequence; identical to SEQ ID NO: 174651
  derived and/or modified CDS sequence (opt4) from neuraminidase__InfluenzaA__ABC42914

SEQ ID NO: 174702 - RNA, 1410 nt, Artificial Sequence; identical to SEQ ID NO: 174651
  derived and/or modified CDS sequence (opt4) from neuraminidase__InfluenzaA__ABC42932

SEQ ID NO: 174703 - RNA, 1410 nt, Artificial Sequence
  derived and/or modified CDS sequence (opt4) from neuraminidase__InfluenzaA__ABC42943
augaaccccaaccagaagaucaucaccaucggcagcgugagccugaccaucgccaccaucugcuuccugaugcagaucgccauccuggugaccaccgugacccugcacuucaagcagcacgagugcaacagcccccccaacaaccaggugaugcugugcgagcccaccaucaucgagagaaacaucaccgagaucguguaccugaccaacaccaccaucgagaaggagaucugccccaagcuggugggcuacagaaacuggagcaagccccagugcaacaucaccggcuucgcccccuucagcaaggacaacagcaucagacugagcgccggcggcgacaucugggugaccagagagcccuacgugagcugcgaccccgacaagugcuaccaguucgcccugggccagggcaccacccugaacaacggccacagcaacgacaccgugcacgacagaacccccuacagaacccugcugaugaacgagcugggcgugcccuuccaccugggcaccagacaggugugcaucgccuggagcagcagcagcugccacgacggcaaggccuggcugcacgugugcgugaccggcgacgacaagaacgccaccgccagcuucaucuacaacggcagacugguggacagcaucggcagcuggagcaagaagauccugagaacccaggagagcgagugcgugugcaucaacggcaccugcaccguggugaugaccgacggcagcgccagcggcaaggccgacaccaagauccuguucaucgaggagggcaagaucgugcacaucagcacccugagcggcagcgcccagcacguggaggagugcagcugcuaccccagauaccccggcgugagaugcgugugcagagacaacuggaagggcagcaacagacccaucguggacaucaacgugaaggacuacagcaucgugagcagcuacgugugcagcggccuggugggcgacacccccagaaagaacgacagcuucagcagcagccacugccuggaccccaacaacgaggagggcggccacggcgugaagggcugggccuucgacgacggcaacgacguguggaugggcagaaccaucagcgagaagcugagaagcggcuacgagaccuucaaggugaucgagggcuggagcaagcccaacagcaagcugcagaucaacagacaggugaucguggagagaggcaacagaagcggcuacagcggcaucuucagcguggagggcaagagcugcaucaacagaugcuucuacguggagcugaucagaggcagaaaggaggagaccgaggugugguggaccagcaacagcaucgugguguucugcggcaccagcggcaccuacggcaccggcagcuggcccgacggcgccgacaucaaccugaugcccaucuga

SEQ ID NO: 174704 - RNA, 1410 nt, Artificial Sequence; identical to SEQ ID NO: 174651
  derived and/or modified CDS sequence (opt4) from neuraminidase__InfluenzaA__ABC42954

SEQ ID NO: 174705 - RNA, 1410 nt, Artificial Sequence; identical to SEQ ID NO: 174651
  derived and/or modified CDS sequence (opt4) from neuraminidase__InfluenzaA__ABC42965

SEQ ID NO: 174706 - RNA, 1410 nt, Artificial Sequence
  derived and/or modified CDS sequence (opt4) from neuraminidase__InfluenzaA__ABC42976
augaaccccaaccagaagaucaucaccaucggcagcgugagccugaccaucgccaccaucugcuuccugaugcagaucgccauccuggugaccaccgugacccugcacuucaagcagcacgagugcaacagcccccccaacaaccaggccaugcugugcgagcccaccaucaucgagagaaacaucaccgagaucguguaccugaccaacaccaccaucgagaaggagaucugccccaagcugguggaguacagaaacuggagcaagccccagugcaacaucaccggcuucgcccccuucagcaaggacaacagcaucagacugagcgccggcggcgacaucugggugaccagagagcccuacgugagcugcgaccccgacaagugcuaccaguucgcccugggccagggcaccacccugaacaacggccacagcaacgacaccgugcacgacagaacccccuacagaacccugcugaugaacgagcugggcgugcccuuccaccugggcaccagacaggugugcaucgccuggagcagcagcagcugccacgacggcaaggccuggcugcacgugugcgugaccggcgacgacaagaacgccaccgccagcuucaucuacaacggcagacugguggacagcaucggcagcuggagcaagaagauccugagaacccaggagagcgagugcgugugcaucaacggcaccugcaccguggugaugaccgacggcagcgccagcggcaaggccgacaccaagauccuguucaucgaggagggcaagaucgugcacaucagcacccugagcggcagcgcccagcacguggaggagugcagcugcuaccccagauaccccggcgugagaugcgugugcagagacaacuggaagggcagcaacagacccaucguggacaucaacgugaaggacuacagcaucgugagcagcuacgugugcagcggccuggugggcgacacccccagaaagaacgacagcuucagcagcagccacugccuggaccccaacaacgaggagggcggccacggcgugaagggcugggccuucgacgacggcaacgacguguggaugggcagaaccaucagcgagaagcugagaagcggcuacgagaccuucaaggugaucgagggcuggagcaagcccaacagcaagcugcagaucaacagacaggugaucguggagagaggcaacagaagcggcuacagcggcaucuucagcguggagggcaagagcugcaucaacagaugcuucuacguggagcugaucagaggcagaaaggaggagaccgaggugugguggaccagcaacagcaucgugguguucugcggcaccagcggcaccuacggcaccggcagcuggcccgacggcgccgacaucaaccugaugcccaucuga

SEQ ID NO: 174707 - RNA, 1410 nt, Artificial Sequence; identical to SEQ ID NO: 174651
  derived and/or modified CDS sequence (opt4) from neuraminidase__InfluenzaA__ABC42987

SEQ ID NO: 174708 - RNA, 1410 nt, Artificial Sequence; identical to SEQ ID NO: 174651
  derived and/or modified CDS sequence (opt4) from neuraminidase__InfluenzaA__ABC42998

SEQ ID NO: 174709 - RNA, 1410 nt, Artificial Sequence; identical to SEQ ID NO: 174651
  derived and/or modified CDS sequence (opt4) from neuraminidase__InfluenzaA__ABC43009

SEQ ID NO: 174710 - RNA, 1410 nt, Artificial Sequence; identical to SEQ ID NO: 174651
  derived and/or modified CDS sequence (opt4) from neuraminidase__InfluenzaA__ABC43020

SEQ ID NO: 174711 - RNA, 1410 nt, Artificial Sequence
  derived and/or modified CDS sequence (opt4) from neuraminidase__InfluenzaA__ABC43042
augaaccccaaccagaagaucaucaccaucggcagcgugagccugaccaucgccaccaucugcuuccugaugcagaucgccauccuggugaccaccgugacccugcacuucaagcagcacgagugcaacagcccccccaacaaccaggugaugcugugcgagcccaccaucaucgagagaaacaucaccgagaucguguaccugaccaacaccaccaucgagaaggagaucugccccaagcugguggaguacagaaacuggagcaagccccagugcaacaucaccggcuucgcccccuucagcaaggacaacagcaucagacugagcgccggcggcgacaucugggugaccagagagcccuacgugagcugcgaccccgacaagugcuaccaguucgcccugggccagggcaccacccugaacaacggccacagcaacgacaccgugcacgacagaacccccuacagaacccugcugaugaacgagcugggcgugcccuuccaccugggcaccagacaggugugcaucgccuggagcagcagcagcugccacgacggcaaggccuggcugcacgugugcgugaccggcgacgacaagaacgccaccgccagcuucaucuacaacggcagacugguggacagcaucggcagcuggagcaagaagauccugagaacccaggagagcgagugcgugugcaucaacggcaccugcaccguggugaugaccgacggcagcgccagcggcaaggccgacaccaagauccuguucaucgaggagggcaagaucgugcacaucagcacccugagcggcagcgcccagcacguggaggagugcagcugcuaccccagauaccccggcgugagaugcgugugcagagacaacuggaagggcagcaacagacccaucguggacaucaacgugaaggacuacagcaucgugagcagcuacgugugcagcggccuggugggcgacacccccagaaagaacgacagcuucagcagcagccacugccuggaccccaacaacgaggagggcggccacggcgugaagggcugggccuucgacgacggcaacgacguguggaugggcagaaccaucagcgagaagcugagaagcggcuacgagaccuucaaggugaucgagggcuggagcaagcccaacagcaagcugcagaucaacagacaggugaucguggagagaggcaacagaagcggcuacagcggcaucuucagcguggagggcaagagcugcaucaacagaugcuucuacguggagcugaucagaggcagaaaggaggagaccgaggugugguggaccagcaacagcaucgugguguucugcggcaccagcggcaccuacggcaccggcagcuggcccgacggcgccgacaucaaccugaugagcaucuga

SEQ ID NO: 174712 - RNA, 1410 nt, Artificial Sequence; identical to SEQ ID NO: 174651
  derived and/or modified CDS sequence (opt4) from neuraminidase__InfluenzaA__ABC43053

SEQ ID NO: 174713 - RNA, 1410 nt, Artificial Sequence
  derived and/or modified CDS sequence (opt4) from neuraminidase__InfluenzaA__ABC43064
augaaccccaaccagaagaucaucaccaucggcagcgugagccugaccaucgccaccaucugcuuccugaugcagaucgccauccuggugaccaccgugacccugcacuucaagcagcacgagugcaacagcccccccaacaaccaggugaugcugugcgagcccaccaucaucgagagaaacaucaccgagaucguguaccugaccaacaccaccaucgagaaggagaucugccccaagcugguggaguacagaaacuggagcaagccccagugcaacaucaccggcuucgcccccuucagcaaggacaacagcaucagacugagcgccggcggcgacaucugggugaccagagagcccuacgugagcugcgaccccgacaagugcuaccaguucgcccugggccagggcaccacccugaacaacggccacagcaacgacaccgugcacgacagaacccccuacagaacccugcugaugaacgagcugggcgugcccuuccaccugggcaccagacaggugugcaucgccuggagcagcagcagcugccacgacggcaaggccuggcugcacgugugcgugaccggcgacgacaagaacgccaccgccagcuucaucuacaacggcagacugguggacagcaucggcagcuggagcaagaagauccugagaacccaggagagcgagugcgugugcaucaacggcaccugcaccguggugaugaccgacggcagcgccagcggcaaggccgacaccaagauccuguucaucgaggagggcaagaucgugcacaucagcacccugagcggcagcgcccagcacguggaggagugcagcugcuaccccagauaccccggcgugagaugcgugugcagagacaacuggaagggcagcaacagacccaucguggacaucaacgugaaggacuacagcaucgugagcagcuacgugugcagcggccuggugggcgacacccccagaaagaacgacagcuucagcagcagccacugccuggaccccaacaacgaggagggcggccacggcgugaagggcugggccuucgacgacggcaacgacguguggaugggcagaaccaucagcgagaagcugagaagcggcuacgagaccuucaaggugaucgagggcuggagcaagcccaacagcaagcugcagaucaacagacaggugaucguggagagaggcaacagaagcggcuacagcggcaucuucagcguggagggcaagagcugcaucaacagaugcuucuacguggagcugaucagaggcagaaaggagaagaccgaggugugguggaccagcaacagcaucgugguguucugcggcaccagcggcaccuacggcaccggcagcuggcccgacggcgccgacaucaaccugaugcccaucuga

SEQ ID NO: 174714 - RNA, 1410 nt, Artificial Sequence; identical to SEQ ID NO: 174651
  derived and/or modified CDS sequence (opt4) from neuraminidase__InfluenzaA__ABC43075

SEQ ID NO: 174715 - RNA, 1410 nt, Artificial Sequence
  derived and/or modified CDS sequence (opt4) from neuraminidase__InfluenzaA__ABC43086
augaaccccaaccagaagaucaucaccaucggcagcgugagccugaucaucgccaccaucugcuuccugaugcagaucgccauccuggugaccaccgugacccugcacuucaagcagcacgagugcaacagcccccccaacaaccaggugaugcugugcgagcccaccaucaucgagagaaacaucaccgagaucguguaccugaccaacaccaccaucgagaaggagaucugccccaagcugguggaguacagaaacuggagcaagccccagugcaacaucaccggcuucgcccccuucagcaaggacaacagcaucagacugagcgccggcggcgacaucugggugaccagagagcccuacgugagcugcgaccccgacaagugcuaccaguucgcccugggccagggcaccacccugaacaacggccacagcaacgacaccgugcacgacagaacccccuacagaacccugcugaugaacgagcugggcgugcccuuccaccugggcaccagacaggugugcaucgccuggagcagcagcagcugccacgacggcaaggccuggcugcacgugugcgugaccggcgacgacaagaacgccaccgccagcuucaucuacaacggcagacugguggacagcaucggcagcuggagcaagaagauccugagaacccaggagagcgagugcgugugcaucaacggcaccugcaccguggugaugaccgacggcagcgccagcggcaaggccgacaccaagauccuguucaucgaggagggcaagaucgugcacaucagcacccugagcggcagcgcccagcacguggaggagugcagcugcuaccccagauaccccggcgugagaugcgugugcagagacaacuggaagggcagcaacagacccaucguggacaucaacgugaaggacuacagcaucgugagcagcuacgugugcagcggccuggugggcgacacccccagaaagaacgacagcuucagcagcagccacugccuggaccccaacaacgaggagggcggccacggcgugaagggcugggccuucgacgacggcaacgacguguggaugggcagaaccaucagcgagaagcugagaagcggcuacgagaccuucaaggugaucgagggcuggagcaagcccaacagcaagcugcagaucaacagacaggugaucguggagagaggcaacagaagcggcuacagcggcaucuucagcguggagggcaagagcugcaucaacagaugcuucuacguggagcugaucagaggcagaaaggaggagaccgaggugugguggaccagcaacagcaucgugguguucugcggcaccagcggcaccuacggcaccggcagcuggcccgacggcgccgacaucaaccugaugcccaucuga

SEQ ID NO: 174716 - RNA, 1410 nt, Artificial Sequence; identical to SEQ ID NO: 174651
  derived and/or modified CDS sequence (opt4) from neuraminidase__InfluenzaA__ABC43097

SEQ ID NO: 174717 - RNA, 1410 nt, Artificial Sequence; identical to SEQ ID NO: 174651
  derived and/or modified CDS sequence (opt4) from neuraminidase__InfluenzaA__ABC43108

SEQ ID NO: 174718 - RNA, 1410 nt, Artificial Sequence; identical to SEQ ID NO: 174651
  derived and/or modified CDS sequence (opt4) from neuraminidase__InfluenzaA__ABC43119

SEQ ID NO: 174719 - RNA, 1410 nt, Artificial Sequence; identical to SEQ ID NO: 174387
  derived and/or modified CDS sequence (opt4) from neuraminidase__InfluenzaA__ABC43130

SEQ ID NO: 174720 - RNA, 1410 nt, Artificial Sequence; identical to SEQ ID NO: 174387
  derived and/or modified CDS sequence (opt4) from neuraminidase__InfluenzaA__ABC43141

SEQ ID NO: 174721 - RNA, 1410 nt, Artificial Sequence; identical to SEQ ID NO: 174387
  derived and/or modified CDS sequence (opt4) from neuraminidase__InfluenzaA__ABC43152

SEQ ID NO: 174722 - RNA, 1410 nt, Artificial Sequence; identical to SEQ ID NO: 174387
  derived and/or modified CDS sequence (opt4) from neuraminidase__InfluenzaA__ABC43163

SEQ ID NO: 174723 - RNA, 1410 nt, Artificial Sequence; identical to SEQ ID NO: 174387
  derived and/or modified CDS sequence (opt4) from neuraminidase__InfluenzaA__ABC43174

SEQ ID NO: 174724 - RNA, 1410 nt, Artificial Sequence
  derived and/or modified CDS sequence (opt4) from neuraminidase__InfluenzaA__ABC43185
augaaccccaaccagaagaucaucaccaucggcagcgugagccugaccaucagcaccaucugcuucuucaugcagaucgccauccugaucaccaccgugacccugcacuucaagcaguacgaguucaacagcccccccaacaaccaggugaugcugugcgagcccaccaucaucgagagaaacaucaccgagaucguguaccugaccaacaccaccaucgagaaggagaucugccccaagcuggccgaguacagaaacuggagcaagccccagugcgacaucaccggcuucgcccccuucagcaaggacaacagcaucagacugagcgccggcggcgacaucugggugaccagagagcccuacgugagcugcgaccccgacaagugcuaccaguucgcccugggccagggcaccacccugaacaacgugcacagcaacgacaccgugcacgacagaacccccuacagaacccugcugaugaacgagcugggcgugcccuuccaccugggcaccaagcaggugugcaucgccuggagcagcagcagcugccacgacggcaaggccuggcugcacgugugcgugaccggcgacgacaagaacgccaccgccagcuucaucuacaacggcagacugguggacagcaucgugagcuggagcaaggagauccugagaacccaggagagcgagugcgugugcaucaacggcaccugcaccguggugaugaccgacggcagcgccagcggcaaggccgacaccagaauccuguucaucgaggagggcaagaucgugcacaccagcacccugagcggcagcgcccagcacguggaggagugcagcugcuaccccagauaccccggcgugagaugcgugugcagagacaacuggaagggcagcaacagacccaucguggacaucaacaucaaggacuacagcaucgugagcagcuacgugugcagcggccuggugggcgacacccccagaaagaacgacagcagcagcagcagccacugccuggaccccaacaacgaggagggcggccacggcgugaagggcugggccuucgacgacggcaacgacguguggaugggcagaaccaucagcgagaagcugagaagcggcuacgagaccuucaaggugaucgagggcuggagcaaccccaacagcaagcugcagaucaacagacaggugaucguggacagaggcaacagaagcggcuacagcggcaucuucagcguggagggcaagagcugcaucaacagaugcuucuacguggagcugaucagaggcagaaaggaggagaccgaggugcuguggaccagcaacagcaucgugguguucugcggcaccagcggcaccuacggcaccggcagcuggcccgacggcgccgacaucaaccugaugcccaucuga

SEQ ID NO: 174725 - RNA, 1410 nt, Artificial Sequence; identical to SEQ ID NO: 174387
  derived and/or modified CDS sequence (opt4) from neuraminidase__InfluenzaA__ABC43478

SEQ ID NO: 174726 - RNA, 1410 nt, Artificial Sequence; identical to SEQ ID NO: 174387
  derived and/or modified CDS sequence (opt4) from neuraminidase__InfluenzaA__ABC43489

SEQ ID NO: 174727 - RNA, 1410 nt, Artificial Sequence; identical to SEQ ID NO: 174387
  derived and/or modified CDS sequence (opt4) from neuraminidase__InfluenzaA__ABC43500

SEQ ID NO: 174728 - RNA, 1410 nt, Artificial Sequence
  derived and/or modified CDS sequence (opt4) from neuraminidase__InfluenzaA__ABC43511
augaaccccaaccagaagaucaucaccaucggcagcgugagccugaccaucagcaccaucugcuucuucaugcagaucgccauccugaucaccaccgugacccugcacuucaagcaguacgaguucaacagcccccccaacaaccaggugaugcugugcgagaccaccaucaucgagagaaacaucaccgagaucguguaccugaccaacaccaccaucgagaaggagaucugccccaagcuggccgaguacagaaacuggagcaagccccagugcgacaucaccggcuucgcccccuucagcaaggacaacagcaucagacugagcgccggcggcgacaucugggugaccagagagcccuacgugagcugcgaccccgacaagugcuaccaguucgcccugggccagggcaccacccugaacaacgugcacagcaacgacaccgugcacgacagaacccccuacagaacccugcugaugaacgagcugggcgugcccuuccaccugggcaccaagcaggugugcaucgccuggagcagcagcagcugccacgacggcaaggccuggcugcacgugugcgugaccggcgacgacaagaacgccaccgccagcuucaucuacaacggcagacugguggacagcaucgugagcuggagcaaggagauccugagaacccaggagagcgagugcgugugcaucaacggcaccugcaccguggugaugaccgacggcagcgccagcggcaaggccgacaccaagauccuguucaucgaggagggcaagaucgugcacaccagcacccugagcggcagcgcccagcacguggaggagugcagcugcuaccccagauaccccggcgugagaugcgugugcagagacaacuggaagggcagcaacagacccaucguggacaucaacaucaaggacuacagcaucgugagcagcuacgugugcagcggccuggugggcgacacccccagaaagaacgacagcagcagcagcagccacugccuggaccccaacaacgaggagggcggccacggcgugaagggcugggccuucgacgacggcaacgacguguggaugggcagaaccaucagcgagaagcugagaagcggcuacgagaccuucaaggugaucgagggcuggagcaaccccaacagcaagcugcagaucaacagacaggugaucguggacagaggcaacagaagcggcuacagcggcaucuucagcguggagggcaagagcugcaucaacagaugcuucuacguggagcugaucagaggcagaaaggaggagaccgaggugcuguggaccagcaacagcaucgugguguucugcggcaccagcggcaccuacggcaccggcagcuggcccgacggcgccgacaucaaccugaugcccaucuga

SEQ ID NO: 174729 - RNA, 1410 nt, Artificial Sequence; identical to SEQ ID NO: 174387
  derived and/or modified CDS sequence (opt4) from neuraminidase__InfluenzaA__ABC43522

SEQ ID NO: 174730 - RNA, 1410 nt, Artificial Sequence; identical to SEQ ID NO: 174387
  derived and/or modified CDS sequence (opt4) from neuraminidase__InfluenzaA__ABC43533

SEQ ID NO: 174731 - RNA, 1410 nt, Artificial Sequence; identical to SEQ ID NO: 174387
  derived and/or modified CDS sequence (opt4) from neuraminidase__InfluenzaA__ABC43544

SEQ ID NO: 174732 - RNA, 1410 nt, Artificial Sequence; identical to SEQ ID NO: 174387
  derived and/or modified CDS sequence (opt4) from neuraminidase__InfluenzaA__ABC43555

SEQ ID NO: 174733 - RNA, 1410 nt, Artificial Sequence; identical to SEQ ID NO: 174630
  derived and/or modified CDS sequence (opt4) from neuraminidase__InfluenzaA__ABC46557

SEQ ID NO: 174734 - RNA, 1410 nt, Artificial Sequence
  derived and/or modified CDS sequence (opt4) from neuraminidase__InfluenzaA__ABC46579
augaaccccaaccagaagaucaucaccaucggcagcgugagccugaccaucgccaccaucugcuuccugaugcagaucgccauccuggugaccaccgugacccugcacuucaagcaguacgagugcagcagcccccccaacaaccaggugaugcccugcgagcccaucaucaucgagagaaacaucaccgagaucguguaccugaccaacaccaccaucgagaaggagaucugccccaagcugguggaguacagaaacuggagcaagccccagugcaagaucaccggcuucgcccccuucagcaaggacaacagcaucagacugagcgccggcggcgacaucugggugaccagagagcccuacgugagcugcgaccccggcaagugcuaccaguucgcccugggccagggcaccacccuggacaacaagcacagcaacgacaccauccacgacagaacccccuacagaacccugcugaugaacgagcugggcgugcccuuccaccugggcaccagacaggugugcaucgccuggagcagcagcagcugccacgacggcaaggccuggcugcacgugugcgugaccggccacgacaagaacgccaccgccagcuucaucuacgacggcagacugguggacagcaucggcagcuggagcaagaacauccugagaacccaggagagcgagugcgugugcaucaacggcaccugcaccguggugaugaccgacggcagcgccagcgagagagccgacaccaagauccuguucaucgaggagggcaagaucgugcacaucagcccccugagcggcagcgcccagcacguggaggagugcagcugcuaccccagauaccccggcgugagaugcgugugcagagacaacuggaagggcagcaacagacccgugguggacaucaacgugaaggacuacagcaucgugagcagcuacgugugcagcggccuggugggcgacacccccagaaagaacgacagaagcagcagcagcuacugcagaaaccccaacaacgagaagggcaaccacggcgugaagggcugggccuucgacgacggcaacgacguguggaugggcagaaccaucagcgaggagagcagaagcggcuacgagaccuucaaggugaucggcggcuggagcacccccaacagcaagcugcagaucaacagacaggugaucguggacagcgacaacagaagcggcuacagcggcaucuucagcguggagggcaagagcugcaucaacagaugcuucuacguggagcugaucagaggcagagagcaggagaccagagugugguggaccagcaacagcaucgugguguucugcggcaccagcggcaccuacggcaccggcagcuggcccgacggcgccgacaucaaccugaugcccaucuga

SEQ ID NO: 174735 - RNA, 1410 nt, Artificial Sequence; identical to SEQ ID NO: 174574
  derived and/or modified CDS sequence (opt4) from neuraminidase__InfluenzaA__ABC50170

SEQ ID NO: 174736 - RNA, 1410 nt, Artificial Sequence; identical to SEQ ID NO: 174574
  derived and/or modified CDS sequence (opt4) from neuraminidase__InfluenzaA__ABC50181

SEQ ID NO: 174737 - RNA, 1410 nt, Artificial Sequence; identical to SEQ ID NO: 174574
  derived and/or modified CDS sequence (opt4) from neuraminidase__InfluenzaA__ABC50192

SEQ ID NO: 174738 - RNA, 1410 nt, Artificial Sequence; identical to SEQ ID NO: 174226
  derived and/or modified CDS sequence (opt4) from neuraminidase__InfluenzaA__ABC50203

SEQ ID NO: 174739 - RNA, 1410 nt, Artificial Sequence
  derived and/or modified CDS sequence (opt4) from neuraminidase__InfluenzaA__ABC50214
augaaccccaaccagaagaucaucaccaucggcagcgugagccugaccaucgccaccaucugcuuccugaugcagaucgccauccuggugaccaccgugacccugcacuucaagcaguacgagugcaacagcccccccaacaaccaggugaugcugugcgagcccaccaucaucgagagaaacaucaccgagaucguguaccugaccaacaccaccaucgagaaggagaucugccccaagcuggccgaguacagaaacuggagcaagccccagugcaacaucaccggcuucgcccccuucagcaaggacaacagcaucagacugagcgccggcggcgacaucugggugaccagagagcccuacgugagcugcgaccccgacaagugcuaccaguucgcccugggccagggcaccacccugaacaacggccacagcaacgacaccgugcacgacagaacccccuacagaacccugcugaugaacgagcugggcgugcccuuccaccugggcaccagacaggugugcaucgccuggagcagcagcagcugccacgacggcaaggccuggcugcacgugugcgugaccggcgacgacgagaacgccaccgccagcuucaucuacaacggcagacugguggacagcaucggcagcuggagcaagaagauccugagaacccaggagagcgagugcgugugcaucaacggcaccugcaccguggugaugaccgacggcagcgccagcggcaaggccgacaccaagauccuguucaucgaggagggcaagaucgugcacaucagcacccugagcggcagcgcccagcacguggaggagugcagcugcuaccccagauaccccggcgugagaugcgugugcagagacaacuggaagggcagcaacagacccaucaucgacaucaacgugaaggacuacagcaucgugagcagcuacgugugcagcggccuggugggcgacacccccagaaagaacgacagcuucagcagcagccacugccuggaccccaacaacgaggagggcggccacggcgugaagggcugggccuucgacgacggcaacgacguguggaugggcagaaccaucagcgagaagcugagaagcggcuacgagaccuucaaggugaucgagggcuggagcaagcccaaccccaagcugcagaccaacagacaggugaucguggagagaggcaacagaagcggcuacagcggcaucuucagcguggagggcaagagcugcaucaacagaugcuucuacguggagcugaucagaggcagaaaggaggagaccgaggugugguggaccagcaacagcaucgugguguucugcggcaccagcggcaccuacggcaccggcagcuggcccgacggcgccgacaucaaccugaugcccaucuga

SEQ ID NO: 174740 - RNA, 1410 nt, Artificial Sequence; identical to SEQ ID NO: 174226
  derived and/or modified CDS sequence (opt4) from neuraminidase__InfluenzaA__ABC50225

SEQ ID NO: 174741 - RNA, 1410 nt, Artificial Sequence; identical to SEQ ID NO: 174226
  derived and/or modified CDS sequence (opt4) from neuraminidase__InfluenzaA__ABC50247

SEQ ID NO: 174742 - RNA, 1410 nt, Artificial Sequence
  derived and/or modified CDS sequence (opt4) from neuraminidase__InfluenzaA__ABC50258
augaaccccaaccagaagaucaucaccaucggcagcgugagccugaccaucgccaccaucugcuuccugaugcagaucgccauccuggugaccaccgugacccugcacuucaagcaguacgagugcaacagcccccccaacaaccaggugaugcugugcgagcccaccaucaucgagagaaacaucaccgagaucguguaccugaccaacaccaccaucgagaaggagaucugccccaagcuggccgaguacagaaacuggagcaagccccagugcaacaucaccggcuucgcccccuucagcaaggacaacagcaucagacugagcgccggcggcgacaucugggugaccagagagcccuacgugagcugcgaccccgacaagugcuaccaguucgcccugggccagggcaccacccugaacaacggccacagcaacgacaccgugcacgacagaacccccuacagaacccugcugaugaacgagcugggcgugcccuuccaccugggcaccagacaggugugcaucgccuggagcagcagcagcugccacgacggcaaggccuggcugcacgugugcgugaccggcgacgacgagaacgccaccgccagcuucaucuacaacggcagacugguggacagcaucggcagcuggagcaagaagauccugagaacccaggagagcgagugcgugugcaucaacggcaccugcaccguggugaugaccgacggcagcgccagcggcaaggccgacaccaagauccuguucaucgaggagggcaagaucgugcacaucagcacccugagcggcagcgcccagcacguggaggagugcagcugcuaccccagauaccccggcgugagaugcgugugcagagacaacuggaagggcagcaacagacccaucaucgacaucaacgugaaggacuacagcaucgugagcagcuacgugugcagcggccuggugggcgacacccccagaaagaacgacagcuucagcagcagccacugccuggaccccaacaacgaggagggcggccacggcgugaagggcugggccuucgacgacggcaacgacguguggaugggcagaaccaucagcgagaagcugagaagcggcuacgagaccuucaaggugaucgagggcuggagcaagcccaacagcaagcugcagaccaacagacaggugaucguggagagaggcaacagaagcggcuacagcggcaucuucagcaucgagggcaagagcugcaucaacagaugcuucuacguggagcugaucagaggcagaaaggaggagaccgaggugugguggaccagcaacagcaucgugguguucugcggcaccagcggcaccuacggcaccggcagcuggcccgacggcgccgacaucaaccugaugcccaucuga

SEQ ID NO: 174743 - RNA, 1410 nt, Artificial Sequence; identical to SEQ ID NO: 174226
  derived and/or modified CDS sequence (opt4) from neuraminidase__InfluenzaA__ABC50280

SEQ ID NO: 174744 - RNA, 1410 nt, Artificial Sequence; identical to SEQ ID NO: 174226
  derived and/or modified CDS sequence (opt4) from neuraminidase__InfluenzaA__ABC50291

SEQ ID NO: 174745 - RNA, 1410 nt, Artificial Sequence
  derived and/or modified CDS sequence (opt4) from neuraminidase__InfluenzaA__ABC50302
augaaccccaaccagaagaucaucaccaucggcagcgugagccugaccaucgccaccaucugcuuccugaugcagaucgccauccugaucaccaccgugacccugcacuucaagcaguacgagugcaacagcccccccaacaaccaggugaugcugugcgagcccaccaucaucgagagaaacaucaccgagaucguguaccugaccaacaccaccaucgagaaggagaucugccccaagcuggccgaguacagaaacuggagcaagccccagugcaacaucaccggcuucgcccccuucagcaaggacaacagcaucagacugagcgccggcggcgacaucugggugaccagagagcccuacgugagcugcgaccccgacaagugcuaccaguucgcccugggccagggcaccacccugaacaacggccacagcaacgacaccgugcacgacagaacccccuacagaacccugcugaugaacgagcugggcgugcccuuccaccugggcaccagacaggugugcaucgccuggagcagcagcagcugccacgacggcaaggccuggcugcacgugugcgugaccggcgacgacgagaacgccaccgccagcuucaucuacaacggcagacugguggacagcaucggcagcuggagcaagaagauccugagaacccaggagagcgagugcgugugcaucaacggcaccugcaccguggugaugaccgacggcagcgccagcggcaaggccgacaccaagauccuguucaucgaggagggcaagaucgugcacaucagcacccugagcggcagcgcccagcacguggaggagugcagcugcuaccccagauaccccggcgugagaugcgugugcagagacaacuggaagggcagcaacagacccaucguggacaucaacgugaaggacuacagcaucgugagcagcuacgugugcagcggccuggugggcgacacccccagaaagaacgacagcuucagcagcagccacugccuggaccccaacaacgaggagggcggccacggcgugaagggcugggccuucgacgacggcaacgacguguggaugggcagaaccaucagcgagaagcugagaagcggcuacgagaccuucaaggugaucgagggcuggagcaagcccaacagcaagcugcagaccaacagacaggugaucguggagagaggcaacagaagcggcuacagcggcaucuucagcguggagggcaagagcugcaucaacagaugcuucuacguggagcugaucagaggcagaaaggaggagaccgaggugugguggaccagcaacagcaucgugguguucugcggcaccagcggcaccuacggcaccggcagcuggcccgacggcgccgacaucaaccugaugcccaucuga

SEQ ID NO: 174746 - RNA, 1410 nt, Artificial Sequence
  derived and/or modified CDS sequence (opt4) from neuraminidase__InfluenzaA__ABC50313
augaaccccaaccagaagaucaucaccaucggcagcgugagccugaccaucgccaccaucugcuuccugaugcagaucgccauccuggugaccaccgugacccugcacuucaagcagcacgagugcaacagcccccccaacaaccaggugaugcugugcgagcccaccaucaucgagagaaacaucaccgagaucguguaccugaccaacaccaccaucgagaaggagaucugccccaagcuggccgaguacagaaacuggagcaagccccagugcaacaucaccggcuucgcccccuucagcaaggacaacagcaucagacugagcgccggcggcgacaucugggugaccagagagcccuacgugagcugcgaccccgacaagugcuaccaguucgcccugggccagggcaccacccugaacaacggccacagcaacgacaccgugcacgacagaacccccuacagaacccugcugaugaacgagcugggcgugcccuuccaccugggcaccagacaggugugcaucgccuggagcagcagcagcugccacgacggcaaggccuggcugcacgugugcgugaccggcgacgacgagaacgccaccgccagcuucaucuacaacggcagacugguggacagcaucggcagcuggagcaagaagauccugagaacccaggagagcgagugcgugugcaucaacggcaccugcaccguggugaugaccgacggcagcgccagcggcaaggccgacaccaagauccuguucaucgaggagggcaagaucgugcacaucagcacccugagcggcagcgcccagcacguggaggagugcagcugcuaccccagauaccccggcgugagaugcgugugcagagacaacuggaagggcagcaacagacccaucguggacaucaacgugaaggacuacagcaucgugagcagcuacgugugcagcggccuggugggcgacacccccagaaagaacgacagcuucagcagcagccacugccuggaccccaacaacgaggagggcggccacggcgugaagggcugggccuucgacgacggcaacgacguguggaugggcagaaccaucagcgagaagcugagaagcggcuacgagaccuucaaggugaucgagggcuggagcaagcccaacagcaagcugcagaccaacagacaggugaucguggagagaggcaacagaagcggcuacagcggcaucuucagcguggagggcaagagcugcaucaacagaugcuucuacguggagcugaucagaggcagaaaggaggagaccgaggugugguggaccagcaacagcaucgugguguucugcggcaccagcggcaccuacggcaccggcagcuggcccgacggcgccgacaucaaccugaugcccaucuga

SEQ ID NO: 174747 - RNA, 1410 nt, Artificial Sequence; identical to SEQ ID NO: 174226
  derived and/or modified CDS sequence (opt4) from neuraminidase__InfluenzaA__ABC50324

SEQ ID NO: 174748 - RNA, 1410 nt, Artificial Sequence; identical to SEQ ID NO: 174214
  derived and/or modified CDS sequence (opt4) from neuraminidase__InfluenzaA__ABC50335

SEQ ID NO: 174749 - RNA, 1410 nt, Artificial Sequence
  derived and/or modified CDS sequence (opt4) from neuraminidase__InfluenzaA__ABC50346
augaaccccaaccagaagaucaucaccaucggcagcgugagccugaccaucgccaccaucugcuuccugaugcagaucgccauccuggugaccaccgugacccugcacuucaagcaguacgagugcaacagcccccccaacaaccaggugaugcugugcgagcccaccaucaucgagagaaacaucaccgagaucguguaccugaccaacaccaccaucgagaaggagaucugccccaagcuggccgaguacagaaacuggagcaagccccagugcaacaucaccggcuucgcccccuucagcaaggacaacagcaucagacugagcgccggcggcgacaucugggugaccagagagcccuacgugagcugcgaccccgacaagugcuaccaguucgcccugggccagggcaccacccugaacaacggccacagcaacgacaccgugcacgacagaacccccuacagaacccugcugaugaacgagcugggcgugcccuuccaccugggcaccagacaggugugcaucgccuggagcagcagcagcugccacgacggcaaggccuggcugcacgugugcgugaccggcgacgacgagaacgccaccgccagcuucaucuacaacggcagacugguggacagcaucggcagcuggagcaagaagauccugagaacccaggagagcgagugcgugugcaucaacggcaccugcaccguggugaugaccgacggcagcgccagcggcaaggccgacaccaagauccuguucaucgaggagggcaagaucgugcacaucagcacccugagcggcagcgcccagcacguggaggagugcagcugcuaccccagauaccccggcgugagaugcgugugcagagacaacuggaagggcagcaacagacccaucaucgacaucaacgugaaggacuacagcaucgugagcagcuacgugugcagcggccuggugggcgacacccccagaaagaacgacagcuucagcagcagccacugccuggaccccaacaacgaggagggcggccacggcgugaagggcugggccuucgacgacggcaacgacguguggaugggcagaaccaucagcgagaagcugagaagcggcuacgagaccuucaaggugaucgagggcuggagcaagcccaacagcaagcugcagaccaacagacaggugaucguggagagaggcaacagaagcggcuacagcggcaucuucagcguggagggcaagagcugcaucaacagaugcuucuacguggagcugaucagaggcagaaaggaggagaccgaggugugguggaccagcaacagcaucgugguguucugcggcaccagcggcaccuacggcaccggcagcuggcccgacggcgccgacaucaaccugaugcccaucuga

SEQ ID NO: 174750 - RNA, 1410 nt, Artificial Sequence; identical to SEQ ID NO: 174226
  derived and/or modified CDS sequence (opt4) from neuraminidase__InfluenzaA__ABC50357

SEQ ID NO: 174751 - RNA, 1410 nt, Artificial Sequence; identical to SEQ ID NO: 174226
  derived and/or modified CDS sequence (opt4) from neuraminidase__InfluenzaA__ABC50368

SEQ ID NO: 174752 - RNA, 1410 nt, Artificial Sequence; identical to SEQ ID NO: 174226
  derived and/or modified CDS sequence (opt4) from neuraminidase__InfluenzaA__ABC50379

SEQ ID NO: 174753 - RNA, 1410 nt, Artificial Sequence; identical to SEQ ID NO: 174226
  derived and/or modified CDS sequence (opt4) from neuraminidase__InfluenzaA__ABC50390

SEQ ID NO: 174754 - RNA, 1410 nt, Artificial Sequence
  derived and/or modified CDS sequence (opt4) from neuraminidase__InfluenzaA__ABC50412
augaaccccaaccagaagaucaucaccaucggcagcgugagccugaccaucagcaccaucugcuucuucaugcagaucgccauccugaucaccaccgugacccugcacuucaagcaguacgaguucaacagcccccccaacaaccaggugaugcugugcgagcccaccaucaucgagagaaacaucaccgagaucguguaccugaccaacaccaccaucgagaaggagaucugccccaagcuggccgaguacagaaacuggagcaagccccagugcgacaucaccggcuucgcccccuucagcaaggacaacagcaucagacugagcgccggcggcgacaucugggugaccagagagcccuacgugagcugcgaccccgacaagugcuaccaguucgcccugggccagggcaccacccugaacaacgugcacagcaacgacaccgugcacgacagaacccccuacagaacccugcugaugaacgagcugggcgugcccuuccaccugggcaccaagcaggugugcaucgccuggagcagcagcagcugccacgacggcaaggccuggcugcacgugugcgugaccggcgacgacaagaacgccaccgccagcuucaucuacaacggcagacugguggacagcaucgugagcuggagcaaggagauccugagaacccaggagagcgagugcgugugcaucaacggcaccugcaccguggugaugaccgacggcagcgccagcggcaaggccgacaccaagauccuguucaucgaggagggcaagaucgugcacaccagcacccugagcggcagcgcccagcacguggaggagugcagcugcuaccccagauaccccggcgugagaugcgugugcagagacaacuggaagggcagcaacagacccaucguggacaucaacaucaaggacuacagcaucgugagcagcuacgugugcagcggccuggugggcgacacccccagaaagaacgacagcagcagcagcagccacugccuggaccccaacaacgaggagggcggccacggcgugaagggcugggccuucgacgacggcaacgacguguggaugggcagaaccaucagcgagaagcugagacugggcuacgagaccuucaaggugaucgagggcuggagcaaccccaacagcaagcugcagaucaacagacaggugaucguggacagaggcaacagaagcggcuacagcggcaucuucagcguggagggcaagagcugcaucaacagaugcuucuacguggagcugaucagaggcagaaaggaggagaccgaggugcuguggaccagcaacagcaucgugguguucugcggcaccagcggcaccuacggcaccggcagcuggcccgacggcgccgacaucaaccugaugcccaucuga

SEQ ID NO: 174755 - RNA, 1410 nt, Artificial Sequence; identical to SEQ ID NO: 174754
  derived and/or modified CDS sequence (opt4) from neuraminidase__InfluenzaA__ABC50423

SEQ ID NO: 174756 - RNA, 1410 nt, Artificial Sequence; identical to SEQ ID NO: 174339
  derived and/or modified CDS sequence (opt4) from neuraminidase__InfluenzaA__ABC54671

SEQ ID NO: 174757 - RNA, 1410 nt, Artificial Sequence; identical to SEQ ID NO: 174471
  derived and/or modified CDS sequence (opt4) from neuraminidase__InfluenzaA__ABC54682

SEQ ID NO: 174758 - RNA, 1410 nt, Artificial Sequence; identical to SEQ ID NO: 174651
  derived and/or modified CDS sequence (opt4) from neuraminidase__InfluenzaA__ABC67322

SEQ ID NO: 174759 - RNA, 1410 nt, Artificial Sequence; identical to SEQ ID NO: 174226
  derived and/or modified CDS sequence (opt4) from neuraminidase__InfluenzaA__ABC67474

SEQ ID NO: 174760 - RNA, 1410 nt, Artificial Sequence; identical to SEQ ID NO: 174749
  derived and/or modified CDS sequence (opt4) from neuraminidase__InfluenzaA__ABC67546

SEQ ID NO: 174761 - RNA, 1410 nt, Artificial Sequence
  derived and/or modified CDS sequence (opt4) from neuraminidase__InfluenzaA__ABC67557
augaaccccaaccagaagaucaucaccaucggcagcgugagccugaccaucagcaccaucugcuucuucaugcagaucgccauccuggugaccaccgugacccugcacuucaagcaguacgaguucaacagcccccccaacaaccaggugaugcugugcgagcccaccaucaucgagagaaacaucaccgagaucguguaccugaccaacaccaccaucgagaaggagaucugccccaagcuggccgaguacagaaacuggagcaagccccagugcgacaucaccggcuucgcccccuucagcaaggacaacagcaucagacugagcgccggcggcgacaucugggugaccagagagcccuacgugagcugcgaccccgacaagugcuaccaguucgcccugggccagggcaccacccugaacaacgugcacagcaacgacaccgugcacgacagaacccccuacagaacccugcugaugaacgagcugggcgugcccuuccaccugggcaccaagcaggugugcaucgccuggagcagcagcagcugccacgacggcaaggccuggcugcacgugugcgugaccggcgacgacaagaacgccaccgccagcuucaucuacaacggcagacugguggacagcaucgugagcuggagcaagaagauccugagaacccaggagagcgagugcgugugcaucaacggcaccugcaccguggugaugaccgacggcagcgccagcggcaaggccgacaccaagauccuguucaucgaggagggcaagaucgugcacaccagcacccugagcggcagcgcccagcacguggaggagugcagcugcuaccccagauaccccggcgugagaugcgugugcagagacaacuggaagggcagcaacagacccaucguggacaucaacaucaaggacuacagcaucgugagcagcuacgugugcagcggccuggugggcgacacccccagaaagaacgacagcagcagcagcagccacugccuggaccccaacaacgaggagggcggccacggcgugaagggcugggccuucgacgacggcaacgacguguggaugggcagaaccaucagcgagaagcugagaagcggcuacgagaccuucaaggugaucgagggcuggagcaaccccaacagcaagcugcagaucaacagacaggugaucguggacagaggcaacagaagcggcuacagcggcaucuucagcguggagggcaagagcugcaucaacagaugcuucuacguggagcugaucagaggcagaaaggaggagaccgaggugcuguggaccagcaacagcaucgugguguucugcggcaccagcggcaccuacggcaccggcagcuggcccgacggcgccgacaucaaccugaugcccaucuga

SEQ ID NO: 174762 - RNA, 1410 nt, Artificial Sequence
  derived and/or modified CDS sequence (opt4) from neuraminidase__InfluenzaA__ABC67568
augaaccccaaccagaagaucaucaccaucggcagcgugagccugaccaucgccaccaucugcuuccugaugcagaucgccauccuggugaccaccgugacccugcacuucaagcaguacgagugcgacagccccgccaacaaccaggugaugcccugcgagcccaucaucaucgagagaaacaucaccgagaucguguaccugaccaacaccaccaucgagaaggagaucugccccaagcugguggaguacagaaacuggagcaagccccagugcaagaucaccggcuucgcccccuucagcaaggacaacagcaucagacugagcgccggcggcgacaucugggugaccagagagcccuacgugagcugcgaccccggcaagugcuaccaguucgcccugggccagggcaccacccuggacaacaagcacagcaacgacaccauccacgacagaaccccccacagaacccugcugaugaacgagcugggcgugcccuuccaccugggcaccagacaggugugcaucgccuggagcagcagcagcugccacgacggcaaggccuggcugcacgugugcgugaccggcuacgacaagaacgccaccgccagcuucaucuacgacggcagacugguggacagcaucggcagcuggagccagaacauccugagaacccaggagagcgagugcgugugcaucaacggcaccugcaccguggugaugaccgacggcagcgccagcggcagagccgacaccaagauccuguucaucgaggagggcaagaucgugcacaucagcccccugagcggcagcgcccagcacguggaggagugcagcugcuaccccagauaccccggcgugagaugcaucugcagagacaacuggaagggcagcaacagacccgugguggacaucaacgugaaggacuacagcaucgacagcagcuacgugugcagcggccuggugggcgacacccccagaaacaacgacagaagcagcaacagcuacugcagaaaccccaacaacgagaagggcaaccacggcgugaagggcugggccuucgacgacggcaacgacguguggaugggcagaaccaucagcgaggacagcagaagcggcuacgagaccuucaaggugaucggcggcuggagcacccccaacagcaagcugcagaucaacagacaggugaucguggacagcgacaacagaagcggcuacagcggcaucuucagcguggagggcaagagcugcaucaacagaugcuucuacguggagcugaucagaggcagagagcaggagaccagagugugguggaccagcaacagcaucgugguguucugcggcaccagcggcaccuacggcaccggcagcuggcccgacggcgccaacaucaaccugaugcccaucuga

SEQ ID NO: 174763 - RNA, 1410 nt, Artificial Sequence
  derived and/or modified CDS sequence (opt4) from neuraminidase__InfluenzaA__ABC67579
augaaccccaaccagaagaucaucaccaucggcagcgugagccugaccaucgccaccaucugcuuccugaugcagaucgccauccuggugaccaccgugacccugcacuucaagcaguacgagugcaacagcccccccaacaaccaggugaugcugugcgagcccaccaucaucgagagaaacaucaccgagaucguguaccugaccaacaccaccaucgagaaggagaucugccccaagcccgccgaguacagaaacuggagcaagccccagugcaagaucaccggcuucgcccccuucagcaaggacaacagcaucagacugagcgccggcggcgacaucugggugaccagagagcccuacgugagcugcgaccccgacaagugcuaccaguucgcccugggccagggcaccacccugaacaacggccacagcaacgacaccgugcacgacagaacccccuacagaacccugcugaugaacgagcugggcgugcccuuccaccugggcaccaagcaggugugcaucgccuggagcagcagcagcugccacgacggcaaggccuggcugcacgugugcgugaccggccacgacgagaacgccaccgccagcuucaucuacgacggcagacugguggacagcaucggcagcuggagcaagaagauccugagaacccaggagagcgagugcgugugcaucaacggcaccugcaccguggugaugaccgacggcagcgccagcggcagagccgacaccaagauccuguucaucgaggagggcaagaucgugcacaucagccagcugagcggcagcgcccagcacguggaggagugcagcugcuaccccagauaccccggcgugagaugcgugugcagagacaacuggaagggcagcaacagacccaucguggacaucaacgugaaggaccacagcaucgugagcagcuacgugugcagcggccuggugggcgacacccccagaaagaacgacagcagcagcagcagccacugccugaaccccaacaacgaggagggcggccacggcgugaagggcugggccuucgacgacggcaacgacguguggaugggcagaaccaucagcgagaagcugagaagcggcuacgagaccuucaaggugaucgagggcuggagcaagcccaacagcaagcugcagaucaacagacaggugaucguggacagaggcaacagaagcggcuacagcggcaucuucagcguggagggcaagagcugcaucaacagaugcuucuacguggagcugaucagaggcagaaagcaggagaccgaggugugguggaccagcaacagcaucgugguguucugcggcaccagcggcaccuacggcaccggcagcuggcccgacggcgccgacaucaaccugaugcccaucuga

SEQ ID NO: 174764 - RNA, 1410 nt, Artificial Sequence; identical to SEQ ID NO: 174387
  derived and/or modified CDS sequence (opt4) from neuraminidase__InfluenzaA__ABC67590

SEQ ID NO: 174765 - RNA, 1410 nt, Artificial Sequence; identical to SEQ ID NO: 174387
  derived and/or modified CDS sequence (opt4) from neuraminidase__InfluenzaA__ABC67601

SEQ ID NO: 174766 - RNA, 1410 nt, Artificial Sequence; identical to SEQ ID NO: 174226
  derived and/or modified CDS sequence (opt4) from neuraminidase__InfluenzaA__ABC67612

SEQ ID NO: 174767 - RNA, 1410 nt, Artificial Sequence; identical to SEQ ID NO: 174226
  derived and/or modified CDS sequence (opt4) from neuraminidase__InfluenzaA__ABC67623

SEQ ID NO: 174768 - RNA, 1410 nt, Artificial Sequence
  derived and/or modified CDS sequence (opt4) from neuraminidase__InfluenzaA__ABC67634
augaaccccaaccagaagaucaucaccaucggcagcgugagccugaccaucgccaccaucugcuuccugaugcagaucgccauccuggugaccaccgugacccugcacuucaagcaguacgagugcaaccccccccccaacaaccaggugaugcugugcgagcccaccaucaucgagagaaacaucaccgagaucguguaccugaccaacaccaccaucgagaaggagaucugccccaagcuggccgaguacagaaacuggagcaagccccagugcaacaucaccggcuucgcccccuucagcaaggacaacagcaucagacugagcgccggcggcgacaucugggugaccagagagcccuacgugagcugcgaccccgacaagugcuaccaguucgcccugggccagggcaccacccugaacaacggccacagcaacgacaccgugcacgacagaacccccuacagaacccugcugaugaacgagcugggcgugcccuuccaccugggcaccagacaggugugcaucgccuggagcagcagcagcugccacgacggcaaggccuggcugcacgugugcgugaccggcgacgacgagaacgccaccgccagcuucaucuacaacggcagacugguggacagcaucggcagcuggagcaagaagauccugagaacccaggagagcgagugcgugugcaucaacggcaccugcaccguggugaugaccgacggcagcgccagcggcaaggccgacaccaagauccuguucaucgaggagggcaagaucgugcacaucagcacccugagcggcagcgcccagcacguggaggagugcagcugcuaccccagauaccccggcgugagaugcgugugcagagacaacuggaagggcagcaacagacccaucguggacaucaacgugaaggacuacagcaucgugagcagcuacgugugcagcggccuggugggcgacacccccagaaagaacgacagcuucagcagcagccacugccuggaccccaacaacgaggagggcggccacggcgugaagggcugggccuucgacgacggcaacgacguguggaugggcagaaccaucagcgagaagcugagaagcggcuacgagaccuucaaggugaucgagggcuggagcaagcccaacagcaagcugcagaccaacagacaggugaucguggagagaggcaacagaagcggcuacagcggcaucuucagcguggagggcaagagcugcaucaacagaugcuucuacguggagcugaucagaggcagaaaggaggagaccgaggugugguggaccagcaacagcaucgugguguucugcggcaccagcggcaccuacggcaccggcagcuggcccgacggcgccgacaucaaccugaugcccaucuga

SEQ ID NO: 174769 - RNA, 1410 nt, Artificial Sequence; identical to SEQ ID NO: 174226
  derived and/or modified CDS sequence (opt4) from neuraminidase__InfluenzaA__ABC67645

SEQ ID NO: 174770 - RNA, 1410 nt, Artificial Sequence; identical to SEQ ID NO: 174226
  derived and/or modified CDS sequence (opt4) from neuraminidase__InfluenzaA__ABC67656

SEQ ID NO: 174771 - RNA, 1410 nt, Artificial Sequence
  derived and/or modified CDS sequence (opt4) from neuraminidase__InfluenzaA__ABC67700
augaaccccaaccagaagaucaucaccaucggcagcgugagccugaccaucagcaccaucugcuucuucaugcagaucgccauccugaucaccaccgugacccugcacuucaagcaguacgaguucaacagcccccccaacaaccaggugaugcugugcgagcccaccaucaucgagagaaacaucaccgagaucguguaccugaccaacaccaccaucgagaaggagaucugccccaagcuggccgaguacagaaacuggagcaagccccagugcaacaucaccggcuucgcccccuucagcaaggacaacagcaucagacugagcgccggcggcgacaucugggugaccagagagcccuacgugagcugcgaccccgacaagugcuaccaguucgcccugggccagggcaccacccugaacaacgugcacagcaacgacaccgugcacgacagaacccccuacagaacccugcugaugaacgagcugggcgugcccuuccaccugggcaccaagcaggugugcaucgccuggagcagcagcagcugccacgacggcaaggccuggcugcacgugugcgugaccggcgacgacaagaacgccaccgccagcuucaucuacaacggcagacugguggacagcaucgugagcuggagcaaggagauccugagaacccaggagagcgagugcgugugcaucaacggcaccugcaccguggugaugaccgacggcagcgccagcggcaaggccgacaccaagauccuguucaucgaggagggcaagaucgugcacaccagcacccugagcggcagcgcccagcacguggaggagugcagcugcuaccccagauaccccggcgugagaugcgugugcagagacaacuggaagggcagcaacagacccaucguggacaucaacaucaaggacuacagcaucgugagcagcuacgugugcagcggccuggugggcgacacccccagaaagaacgacagcagcagcagcagccacugccuggaccccaacaacgaggagggcggccacggcgugaagggcugggccuucgacgacggcaacgacguguggaugggcagaaccaucagcgagaagcugagaagcggcuacgagaccuucaaggugaucgagggcuggagcaacagcaacagcaagcugcagaucaacagacaggugaucguggacagaggcaacagaagcggcuacagcggcaucuucagcguggagggcaagagcugcaucaacagaugcuucuacguggagcugaucagaggcagaaaggaggagaccgaggugcuguggaccagcaacagcaucgugguguucugcggcaccagcggcaccuacggcaccggcagcuggcccgacggcgccgacaucaaccugaugcccaucuga

SEQ ID NO: 174772 - RNA, 1410 nt, Artificial Sequence
  derived and/or modified CDS sequence (opt4) from neuraminidase__InfluenzaA__ABC67711
augaaccccaaccagaagaucaucaccaucggcagcgugagccugaccaucagcaccaucugcuucuucaugcagaucgccauccugaucaccaccgugacccugcacuucaagcaguacgaguucaacagcccccccaacaaccaggugaugcugugcgagcccaccaucaucgagagaaacaucaccgagaucguguaccugaccaacaccaccaucgagaaggagaucugccccaagcuggccgaguacagaaacuggagcaagccccagugcaacaucaccggcuucgcccccuucagcaaggacaacagcaucagacugagcgccggcggcgacaucugggugaccagagagcccuacgugagcugcgaccccgacaagugcuaccaguucgcccugggccagggcaccacccugaacaacgugcacagcaacgacaccgugcacgacagaacccccuacagaacccugcugaugaacgagcugggcgugcccuuccaccugggcaccaagcaggugugcaucgccuggagcagcagcagcugccacgacggcaaggccuggcugcacgugugcgugaccggcgacgacaagaacgccaccgccagcuucaucuacaacggcagacugguggacagcaucgugagcuggagcaaggagauccugagaacccaggagagcgagugcgugugcaucaacggcaccugcaccguggugaugaccgacggcagcgccagcggcaaggccgacaccaagauccuguucaucgaggagggcaagaucgugcacaccagcacccugagcggcagcgcccagcacguggaggagugcagcugcuaccccagauaccccggcgugagaugcgugugcagagacaacuggaagggcagcaacagacccaucguggacaucaacaucaaggacuacagcaucgugagcagcuacgugugcagcggccuggugggcgacacccccagaaagaacgacagcagcagcagcagccacugccuggaccccaacaacgaggagggcggccacggcgugaagggcugggccuucgacgacggcaacgacguguggaugggcagaaccaucagcgagaagcugagaagcggcuacgagaccuucaaggugaucgagggcuggagcaaccccaacagcaagcugcagaucaacagacaggugaucguggacagaggcaacagaagcggcuacagcggcaucuucagcguggagggcaagagcugcaucaacagaugcuucuacguggagcugaucagaggcagaaaggaggagaccgaggugcuguggaccagcaacagcaucgugguguucugcggcaccagcggcaccuacggcaccggcagcuggcccgacggcgccgacaucaaccugaugcccaucuga

SEQ ID NO: 174773 - RNA, 1410 nt, Artificial Sequence
  derived and/or modified CDS sequence (opt4) from neuraminidase__InfluenzaA__ABC67736
augaaccccaaccagaagaucaucaccaucggcagcgugagccugaccaucagcaccaucugcuucuucaugcagaucgccauccugaucaccaccgugacccugcacuucaagcaguacgaguucaacagcccccccaacaaccaggugaugcugugcgagcccaccaucaucgagagaaacaucaccgagaucguguaccugaccaacaccaccaucgagaaggagaucugccccaagcuggccgaguacagaaacuggagcaagccccagugcaacaucaccggcuucgcccccuucagcaaggacaacagcaucagacugagcgccggcggcgacaucugggugaccagagagcccuacgugagcugcgaccccgacaagugcuaccaguucgcccugggccagggcaccacccugaacaacgugcacagcaacgacaccgugcacgacagaacccccuacagaacccugcugaugaacgagcugggcgugcccuuccaccugggcaccaagcaggugugcguggccuggagcagcagcagcugccacgacggcaaggccuggcugcacgugugcgugaccggcgacgacaagaacgccaccgccagcuucaucuacaacggcagacugguggacagcaucgugagcuggagcaaggagauccugagaacccaggagagcgagugcgugugcaucaacggcaccugcaccguggugaugaccgacggcagcgccagcggcaaggccgacaccaagauccuguucaucgaggagggcaagaucgugcacaccagcacccugagcggcagcgcccagcacguggaggagugcagcugcuaccccagauaccccggcgugagaugcgugugcagagacaacuggaagggcagcaacagacccaucguggacaucaacaucaaggacuacagcaucgugagcagcuacgugugcagcggccuggugggcgacacccccagaaagaacgacagcagcagcagcagccacugccuggaccccaacaacgaggagggcggccacggcgugaagggcugggccuucgacgacggcaacgacguguggaugggcagaaccaucagcgagaagcugagaagcggcuacgagaccuucaaggugaucgagggcuggagcaaccccaacagcaagcugcagaucaacagacaggugaucguggacagaggcaacagaagcggcuacagcggcaucuucagcguggagggcaagagcugcaucaacagaugcuucuacguggagcugaucagaggcagaaaggaggagaccgaggugcuguggaccagcaacagcaucgugguguucugcggcaccagcggcaccuacggcaccggcagcuggcccgacggcgccgacaucaaccugaugcccaucuga

SEQ ID NO: 174774 - RNA, 1410 nt, Artificial Sequence
  derived and/or modified CDS sequence (opt4) from neuraminidase__InfluenzaA__ABC67809
augaaccccaaccagaagaucaucaccaucggcagcgugagccugaccaucagcaccaucugcuucuucaugcagaucgccauccugaucaccaccgugacccugcacuucaagcaguacgaguucaacagcccccccaacaaccaggugaugcugugcgagcccaccaucaucgagagaaacaucaccgagaucguguaccugaccaacaccaccaucgagaaggagaucugccccaagcuggccgaguacagaaacuggagcaagccccagugcgacaucaccggcuucgcccccuucagcaaggacaacagcaucagacugagcgccggcggcgacaucugggugaccagagagcccuacgugagcugcgaccccgacaagugcuaccaguucgcccugggccagggcaccacccugaacaacgugcacagcaacgacaccgugcacgacagaacccccuacagaacccugcugaugaacgagcugggcgugcccuuccaccugggcaccaagcaggugugcaucgccuggagcagcagcagcugccacgacggcaaggccuggcugcacgugugcgugaccggcgacgacaagaacgccaccgccagcuucaucuacaacggcagacugguggacagcaucgugagcuggagcaagaagauccugagaacccaggagagcgagugcgugugcaucaacggcaccugcaccguggugaugaccgacggcagcgccagcggcaaggccgacaccaagauccuguucaucgaggagggcaagaucgugcacaccagcacccugagcggcagcgcccagcacguggaggagugcagcugcuaccccagauaccccggcgugagaugcgugugcagagacaacuggaagggcagcaacagacccaucguggacaucaacaucaaggacuacagcaucgugagcagcuacgugugcagcggccuggugggcgacacccccagaaagaacgacagcagcagcagcagccacugccuggaccccaacaacgaggagggcggccacggcgugaagggcugggccuucgacgacggcaacgacguguggaugggcagaaccaucagcgagaagcugagaagcggcuacgagaccuucaaggugaucgagggcuggagcaaccccaacagcaagcugcagaucaacagacaggugaucguggacagaggcaacagaagcggcuacagcggcaucuucagcguggagggcaagagcugcaucaacagaugcuucuacguggagcugaucagaggcagaaaggaggagaccgaggugcuguggaccagcaacagcaucgugguguucugcggcaccagcggcaccuacggcaccggcagcuggcccgacggcgccgacaucaaccugaugcccaucuga

SEQ ID NO: 174775 - RNA, 1410 nt, Artificial Sequence; identical to SEQ ID NO: 174651
  derived and/or modified CDS sequence (opt4) from neuraminidase__InfluenzaA__ABC67820

SEQ ID NO: 174776 - RNA, 1410 nt, Artificial Sequence; identical to SEQ ID NO: 174630
  derived and/or modified CDS sequence (opt4) from neuraminidase__InfluenzaA__ABC67842

SEQ ID NO: 174777 - RNA, 1410 nt, Artificial Sequence; identical to SEQ ID NO: 174226
  derived and/or modified CDS sequence (opt4) from neuraminidase__InfluenzaA__ABC67853

SEQ ID NO: 174778 - RNA, 1410 nt, Artificial Sequence; identical to SEQ ID NO: 174630
  derived and/or modified CDS sequence (opt4) from neuraminidase__InfluenzaA__ABC67864

SEQ ID NO: 174779 - RNA, 1410 nt, Artificial Sequence; identical to SEQ ID NO: 174749
  derived and/or modified CDS sequence (opt4) from neuraminidase__InfluenzaA__ABC67886

SEQ ID NO: 174780 - RNA, 1410 nt, Artificial Sequence; identical to SEQ ID NO: 174226
  derived and/or modified CDS sequence (opt4) from neuraminidase__InfluenzaA__ABC67897

SEQ ID NO: 174781 - RNA, 1410 nt, Artificial Sequence; identical to SEQ ID NO: 174226
  derived and/or modified CDS sequence (opt4) from neuraminidase__InfluenzaA__ABC67970

SEQ ID NO: 174782 - RNA, 1410 nt, Artificial Sequence
  derived and/or modified CDS sequence (opt4) from neuraminidase__InfluenzaA__ABC67981
augaaccccaaccagaagaucaucaccaucggcagcgugagccugaccaucgccaccaucugcuuccugaugcagaucgccauccuggugaccaccgugacccugcacuucaagcaguacgagugcaacagcccccccaacaaccaggugaugcugugcgagcccaccaucaucgagagaaacaucaccgagaucguguaccugaccaacaccaccaucgagaaggagaucugccccaagcuggccgaguacagaaacuggagcaagccccagugcaacaucaccggcuucgcccccuucagcaaggacaacagcaucagacugagcgccggcggcgacaucugggugaccagagagcccuacgugagcugcgaccccgacaagugcuaccaguucgcccugggccagggcaccacccugaacaacggccacagcaacgacaccgugcacgacagaacccccuacagaacccugcugaugaacgagcugggcgugcccuuccaccugggcaccagacaggugugcaucgccuggagcagcagcagcugccacgacggcaaggccuggcugcacgugugcgugaccggcgacgacgagaacgccaccgccagcuucaucuacaacggcagacugguggacagcaucggcagcuggagcaagaagauccugagaacccaggagagcgagugcgugugcaucaacggcaccugcaccguggugaugaccgacggcagcgccagcggcaaggccgacaccaagauccuguucaucgaggagggcaagaucgugcacaucagcacccugagcggcagcgcccagcacguggaggagugcagcugcuacccccaguaccccggcgugagaugcgugugcagagacaacuggaagggcagcaacagacccaucguggacaucaacgugaaggacuacagcaucgugagcagcuacgugugcagcggccuggugggcgacacccccagaaagaacgacagcuucagcagcagccacugccuggaccccaacaacgaggagggcggccacggcgugaagggcugggccuucgacgacggcaacgacguguggaugggcagaaccaucagcgagaagcugagaagcggcuacgagaccuucaaggugaucgagggcuggagcaagcccaacagcaagcugcagaccaacagacaggugaucguggagagaggcaacagaagcggcuacagcggcaucuucagcguggagggcaagagcugcaucaacagaugcuucuacguggagcugaucagaggcagaaaggaggagaccgaggugugguggaccagcaacagcaucgugguguucugcggcaccagcggcaccuacggcaccggcagcuggcccgacggcgccgacaucaaccugaugcccaucuga

SEQ ID NO: 174783 - RNA, 1410 nt, Artificial Sequence
  derived and/or modified CDS sequence (opt4) from neuraminidase__InfluenzaA__ABC67992
augaaccccaaccagaagaucaucaccaucggcagcgugagccugaccaucgccaccaucugcuuccugaugcagaucgccauccuggugaccaccgugacccugcacuucaagcaguacgagugcaacagcccccccaacaaccaggugaugcugugcgagcccaccaucaucgagagaaacaucaccgagaucguguaccugaccaacaccaccaucgagaaggagaucugccccaagcuggccgaguacagaaacuggagcaagccccagugcaacaucaccggcuucgcccccuucagcaaggacaacagcaucagacugagcgccggcggcgacaucugggugaccagagagcccuacgugagcugcgaccccgacaagugcuaccaguucgcccugggccagggcaccacccugaacaacggccacagcaacgacaccgugcacgacagaacccccuacagaacccugcugaugaacgagcugggcgugcccuuccaccugggcaccagacaggugugcaucgccuggagcagcagcagcugccacgacggcaaggccuggcugcacgugugcgugaccggcgacgacgagaacgccaccgccagcuucaucuacaacggcagacugguggacagcaucggcagcuggagcaagaagauccugagaacccaggagagcgagugcgugugcaucaacggcaccugcaccguggugaugaccgacggcagcgccagcggcaaggccgacaccaagauccuguucaucgaggagggcaagaucgugcacaucagcacccugagcggcagcgcccagcacguggaggagugcagcugcuaccccagauaccccggcgugagaugcgugugcagagacaacuggaagggcagcaacagacccaucguggacaucaacgugaaggacuacagcaucgugagcagcuacgugugcagcggccuggugggcgacacccccagaaagaacaacagcuucagcagcagccacugccuggaccccaacaacgaggagggcggccacggcgugaagggcugggccuucgacgacggcaacgacguguggaugggcagaaccaucagcgagaagcugagaagcggcuacgagaccuucaaggugaucgagggcuggagcaagcccaacagcaagcugcagaccaacagacaggugaucguggagagaggcaacagaagcggcuacagcggcaucuucagcguggagggcaagagcugcaucaacagaugcuucuacguggagcugaucagaggcagaaaggaggagaucgaggugugguggaccagcaacagcaucgugguguucugcggcaccagcggcaccuacggcaccggcagcuggcccgacggcgccgacaucaaccugaugcccaucuga

SEQ ID NO: 174784 - RNA, 1410 nt, Artificial Sequence; identical to SEQ ID NO: 174749
  derived and/or modified CDS sequence (opt4) from neuraminidase__InfluenzaA__ABC68003

SEQ ID NO: 174785 - RNA, 1410 nt, Artificial Sequence
  derived and/or modified CDS sequence (opt4) from neuraminidase__InfluenzaA__ABC68052
augaaccccaaccagaagaucaucaccaucggcagcgugagccugaccaucgccaccaucugcuuccugaugcagaucgccauccuggugaccaccgugacccugcacuucaagcaguacgagugcaacagcccccccaacaaccaggugaugcugugcgagcccaccaucaucgagagaaacaucaccgagaucguguaccugaccaacaccaccaucgagaaggagaucugccccaagcuggccgaguacagaaacuggagcaagccccagugcaacaucaccggcuucgcccccuucagcaaggacaacagcaucagacugagcgccggcggcgacaucugggugaccagagagcccuacgugagcugcgaccccgacaagugcuaccaguucgcccugggccagggcaccacccugaacaacggccacagcaacgacaccgugcacgacagaacccccuacagaacccugcugaugaacgagcugggcgugcccuuccaccugggcaccagacaggugugcaucgccuggagcagcagcagcugccacgacggcaaggccuggcugcacgugugcgugaccggcgacgacgagaacgccaccgccagcuucaucuacaacggcagacugguggacagcaucggcagcuggagcaagaagauccugagaacccaggagagcgagugcgugugcaucaacggcaccugcaccguggugaugaucgacggcagcgccagcggcaaggccgacaccaagauccuguucaucgaggagggcaagaucgugcacaucagcacccugagcggcagcgcccagcacguggaggagugcagcugcuaccccagauaccccggcgugagaugcgugugcagagacaacuggaagggcagcaacagacccaucguggacaucaacgugaaggacuacagcaucgugagcagcuacgugugcagcggccuggugggcgacacccccagaaagaacgacagcuucagcagcagccacugccuggaccccaacaacgaggagggcggccacggcgugaagggcugggccuucgacgacggcaacgacguguggaugggcagaaccaucagcgagaagcugagaagcggcuacgagaccuucaaggugaucgagggcuggagcaagcccaacagcaagcugcagaccaacagacaggugaucguggagagaggcaacagaagcggcuacagcggcaucuucagcguggagggcaagagcugcaucaacagaugcuucuacguggagcugaucagaggcagaaaggaggagaccgaggugugguggaccagcaacagcaucgugguguucugcggcaccagcggcaccuacggcaccggcagcuggcccgacggcgccgacaucaaccugaugcccaucuga

SEQ ID NO: 174786 - RNA, 1410 nt, Artificial Sequence; identical to SEQ ID NO: 174226
  derived and/or modified CDS sequence (opt4) from neuraminidase__InfluenzaA__ABC68063

SEQ ID NO: 174787 - RNA, 1410 nt, Artificial Sequence; identical to SEQ ID NO: 174226
  derived and/or modified CDS sequence (opt4) from neuraminidase__InfluenzaA__ABC68074

SEQ ID NO: 174788 - RNA, 1410 nt, Artificial Sequence; identical to SEQ ID NO: 174772
  derived and/or modified CDS sequence (opt4) from neuraminidase__InfluenzaA__ABC68085

SEQ ID NO: 174789 - RNA, 1410 nt, Artificial Sequence
  derived and/or modified CDS sequence (opt4) from neuraminidase__InfluenzaA__ABC68096
augaaccccaaccagaagaucaucaccaucggcagcgugagccugaccaucgccaccaucugcuuccugaugcagaucgccauccuggugaccaccgugacccugcacuucaagcaguacgagugcaacagcccccccaacaaccaggugaugcugugcgagcccaccaucaucgagagaaacaucaccgagaucguguaccugaccaacaccaccaucgagaaggagaucugccccaagcuggccgaguacagaaacuggagcaagccccagugcaacaucaccggcuucgcccccuucagcaaggacaacagcaucagacugagcgccggcggcgacaucugggugaccagagagcccuacgugagcugcgaccccgacaagugcuaccaguucgcccugggccagggcaccacccugaacaacggccacagcaacgacaccgugcacgacagaacccccuacagaacccugcugaugaacgagcugggcgugcccuuccaccugggcaccagacaggugugcaucgccuggagcagcagcagcugccacgacggcaaggccuggcugcacgugugcgugaccggcgacgacgagaacgccaccgccagcuucaucuacaacggcagacugguggacagcaucggcagcuggagcaagaagauccugagaacccaggagagcgagugcgugugcaucaacggcaccugcaccguggugaugaccgacggcagcgccagcggcaaggccgacaccaagauccuguucaucgaggagggcaagaucgugcacaucagcacccugagcggcagcgcccagcacguggaggagugcagcugcuaccccagauaccccggcgugagaugcgugugcagagacaacuggaagggcagcaacagacccaucguggacaucaacgugaaggacuacagcaucgugagcagcuacgugugcagcggccuggugggcgacacccccagaaagaacgacagcuucagcagcagccacugccuggaccccaacaacgaggagggcggccacggcgugaagggcugggccuucgacgacggcaacgacguguggaugggcagaaccaucagcgagaagcugagaagcggcuacgagaccuucaaggugaucgagggcuggagcaagcccaacagcaagcugcacaucaacagacaggugaucguggagagaggcaacagaagcggcuacagcggcaucuucagcguggagggcaagagcugcaucaacagaugcuucuacguggagcugaucagaggcagaaaggaggagaccgaggugugguggaccagcaacagcaucgugguguucugcggcaccagcggcaccuacggcaccggcagcuggcccgacggcgccgacaucaaccugaugcccaucuga

SEQ ID NO: 174790 - RNA, 1410 nt, Artificial Sequence
  derived and/or modified CDS sequence (opt4) from neuraminidase__InfluenzaA__ABC68225
augaaccccaaccagaagaucaucaccaucggcagcgugagccugaccaucgccaccaucugcuuccugaugcagaucgccauccuggugaccaccgugacccugcacuucaagcaguacgagugcaacagcccccccaacaaccaggugaugcugugcgagcccaccaucaucgagagaaacaucaccgagaucguguaccugaccaacaccaccaucgagaaggagaucugccccaagcuggccgaguacagaaacuggagcaagccccagugcaacaucaccggcuucgcccccuucagcaaggacaacagcaucagacugagcgccggcggcgacaucugggugaccagagagcccuacgugagcugcgaccccgacaagugcuaccaguucgcccugggccagggcaccacccugaacaacggccacagcaacgacaccgugcacgacagaacccccuacagaacccugcugaugaacgagcugggcgugcccuuccaccugggcaccaagcaggugugcaucgccuggagcagcagcagcugccacgacggcaaggccuggcugcacgugugcgugaccggcgacgacgagaacgccaccgccagcuucaucuacaacggcagacugguggacagcaucggcagcuggagcaagaagauccugagaacccaggagagcgagugcgugugcaucaacggcaccugcaccguggugaugaccgacggcagcgccagcggcaaggccgacaccaagauccuguucaucgaggagggcaagaucgugcacaccagcagccugagcggcagcgcccagcacguggaggagugcagcugcuaccccagauaccccggcgugagaugcgugugcagagacaacuggaagggcagcaacagacccaucguggacaucaacgugaaggacuacagcaucgugagcagcuacgugugcagcggccuggugggcgacacccccagaaagaacgacagcagcagcagcagccacugccuggaccccaacaacgaggagggcggccacggcgugaagggcugggccuucgacgacggcaacgacguguggaugggcagaaccaucagcgagaagcugagaagcggcuacgagaccuucaaggugaucgagggcuggagcaagcccaacagcaagcugcagaucaacagacaggugaucguggacagaggcaacagaagcggcuacagcggcaucuucagcguggagagcaagagcugcaucaacagaugcuucuacguggagcugaucagaggcagaaagcaggagaccgaggugcuguggaccagcaacagcaucgugguguucugcggcaccagcggcaccuacggcaccggcagcuggcccgacggcgccgacaucaaccugaugcccaucuga

SEQ ID NO: 174791 - RNA, 1410 nt, Artificial Sequence; identical to SEQ ID NO: 174579
  derived and/or modified CDS sequence (opt4) from neuraminidase__InfluenzaA__ABC68236

SEQ ID NO: 174792 - RNA, 1350 nt, Artificial Sequence
  derived and/or modified CDS sequence (opt4) from neuraminidase__InfluenzaA__ABC72646
augaaccccaacaagaagaucaucaccaucggcagcaucugcauggugaccggcauggugagccugaugcugcagaucggcaaccugaucagcaucugggugagccacagcauccacaccggcaaccagcagaaggccgagcccaucagcaacaccaacuuccugaccgagaaggccguggccagcgugaagcuggccggcaacagcagccugugccccaucaacggcugggccguguacagcaaggacaacagcaucagaaucggcagcaagggcgacguguucgugaucagagagcccuucaucagcugcagccaccuggagugcagaaccuucuuccugacccagggcagccugcugaacgacaagcacagcaacggcaccgugaaggacagaagcccccacagaacccugaugagcugccccgugggcgaggcccccagccccuacaacagcagauucgagagcguggccuggagcgccagcgccugccacgacggcaccagcuggcugaccaucggcaucagcggccccgacagcggcgccguggccgugcugaaguacaacggcaucaucaccgacaccaucaagagcuggagaaacaacauccugagaacccaggagagcgagugcgccugcgugaacggcagcugcuucaccgugaugaccgacggccccagcaacggccaggccagccacaagaucuucaagauggacaagggcaagguggugaagagcguggagcuggacgcccccaacuaccacuacgaggagugcagcugcuaccccgacgccggcgagaucaccugcgugugcagagacaacuggcacggcagcaacagacccugggugagcuucaaccagaaccuggaguaccagaucggcuacaucugcagcggcguguucggcgacacccccagacccaacgacggcaccggcagcugcggccccgugagcagcaacggcaccuacggcgugaagggcuucagcuucaaguacggcaacggcguguggaucggcagaaccaagagcaccaacagcagaagcggcuucgagaugaucugggaccccaacggcuggaccgagaccgacagcagcuucagcgugaagcaggacaucguggccaucaccgacuggagcggcuacagcggcagcuucgugcagcaccccgagcugaccggccuggacugcaucagacccugcuucuggguggagcugaucagaggcagacccaaggagagcaccaucuggaccagcggcagcagcaucagcuucugcggcgugaacagcgacaccgugggcuggagcuggcccgacggcgccgagcugcccuucaccaucgacaaguga

SEQ ID NO: 174793 - RNA, 1410 nt, Artificial Sequence; identical to SEQ ID NO: 174155
  derived and/or modified CDS sequence (opt4) from neuraminidase__InfluenzaA__ABC84392

SEQ ID NO: 174794 - RNA, 1410 nt, Artificial Sequence; identical to SEQ ID NO: 174569
  derived and/or modified CDS sequence (opt4) from neuraminidase__InfluenzaA__ABC84403

SEQ ID NO: 174795 - RNA, 1410 nt, Artificial Sequence; identical to SEQ ID NO: 174574
  derived and/or modified CDS sequence (opt4) from neuraminidase__InfluenzaA__ABC84414

SEQ ID NO: 174796 - RNA, 1410 nt, Artificial Sequence
  derived and/or modified CDS sequence (opt4) from neuraminidase__InfluenzaA__ABC84425
augaaccccaaccagaagaucaucaccaucggcagcgugagccugaccaucagcaccaucugcuucuucaugcagaucgccauccugaucaccaccgugacccugcacuucaagcaguacgaguucaacagcccccccaacaaccaggugaugcugugcgagcccaccaucaucgagagaaacaucaccgagaucguguaccugaccaacaccaccaucgagaaggagaucugccccaagcuggccgaguacagaaacuggagcaagccccagugcgacaucaccggcuucgcccccuucagcaaggacaacagcaucagacugagcgccggcggcgacaucugggugaccagagagcccuacgugagcugcgaccccgacaagugcuaccaguucgcccugggccagggcaccacccugaacaacgugcacagcaacgacaccgugcacgacagaacccccuacagaacccugcugaugaacgagcugggcgugcccuuccaccugggcaccaagcaggugugcaucgccuggagcagcagcagcugccacgacggcaaggccuggcugcacgugugcgugaccggcgacgacaagaacgccaccgccagcuucaucuacaacggcagacugguggacagcaucgugagcuggagcaaggagauccugagaacccaggagagcgagugcgugugcaucaacggcaccugcaccguggugaugaccgacggcagcgccagcggcaaggccgacaccaagauccuguucaucgaggagggcaagaucgugcacaccagcacccugagcggcagcgcccagcacguggaggagugcagcugcuaccccagauaccccggcgugagaugcgugugcagagacaacuggaagggcagcaacagacccaucguggacaucaacaucaaggacuacagcaucgugagcagcuacgugugcagcggccuggugggcgacacccccagaaagaacgacagcagcagcagcagccacugccuggaccccaacaacgaggagggcggccacggcgugaagggcugggccuucgacgacggcaacgacguguggaugggcagaaccaucagcgagaagcugagaagcggcuacgagaccuucaaggugaucgagggcuggagcaaccccaacagcaagcugcagaucaacagacaggugaucguggacagaggcaacagaagcggcuacagcggcaucuucagcguggagggcaagaacugcaucaacagaugcuucuacguggagcugaucagaggcagaaaggaggagaccgaggugcuguggaccagcaacagcaucgugguguucugcggcaccagcggcaccuacggcaccggcagcuggcccgacggcgccgacaucaaccugaugcccaucuga

SEQ ID NO: 174797 - RNA, 1410 nt, Artificial Sequence; identical to SEQ ID NO: 174387
  derived and/or modified CDS sequence (opt4) from neuraminidase__InfluenzaA__ABC84436

SEQ ID NO: 174798 - RNA, 1410 nt, Artificial Sequence
  derived and/or modified CDS sequence (opt4) from neuraminidase__InfluenzaA__ABC84447
augaaccccaaccagaagaucaucaccaucggcagcgugagccugaccaucgccaccaucugcuuccugaugcagaucgccauccuggugaccaccgugacccugcacuucaagcaguacgagugcaacagcccccccaacaaccaggugaugcugugcgagcccaccaucaucgagagaaacaucaccgagaucgugcaccugaccaacaccaccaucgagaaggagaucugccccaagcuggccgaguacagaaacuggagcaagccccagugcaacaucaccggcuucgcccccuucagcaaggacaacagcaucagacugagcgccggcggcgacaucugggugaccagagagcccuacgugagcugcgaccccgacaagugcuaccaguucgcccugggccagggcaccacccugaacaacggccacagcaacgacaccgugcacgacagaacccccuacagaacccugcugaugaacgagcugggcgugcccuuccaccugggcaccagacaggugugcaucgccuggagcagcagcagcugccacgacggcaaggccuggcugcacgugugcgugaccggcgacgacgagaacgccaccgccagcuucaucuacaacggcagacugguggacagcaucggcagcuggagcaagaagauccugagaacccaggagagcgagugcgugugcaucaacggcaccugcaccguggugaugaccgacggcagcgccagcggcaaggccgacaccaagauccuguucaucgaggagggcaagaucgugcacaucagcacccugagcggcagcgcccagcacguggaggagugcagcugcuaccccagauaccccggcgugagaugcgugugcagagacaacuggaagggcagcaacagacccaucguggacaucaacgugaaggacuacagcaucgugagcagcuacgugugcagcggccuggugggcgacacccccagaaagaacgacagcuucagcagcagccacugccuggaccccaacaacgaggagggcggccacggcgugaagggcugggccuucgacgacggcaacgacguguggaugggcagaaccaucagcgagaagcugagaagcggcuacgagaccuucaaggugaucgagggcuggagcaagcccaacagcaagcugcagaccaacagacaggugaucguggagagaggcaacagaagcggcuacagcggcaucuucagcguggagggcaagagcugcaucaacagaugcuucuacguggagcugaucagaggcagaaaggaggagaccgaggugugguggaccagcaacagcaucgugguguucugcggcaccagcggcaccuacggcaccggcagcuggcccgacggcgccgacaucaaccugaugcccaucuga

SEQ ID NO: 174799 - RNA, 1410 nt, Artificial Sequence; identical to SEQ ID NO: 174774
  derived and/or modified CDS sequence (opt4) from neuraminidase__InfluenzaA__ABC84501

SEQ ID NO: 174800 - RNA, 1410 nt, Artificial Sequence; identical to SEQ ID NO: 174774
  derived and/or modified CDS sequence (opt4) from neuraminidase__InfluenzaA__ABC84512

SEQ ID NO: 174801 - RNA, 1410 nt, Artificial Sequence
  derived and/or modified CDS sequence (opt4) from neuraminidase__InfluenzaA__ABC84523
augaaccccaaccagaagaucaucaccaucggcagcgugagccugaccaucagcaccaucugcuucuucaugcagaucgccauccugaucaccaccgugacccugcacuucaagcaguacgaguucaacagcccccccaacaaccaggugaugcugugcgagcccaccaucaucgagagaaacaucaccgagaucguguaccugaccaacaccaccaucgagaaggagaucugccccaagcuggccgaguacagaaacuggagcaagccccagugcaacaucaccggcuucgcccccuucagcaaggacaacagcaucagacugagcgccggcggcgacaucugggugaccagagagcccuacgugagcugcgaccccgacaagugcuaccaguucgcccugggccagggcaccacccugaacaacgugcacagcaacgacaccgugcacgacagaacccccuacagaacccugcugaugaacgagcugggcgugcccuuccaccugggcaccaagcaggugugcaucgccuggagcagcagcagcugccacgacggcaaggccuggcugcacgugugcgugaccggcgacgacaagaacgccaccgccagcuucaucuacaacggcagacuggccgacagcaucgugagcuggagcaaggagauccugagaacccaggagagcgagugcgugugcaucaacggcaccugcaccguggugaugaccgacggcagcgccagcggcaaggccgacaccaagauccuguucaucgaggagggcaagaucgugcacaccagcacccugagcggcagcgcccagcacguggaggagugcagcugcuaccccagauaccccggcgugagaugcgugugcagagacaacuggaagggcagcaacagacccaucguggacaucaacaucaaggacuacagcaucgugagcagcuacgugugcagcggccuggugggcgacacccccagaaagaacgacagcagcagcagcagccacugccuggaccccaacaacgaggagggcggccacggcgugaagggcugggccuucgacgacggcaacgacguguggaugggcagaaccaucagcgagaagcugagaagcggcuacgagaccuucaaggugaucgagggcuggagcaaccccaacagcaagcugcagaucaacagacaggugaucguggacagaggcaacagaagcggcuacagcggcaucuucagcguggagggcaagagcugcaucaacagaugcuucuacguggagcugaucagaggcagaaaggaggagaccgaggugcuguggaccagcaacagcaucgugguguucugcggcaccagcggcaccuacggcaccggcagcuggcccgacggcgccgacaucaaccugaugcccaucuga

SEQ ID NO: 174802 - RNA, 1410 nt, Artificial Sequence
  derived and/or modified CDS sequence (opt4) from neuraminidase__InfluenzaA__ABC84545
augaaccccaaccagaagaucaucaccaucggcagcgugagccugaccaucgccaccaucugcuuccugaugcagaucgccauccuggugaccaccgugacccugcacuucaagcaguacgagugcgacagccccgccaacaaccaggugaugcccugcgagcccaucaucaucgagagaaacaucaccgagaucguguaccugaccaacaccaccaucgagaaggagaucugccccaagcugguggaguacagaaacuggagcaagccccagugcaagaucaccggcuucgcccccuucagcaaggacaacagcaucagacugagcgccggcggcgacaucugggugaccagagagcccuacgugagcugcgaccccggcaagugcuaccaguucgcccugggccagggcaccacccuggacaacaagcacagcaacgacaccauccacgacagaaccccccacagaacccugcugaugaacgagcugggcgugcccuuccaccugggcaccagacaggugugcaucgccuggagcagcagcagcugccacgacggcaaggccuggcugcacgugugcgugaccggcuacgacaagaacgccaccgccagcuucaucuacgacggcagacugguggacagcaucggcagcuggagccagaacauccugagaacccaggagagcgagugcgugugcaucaacggcaccugcaccguggugaugaccgacggcagcgccagcggcagcgccgacaccaagauccuguucaucgaggagggcaagaucgugcacaucagcccccugagcggcagcgcccagcacguggaggagugcagcugcuaccccagauaccccggcgugagaugcaucugcagagacaacuggaagggcagcaacagacccgugguggacaucaacgugaaggaccacagcaucgacagcagcuacgugugcagcggccuggugggcgacacccccagaaacaacgacagaagcagcaacagcuacugcagaaaccccaacaacgagaagggcaaccacggcgugaagggcugggccuucgacgacggcaacgacguguggaugggcagaaccaucagcgaggacagcagaagcggcuacgagaccuucaaggugaucggcggcuggagcacccccaacagcaagcugcagaucaacagacaggugaucguggacagcgacaacagaagcggcuacagcggcaucuucagcguggagggcaagagcugcaucaacagaugcuucuacguggagcugaucagaggcagagagcaggagaccagagugugguggaccagcaacagcaucgugguguucugcggcaccagcggcaccuacggcaccggcagcuggcccgacggcgccgacaucaaccugaugcccaucuga

SEQ ID NO: 174803 - RNA, 1410 nt, Artificial Sequence; identical to SEQ ID NO: 174790
  derived and/or modified CDS sequence (opt4) from neuraminidase__InfluenzaA__ABC84574

SEQ ID NO: 174804 - RNA, 1410 nt, Artificial Sequence; identical to SEQ ID NO: 174790
  derived and/or modified CDS sequence (opt4) from neuraminidase__InfluenzaA__ABC85757

SEQ ID NO: 174805 - RNA, 1410 nt, Artificial Sequence; identical to SEQ ID NO: 174801
  derived and/or modified CDS sequence (opt4) from neuraminidase__InfluenzaA__ABC85768

SEQ ID NO: 174806 - RNA, 1410 nt, Artificial Sequence; identical to SEQ ID NO: 174790
  derived and/or modified CDS sequence (opt4) from neuraminidase__InfluenzaA__ABC85779

SEQ ID NO: 174807 - RNA, 1410 nt, Artificial Sequence; identical to SEQ ID NO: 174790
  derived and/or modified CDS sequence (opt4) from neuraminidase__InfluenzaA__ABC85790

SEQ ID NO: 174808 - RNA, 1410 nt, Artificial Sequence; identical to SEQ ID NO: 174774
  derived and/or modified CDS sequence (opt4) from neuraminidase__InfluenzaA__ABC85801

SEQ ID NO: 174809 - RNA, 1410 nt, Artificial Sequence; identical to SEQ ID NO: 174774
  derived and/or modified CDS sequence (opt4) from neuraminidase__InfluenzaA__ABC85812

SEQ ID NO: 174810 - RNA, 1410 nt, Artificial Sequence; identical to SEQ ID NO: 174801
  derived and/or modified CDS sequence (opt4) from neuraminidase__InfluenzaA__ABC85823

SEQ ID NO: 174811 - RNA, 1410 nt, Artificial Sequence; identical to SEQ ID NO: 174773
  derived and/or modified CDS sequence (opt4) from neuraminidase__InfluenzaA__ABC85834

SEQ ID NO: 174812 - RNA, 1410 nt, Artificial Sequence; identical to SEQ ID NO: 174774
  derived and/or modified CDS sequence (opt4) from neuraminidase__InfluenzaA__ABC85845

SEQ ID NO: 174813 - RNA, 1410 nt, Artificial Sequence; identical to SEQ ID NO: 174801
  derived and/or modified CDS sequence (opt4) from neuraminidase__InfluenzaA__ABC85856

SEQ ID NO: 174814 - RNA, 1410 nt, Artificial Sequence; identical to SEQ ID NO: 174773
  derived and/or modified CDS sequence (opt4) from neuraminidase__InfluenzaA__ABC85867

SEQ ID NO: 174815 - RNA, 1410 nt, Artificial Sequence; identical to SEQ ID NO: 174772
  derived and/or modified CDS sequence (opt4) from neuraminidase__InfluenzaA__ABC85900

SEQ ID NO: 174816 - RNA, 1410 nt, Artificial Sequence
  derived and/or modified CDS sequence (opt4) from neuraminidase__InfluenzaA__ABC85911
augaaccccaaccagaagaucaucaccaucggcagcgugagccugaccaucgccaccaucugcuuccugaugcagaucgccauccuggugaccaccgugacccugcacuucaagcaguacgagugcaacagcccccccaacaaccaggugaugcugugcgagcccaccaucaucgagagaaacaucaccgagaucguguaccugaccaacaccaccaucgagaaggagaucugccccaagcuggccgaguacagaaacuggagcaagccccagugcaacaucaccggcuucgcccccuucagcaaggacaacagcaucagacugagcgccggcggcgacaucugggugaccagagagcccuacgugagcugcgaccccgacaagugcuaccaguucgcccugggccagggcaccacccugaacaacggccacagcaacgacaccgugcacgacagaacccccuacagaacccugcugaugaacgagcugggcgugcccuuccaccugggcaccagacaggugugcaucgccuggagcagcagcagcugccacgacggcaaggccuggcugcacgugugcgugaccggcgacgacgagaacgccaccgccagcuucaucuacaacggcagacugguggacagcaucggcagcuggagcaagaagauccugagaacccaggagagcgagugcgugugcaucaacggcaccugcaccguggugaugaccgacggcagcgccagcggcaaggccgacaccaagauccuguucaucgaggagggcaagaucgugcacaucagcacccugagcggcagcgcccagcacguggaggagugcagcugcuaccccagauaccccggcgugagaugcgugugcagagacaacuggaagggcagcaacagacccaucguggacaucaacgugaaggacuacagcaucgugagcagcuacgugugcagcggccuggugggcgacacccccagaaagaacgacagcuucagcagcagccacugccuggaccccaacaacgaggagggcggccacggcgugaagggcugggccuucgacgacggcaacgacauguggaugggcagaaccaucagcgagaagcugagaagcggcuacgagaccuucaaggugaucgagggcuggagcaagcccaacagcaagcugcagaccaacagacaggugaucguggagagaggcaacagaagcggcuacagcggcaucuucagcguggagggcaagagcugcaucaacagaugcuucuacguggagcugaucagaggcagaaaggaggagaccgaggugugguggaccagcaacagcaucgugguguucugcggcaccagcggcaccuacggcaccggcagcuggcccgacggcgccgacaucaaccugaugcccaucuga

SEQ ID NO: 174817 - RNA, 1410 nt, Artificial Sequence
  derived and/or modified CDS sequence (opt4) from neuraminidase__InfluenzaA__ABC85922
augaaccccaaccagaagaucaucaccaucggcagcgugagccugaccaucgccaccaucugcuuccugaugcagaucgccauccuggugaccaccgugacccugcacuucaagcaguacgagugcaacagcccccccaacaaccaggugaugcugugcgagcccaccaccaucgagagaaacaucaccgagaucguguaccugaccaacaccaccaucgagaaggagaucugccccaagcuggccgaguacagaaacuggagcaagccccagugcaacaucaccggcuucgcccccuucagcaaggacaacagcaucagacugagcgccggcggcgacaucugggugaccagagagcccuacgugagcugcgacagcgacaagugcuaccaguucgcccugggccagggcaccacccugaacaacggccacagcaacgacaccgugcacgacagaacccccuacagaacccugcugaugaacgagcugggcgugcccuuccaccugggcaccagacaggugugcaucgccuggagcagcagcagcugccacgacggcaaggccuggcugcacgugugcgugaccggcgacgacgagaacgccaccgccagcuucaucuacaacggcagacugguggacagcaucggcagcuggagcaagaagauccugagaacccaggagagcgagugcgugugcaucaacggcaccugcaccguggugaugaccgacggcagcgccagcggcaaggccgacaccaagauccuguucaucgaggagggcaagaucgugcacaucagcacccugagcggcagcgcccagcacguggaggagugcagcugcuaccccagauaccccggcgugagaugcgugugcagagacaacuggaagggcagcaacagacccaucguggacaucaacgugaaggacuacagcaucgugagcagcuacgugugcagcggccuggugggcgacacccccagaaagaacgacagcuucagcagcagccacugccuggaccccaacaacgaggagggcggccacggcgugaagggcugggccuucgacgacggcaacgacguguggaugggcagaaccaucagcgagaagcugagaagcggcuacgagaccuucaaggugaucgagggcuggagcaagcccaacagcaagcugcagaccaacagacaggugaucguggagagaggcaacagaagcggcuacagcggcaucuucagcguggagggcaagagcugcaucaacagaugcuucuacguggagcugaucagaggcagaaaggaggagaccgaggugugguggaccagcaacagcaucgugguguucugcggcaccagcggcaccuacggcaccggcagcuggcccgacggcgccgacaucaaccugaugcccaucuga

SEQ ID NO: 174818 - RNA, 1410 nt, Artificial Sequence; identical to SEQ ID NO: 174226
  derived and/or modified CDS sequence (opt4) from neuraminidase__InfluenzaA__ABC85933

SEQ ID NO: 174819 - RNA, 1410 nt, Artificial Sequence
  derived and/or modified CDS sequence (opt4) from neuraminidase__InfluenzaA__ABC85955
augaaccccaaccagaagaucaucaccaucggcagcgugagccugaccaucgccaccaucugcuuccugaugcagaucgccauccuggugaccaccgugacccugcacuucaagcaguacgagugcaacagcccccccaacaaccaggugaugcugugcgagcccaccaucaucgagagaaacaucaccgagaucguguaccugaccaacaccaccaucgagaaggagaucugccccaagcuggccgaguacagaaacuggagcaagccccagugcaacaucaccggcuucgcccccuucagcaaggacaacagcaucagacugagcgccggcggcgacaucugggugaccagagagcccuacgugagcugcgaccccgacaagugcuaccaguucgcccugggccagggcaccacccugaacaacggccacagcaacgacaccgugcacgacagaacccccuacagaacccugcugaugaacgagcugggcgugcccuuccaccugggcaccagacaggugugcaucgccuggagcagcagcagcugccacgacggcaaggccuggcugcacgugugcgugaccggcgacgacgagaacgccaccgccagcuucaucuacaacggcagacugguggacagcaucggcagcuggagcaagaagauccugagaacccaggagagcgagugcgugugcaucaacggcaccugcaccguggugaugaccgacggcagcgccagcggcaaggccgacaccaagauccuguucaucgaggagggcaagaucgugcacaucagcacccugagcggcagcgcccagcacguggaggagugcagcugcuaccccagauaccccggcgugagaugcgugugcagagacaacuggaagggcagcaacagacccaucguggacaucaacgugaaggacuacagcaucgugagcagcuacgugugcagcggccuggugggcgacacccccagaaagaacgacagcuucagcagcagccacugccuggaccccaacaacgaggagggcggccacggcgugaagggcugggccuucgacgacggcaacgacguguggaugggcagaaccaucagcgagaagcugagaagcggcuacgagaccuucaaggugaucgagggcuggagcaagcccaacagcaagcugcagaccaacagacaggugaucguggagagaggcaacagaagcggcuacagcggcaucuucagcguggagggcaagagcugcaucaacagaugcuucuacguggagcugaucagaggcagaaaggaggagaccgaggugugguggaccagcaacagcaucgugguguucugcggcaccagcggcaccuacggcaccggcagcuggcccgacggcgccgacaucaacagaaugcccaucuga

SEQ ID NO: 174820 - RNA, 1410 nt, Artificial Sequence; identical to SEQ ID NO: 174226
  derived and/or modified CDS sequence (opt4) from neuraminidase__InfluenzaA__ABC85966

SEQ ID NO: 174821 - RNA, 1410 nt, Artificial Sequence; identical to SEQ ID NO: 174226
  derived and/or modified CDS sequence (opt4) from neuraminidase__InfluenzaA__ABC85977

SEQ ID NO: 174822 - RNA, 1410 nt, Artificial Sequence
  derived and/or modified CDS sequence (opt4) from neuraminidase__InfluenzaA__ABC85988
augaaccccaaccagaagaucaucaccaucggcagcgugagccugaccaucgccaccaucugcuuccugaugcagaucgccauccuggugaccaccgugacccugcacuucaagcaguacgagugcaacagcccccccaacaaccaggugaugcugugcgagcccaccaucaucgagagaaacaucaccgagaucguguaccugaccaacaccaccaucgagaagggcaucugccccaagcuggccgaguacagaaacuggagcaagccccagugcaacaucaccggcuucgcccccuucagcaaggacaacagcaucagacugagcgccggcggcgacaucugggugaccagagagcccuacgugagcugcgaccccgacaagugcuaccaguucgcccugggccagggcaccacccugaacaacggccacagcaacgacaccgugcacgacagaacccccuacagaacccugcugaugaacgagcugggcgugcccuuccaccugggcaccagacaggugugcaucgccuggagcagcagcagcugccacgacggcaaggccuggcugcacgugugcgugaccggcgacgacgagaacgccaccgccagcuucaucuacaacggcagacugguggacagcaucggcagcuggagcaagaagauccugagaacccaggagagcgagugcgugugcaucaacggcaccugcaccguggugaugaccgacggcagcgccagcggcaaggccgacaccaagauccuguucaucgaggagggcaagaucgugcacaucagcacccugagcggcagcgcccagcacguggaggagugcagcugcuaccccagauaccccggcgugagaugcgugugcagagacaacuggaagggcagcaacagacccaucguggacaucaacgugaaggacuacagcaucgugagcagcuacgugugcagcggccuggugggcgacacccccagaaagaacgacagcuucagcagcagccacugccuggaccccaacaacgaggagggcggccacggcgugaagggcugggccuucgacgacggcaacgacguguggaugggcagaaccaucagcgagaagcugagaagcggcuacgagaccuucaaggugaucgagggcuggagcaagcccaacagcaagcugcagaccaacagacaggugaucguggagagaggcaacagaagcggcuacagcggcaucuucagcguggagggcaagagcugcaucaacagaugcuucuacguggagcugaucagaggcagaaaggaggagaccgaggugugguggaccagcaacagcaucgugguguucugcggcaccagcggcaccuacggcaccggcagcuggcccgacggcgccgacaucaaccugaugcccaucuga

SEQ ID NO: 174823 - RNA, 1410 nt, Artificial Sequence; identical to SEQ ID NO: 174387
  derived and/or modified CDS sequence (opt4) from neuraminidase__InfluenzaA__ABC85999

SEQ ID NO: 174824 - RNA, 1410 nt, Artificial Sequence; identical to SEQ ID NO: 174387
  derived and/or modified CDS sequence (opt4) from neuraminidase__InfluenzaA__ABC86010

SEQ ID NO: 174825 - RNA, 1410 nt, Artificial Sequence
  derived and/or modified CDS sequence (opt4) from neuraminidase__InfluenzaA__ABC86021
augaaccccaaccagaagaucaucaccaucggcagcgugagccugaccaucagcaccaucugcuucuucaugcagaucgccauccugaucaccaccgugacccugcacuucaagcaguacgaguucaacagcccccccaacaaccaggugaugcugugcgagcccaccaucaucgagagaaacaucaccgagaucguguaccugaccaacaccaccaucgagaaggagaucugccccaagcuggccgaguacagaaacuggagcaagccccagugcgacaucaccggcuucgcccccuucagcaaggacaacagcaucagacugagcgccggcggcgacaucugggugaccagagagcccuacgugagcugcgaccccgacaagugcuaccaguucgcccugggccagggcaccacccugaacaacgugcacagcaacgacaccgugcacgacagaacccccuacagaacccugcugaugaacgagcugggcgugcccuuccaccugggcaccaagcaggugugcaucgccuggagcagcagcagcugccacgacggcaaggccuggcugcacgugugcgugaccggcgacgacaagaacgccaccgccagcuucaucuacaacggcagacugguggacagcaucgugagcuggagcaaggagauccugagaacccaggagagcgagugcgugugcaucaacggcaccugcaccguggugaugaccgacggcagcgccagcggcaaggccgacaccaagauccuguucaucgaggagggcaagaucgugcacaccagcacccugagcggcagcgcccagcacguggaggagugcagcugcuaccccagauaccccggcgugagaugcgugugcagagacaacuggaagggcagcaacagacccaucguggacaucaacaucaaggacuacagcaucgugagcagcuacgugugcagcggccuggugggcgacacccccagaaagaacgacagcagcagcagcagccacugccuggaccccaacaacgaggagggcggccacggcgugaagggcugggccuucgacgacggcaacgacguguggaugggcagaaccaucagcgagaagcugagaagcggcuacgagaccuucaaggugaucgagggcuggagcaaccccaacagcaagcugcagaucaacagacaggugaucguggacagaggcaacagaagcggcuacagcggcaucuucagcguggagggcaagagcugcaucaacagaugcuucuacguggagcugaucagaggcagaaaggaggagaccgaggugcuguggaccagcaacagcaucgugguguucugcggcaccagcggcaccuacggcaccggcagcuggcccgacggcgccaacaucaaccugaugcccaucuga

SEQ ID NO: 174826 - RNA, 1410 nt, Artificial Sequence; identical to SEQ ID NO: 174651
  derived and/or modified CDS sequence (opt4) from neuraminidase__InfluenzaA__ABC86127

SEQ ID NO: 174827 - RNA, 1410 nt, Artificial Sequence; identical to SEQ ID NO: 174734
  derived and/or modified CDS sequence (opt4) from neuraminidase__InfluenzaA__ABC86140

SEQ ID NO: 174828 - RNA, 1410 nt, Artificial Sequence; identical to SEQ ID NO: 174544
  derived and/or modified CDS sequence (opt4) from neuraminidase__InfluenzaA__ABC86151

SEQ ID NO: 174829 - RNA, 1413 nt, Artificial Sequence
  derived and/or modified CDS sequence (opt4) from neuraminidase__InfluenzaA__ABC86240
augaaccccaaccagaagaucaucaccaucggcagcaucagcguggccaucggcaucaucagccugauccugcagaucggcaacaucaucagcaucugggccagccacagcauccagaccggcagccagaacuacaccggcaucugcaaccagaagaucaucaccuacgagaacagaaccugggugaaccagaccuacgugaacaucaacaacaccaacgugguggccggcaaggacaagaccagcaugacccuggccggcaacagcagccugugccccaucagaggcugggccaucuacaccaaggacaacagcaucagaaucggcagcaagggcgacguguucgugaucagagagcccuucaucagcugcagccaccuggagugcagaaccuucuuccugacccagggcgcccugcugaacgacaagcacagcaacggcaccaucaaggacagaagccccuucagagcccugaugagcugcccccugggcgaggcccccagccccuacaacagcagauucgagagcguggccuggagcgccagcgccugccacgacggccugggcuggcugaccaucggcaucagcggccccgacaacggcgccguggccgugcugaaguacaacggcaucaucaccgagaccaucaagagcuggaagaagcagauccugagaacccaggagagcgagugcgugugcgugaacggcagcugcuucaccaucaugaccgacggccccagcaacagagccgccagcuacagaaucuucaagaucgagaagggcagagugaccaagagcaucgagcuggacgcccccaacuaccacuacgaggagugcagcugcuaccccgacaccggcaccgugaugugcgugugcagagacaacuggcacggcagcaacagacccugggugagcuucaaccagaaccuggacuaccagaucggcuacaucugcagcggcguguucggcgacaaccccagacccaaggacggcgagggcagcugcaaccccgugaccguggacggcgccgacggcgugaagggcuucagcuacagauacggcaacggcguguggaucggcagaaccaagagcaacagacugagaaagggcuucgagaugaucugggaccccaacggcuggaccgacaccgacagcgacuucagcaugaagcaggacgugguggccaugaccgacuggagcggcuacagcggcagcuucgugcagcaccccgagcugaccggccuggacugcaugagacccugcuucuggguggagcuggugagaggccugcccagagagaacaccaccaucuggaccagcggcagcagcaucagcuucugcggcgugaacagcgagaccgccaacuggagcuggcccgacggcgccgagcugcccuucaccaucgacaaguga

SEQ ID NO: 174830 - RNA, 1410 nt, Artificial Sequence
  derived and/or modified CDS sequence (opt4) from neuraminidase__InfluenzaA__ABC97377
augaaccccaaccagaagaucaucaccaucggcagcgugagccugaccaucgccaccaucugcuuccugaugcagaucgccauccuggugaccaccgugacccugcacuucaagcaguacgagugcgacagccccgccaacaaccaggugaugcccugcgagcccaucaucaucgagagaaacaucaccgagaucguguaccugaccaacaccaccaucgagaaggagaucugccccaagcugguggaguacagaaacuggagcaagccccagugcaagaucaccggcuucgcccccuucagcaaggacaacagcaucagacugagcgccggcggcgacaucugggugaccagagagcccuacgugagcugcgaccccggcaagugcuaccaguucgcccugggccagggcaccacccuggacaacaagcacagcaacgacaccauccacgacagaaccccccacagaacccugcugaugaacgagcugggcgugcccuuccaccugggcaccagacaggugugcaucgccuggagcagcagcagcugccacgacggcaaggccuggcugcacgugugcgugaccggcuacgacaagaacgccaccgccagcuucaucuacgacggcagacugguggacagcaucggcagcuggagccagaacauccugagaacccaggagagcgagugcgugugcaucaacggcaccugcaccguggugaugaccgacggcagcgccagcggcagcgccgacaccaagauccuguucaucgaggagggcaagaucgugcacaucagcccccugagcggcagcgcccagcacguggaggagugcagcugcuaccccagauaccccggcgugagaugcaucugcagagacaacuggaagggcagcaacagacccgugguggacaucaacgugaaggacuacagcaucgacagcagcuacgugugcagcggccuggugggcgacacccccagaaacaacgacagaagcagcaacagcuacugcagaaaccccaacaacgagaagggcaaccacggcgugaagggcugggccuucgacgacggcaacgacguguggaugggcagaaccaucagcgaggacagcagaagcggcuacgagaccuucaaggugaucggcggcuggagcacccccaacagcaagcugcagaucaacagacaggugaucguggacagcgacaacagaagcggcuacagcggcaucuucagcguggagggcaagagcugcaucaacagaugcuucuacguggagcugaucagaggcagagagcaggagaccagagugugguggaccagcaacagcaucgugguguucugcggcaccagcggcaccuacggcaccggcagcuggcccgacggcgccgacaucaaccugaugcccaucuga

SEQ ID NO: 174831 - RNA, 1410 nt, Artificial Sequence; identical to SEQ ID NO: 174197
  derived and/or modified CDS sequence (opt4) from neuraminidase__InfluenzaA__ABD15452

SEQ ID NO: 174832 - RNA, 1410 nt, Artificial Sequence; identical to SEQ ID NO: 174285
  derived and/or modified CDS sequence (opt4) from neuraminidase__InfluenzaA__ABD15463

SEQ ID NO: 174833 - RNA, 1410 nt, Artificial Sequence; identical to SEQ ID NO: 174205
  derived and/or modified CDS sequence (opt4) from neuraminidase__InfluenzaA__ABD15474

SEQ ID NO: 174834 - RNA, 1410 nt, Artificial Sequence
  derived and/or modified CDS sequence (opt4) from neuraminidase__InfluenzaA__ABD15485
augaaccccaaccagaagaucaucaccaucggcagcgugagccugaccaucgccaccaucugcuuccugaugcagaucgccauccuggugaccaccgugacccugcacuucaagcagcacgagugcaacagcccccccaacaaccaggugaugcugugcgagcccaccaucaucgagagaaacaucaccgagaucguguaccugaccaacaccaccaucgagaaggagaucugccccaagcuggccgaguacagaaacuggagcaagccccagugcaacaucaccggcuucgcccccuucagcaaggacaacagcaucagacugagcgccggcggcgacaucugggugaccagagagcccuacgugagcugcgaccccgacaagugcuaccaguucgcccugggccagggcaccacccugaacaacggccacagcaacgacaccgugcacgacagaacccccuacagaacccugcugaugaacgagcugggcgugcccuuccaccugggcaccagacaggugugcaucgccuggagcagcagcagcugccacgacggcaaggccuggcugcacgugugcgugaccggcgacgacaagaacgccaccgccagcuucaucuacaacggcagacugguggacagcaucggcagcuggagcaagaagauccugagaacccaggagagcgagugcgugugcaucaacggcaccugcaccguggugaugaccgacggcagcgccagcggcaaggccgacaccaagauccuguucaucgaggagggcaagaucgugcacaucagcacccugagcggcagcgcccagcacguggaggagugcagcugcuaccccagauaccccggcgugagaugcgugugcagagacaacuggaagggcagcaacagacccaucguggacaucaacgugaaggacuacagcaucgugagcagcuacgugugcagcggccuggugggcgacacccccagaaagaacgacagcuucagcagcagccacugccuggaccccaacaacgaggagggcggccacggcgugaagggcugggccuucgacgacggcaacgacguguggaugggcagaaccaucagcgagaagcugagaagcggcuacgagaccuucaaggugaucgagggcuggagcaagcccaacagcaagcugcagaucaacagacaggugaucguggagagaggcaacagaagcggcuacagcggcaucuucagcguggagggcaagagcugcaucaacagaugcuucuacguggagcugaucagaggcagaaaggaggagaccgaggugugguggaccagcaacagcaucgugguguucugcggcaccagcggcaccuacggcaccggcagcuggcccgacggcgccaacaucaaccugaugcccaucuga

SEQ ID NO: 174835 - RNA, 1410 nt, Artificial Sequence; identical to SEQ ID NO: 174285
  derived and/or modified CDS sequence (opt4) from neuraminidase__InfluenzaA__ABD15496

SEQ ID NO: 174836 - RNA, 1410 nt, Artificial Sequence; identical to SEQ ID NO: 174205
  derived and/or modified CDS sequence (opt4) from neuraminidase__InfluenzaA__ABD15507

SEQ ID NO: 174837 - RNA, 1413 nt, Artificial Sequence
  derived and/or modified CDS sequence (opt4) from neuraminidase__InfluenzaA__ABD15518
augaaccccaaccagaagaucaucaccaucggcagcaucagcaucgccaucggcaucaucagccugaugcugcagaucggcaacaucaucagcaucugggccagccacagcauccagaccggcagccagaaccacaccggcaucugcaaccagagaaucaucaccuacgagaacagcaccugggugaaccacaccuacgugaacaucaacaacaccaacgugguggccggcaaggacaagaccagcgugacccuggccggcaacagcagccugugcagcaucagcggcugggccaucuacaccaaggacaacagcaucagaaucggcagcaagggcgacguguucgugaucagagagcccuucaucagcugcagccaccuggagugcagaaccuucuuccugacccagggcgcccugcugaacgacaagcacagcaacggcaccgugaaggacagaagccccuacagagcccugaugagcugcccccugggcgaggcccccagccccuacaacagcaaguucgagagcguggccuggagcgccagcgccugccacgacggcaugggcuggcugaccaucggcaucagcggccccgacaacggcgccguggccgugcugaaguacaacggcaucaucaccgagaccaucaagagcuggaagaagagaauccugagaacccaggagagcgagugcgugugcgugaacggcagcugcuucaccaucaugaccgacggccccagcaacggcggcgccagcuacaagaucuucaagaucgagaagggcaaggugaccaagagcaucgagcugaacgcccccaacuuccacuacgaggagugcagcugcuaccccgacaccggcaccgugaugugcgugugcagagacaacuggcacggcagcaacagacccugggugagcuucaaccagaaccuggacuaccagaucggcuacaucugcagcggcguguucggcgacaaccccagacccaaggacggcaagggcagcugcaaccccgugaccguggacggcgccgacggcgugaagggcuucagcuacaaguacggcaacggcguguggaucggcagaaccaagagcaacagacugagaaagggcuucgagaugaucugggaccccaacggcuggaccgacaccgacagcgacuucagcgugaagcaggacgugguggccaucaccgacuggagcggcuacagcggcagcuucgugcagcaccccgagcugaccggccuggacugcaucagacccugcuucuggguggagcuggugagaggccugcccagagagaacaccaccaucuggaccagcggcagcagcaucagcuucugcggcguggacagcgacaccgccaacuggagcuggcccgacggcgccgagcugcccuucaccaucgacaaguga

SEQ ID NO: 174838 - RNA, 1410 nt, Artificial Sequence; identical to SEQ ID NO: 174387
  derived and/or modified CDS sequence (opt4) from neuraminidase__InfluenzaA__ABD15529

SEQ ID NO: 174839 - RNA, 1410 nt, Artificial Sequence; identical to SEQ ID NO: 174574
  derived and/or modified CDS sequence (opt4) from neuraminidase__InfluenzaA__ABD15551

SEQ ID NO: 174840 - RNA, 1410 nt, Artificial Sequence
  derived and/or modified CDS sequence (opt4) from neuraminidase__InfluenzaA__ABD15562
augaaccccaaccagaagaucaucaccaucggcagcgugagccugaccaucgccaccaucugcuuccugaugcagaucgccauccuggugaccaccgugacccugcacuucaagcaguacgagugcagcagcccccccaacaaccaggugaugcugugcgagcccaccaucaucgagagaaacaucaccgagaucguguaccugaccaacaccaccaucgagaaggagaucugccccaagcuggccgaguacagaaacuggagcaagccccagugcaagaucaccggcuucgcccccuucagcaaggacaacagcaucagacugagcgccggcggcgacaucugggugaccagagagcccuacgugagcugcgaccccgacaagugcuaccaguucgcccugggccagggcaccacccugaacaacagacacagcaacgacaccgugcacgacagaacccccuacagaacccugcugaugaacgagcugggcgugcccuuccaccugggcaccaagcaggugugcaucgccuggagcagcagcagcugccacgacggcaaggccuggcugcacgugugcgugaccggccacgacgagaacgccaccgccagcuucaucuacgacggcagacugguggacagcaucggcagcuggagcaagaagauccugagaacccaggagagcgagugcgugugcaucaacggcaccugcaccaucgugaugaccgacggcagcgccagcggcagagccgacaccaagauccuguucaucgaggagggcaagaucgugcacaucagcccccugagcggcagcgcccagcacguggaggagugcagcugcuaccccagauaccccggcgugagaugcgugugcagagacaacuggaagggcagcaacagacccaucguggacaucaacgugaaggacuacagcaucgugagcagcuacgugugcagcggccuggugggcgacacccccagaaagaacgacagcagcagcagcagccacugccugaaccccaacaacgaggagggcggccacggcgugaagggcugggccuucgacgacggcaacgacguguggaugggcagaaccaucagcgagaaguucagaagcggcuacgagaccuucaaggugaucgagggcuggagcaagcccaacagcaagcugcagaucaacagacaggugaucguggacagaggcaacagaagcggcuacagcggcaucuucagcguggagggcaagagcugcaucaacagaugcuucuacguggagcugaucagaggcagaaagcaggagaccgaggugugguggaccagcaacagcaucgugguguucugcggcaccagcggcaccuacggcaccggcagcuggcccgacggcgccgacaucaaccugaugcccaucuga

SEQ ID NO: 174841 - RNA, 1410 nt, Artificial Sequence
  derived and/or modified CDS sequence (opt4) from neuraminidase__InfluenzaA__ABD15573
augaaccccaaccagaagaucaucaccaucggcagcgugagccugaccaucgccaccaucugcuuccugaugcagaucgccauccuggugaccaccgugacccugcacuucaagcaguacgagugcaacagcccccccaacaaccaggugaugcugugcgagcccaccaucaucgagagaaacaucaccgagaucguguaccugaccaacaccaccaucgagaaggagaucugccccaagcuggccgaguacagaaacuggagcaagccccagugcaagaucaccggcuucgcccccuucagcaaggacaacagcaucagacugagcgccggcggcgacaucugggugaccagagagcccuacgugagcugcgaccccgacaagugcuaccaguucgcccugggccagggcaccacccugaacaacggccacagcaacgacaccgugcacgacagaacccccuacagaacccugcugaugaacgagcugggcgugcccuuccaccugggcaccaagcaggugugcauggccuggagcagcagcagcugccacgacggcaaggccuggcugcacgugugcgugaccggccacgacgagaacgccaccgccagcuucaucuacgacggcagacugguggacagcaucggcagcuggagcaagaagauccugagaacccaggagagcgagugcgugugcaucaacggcaccugcaccguggugaugaccgacggcagcgccagcggcagagccgacaccaagauccuguucaucgaggagggcaagaucgugcacaucagccagcugagcggcagcgcccagcacguggaggagugcagcugcuaccccagauaccccggcgugagaugcgugugcagagacaacuggaagggcagcaacagacccaucguggacaucaacgugaaggaccacagcaucgugagcagcuacgugugcagcggccuggugggcgacacccccagaaagaacgacagcagcagcagcagccacugccugaaccccaacaacgaggagggcggccacggcgugaagggcugggccuucgacgacggcaacgacguguggaugggcagaaccaucagcgagaagcugagaagcggcuacgagaccuucaaggugaucgagggcuggagcaagcccaacagcaagcugcagaucaacagacaggugaucguggacagaggcaacagaagcggcuacagcggcaucuucagcguggagggcaagagcugcaucaacagaugcuucuacguggagcugaucagaggcagaaagcaggagaccgaggugugguggaccagcaacagcaucgugguguucugcggcaccagcggcaccuacggcaccggcagcuggcccgacggcgccgacaucaaccugaugcccaucuga

SEQ ID NO: 174842 - RNA, 1410 nt, Artificial Sequence
  derived and/or modified CDS sequence (opt4) from neuraminidase__InfluenzaA__ABD15584
augaaccccaaccagaagaucaucaccaucggcagcgugagccugaccaucgccaccaucugcuuccugaugcagaucgccauccuggugaccaccgugacccugcacuucaagcaguacgagugcagcagcccccccaacaaccaggugaugcugugcgagcccaccaucaucgagagaaacaucaccgagaucguguaccugaccaacaccaccaucgagaaggagaucugccccaagcuggccgaguacagaaacuggagcaagccccagugcaagaucaccggcuucgcccccuucagcaaggacaacagcaucagacugagcgccggcggcgacaucugggugaccagagagcccuacgugagcugcgaccccgacaagugcuaccaguucgcccugggccagggcaccacccugaacaacagacacagcaacgacaccgugcacgacagaacccccuacagaacccugcugaugaacgagcugggcgugcccuuccaccugggcaccaagcaggugugcaucgccuggagcagcagcagcugccacgacggcaaggccuggcugcacgugugcgugaccggccacgacgagaacgccaccgccagcuucaucuacgacggcagacugguggacagcaucggcagcuggagcaagaagauccugagaacccaggagagcgagugcgugugcaucaacggcaccugcaccguggugaugaccgacggcagcgccagcggcagagccgacaccaagauccuguucaucgaggagggcaagaucgugcacaucagcccccugagcggcagcgcccagcacguggaggagugcagcugcuaccccagauaccccggcgugagaugcgugugcagagacaacuggaagggcagcaacagacccaucguggacaucaacgugaaggacuacagcaucgugagcagcuacgugugcagcggccuggugggcgacacccccagaaagaacgacagcagcagcagcagccacugccugaaccccaacaacgaggagggcggccacggcgugaagggcugggccuucgacgacgagaacgacguguggaugggcagaaccaucagcgagaaguucagaagcggcuacgagaccuucaaggugaucgagggcuggagcaagcccaacagcaagcugcagaucaacagacaggugaucguggacagaggcaacagaagcggcuacagcggcaucuucagcguggagggcaagagcugcaucaacagaugcuucuacguggagcugaucagaggcagaaagcaggagaccgaggugugguggaccagcaacagcaucaucguguucugcggcaccagcggcaccuacggcaccggcagcuggcccgacggcgccgacaucaaccugaugcccaucuga

SEQ ID NO: 174843 - RNA, 1410 nt, Artificial Sequence; identical to SEQ ID NO: 174574
  derived and/or modified CDS sequence (opt4) from neuraminidase__InfluenzaA__ABD15595

SEQ ID NO: 174844 - RNA, 1410 nt, Artificial Sequence; identical to SEQ ID NO: 174574
  derived and/or modified CDS sequence (opt4) from neuraminidase__InfluenzaA__ABD15606

SEQ ID NO: 174845 - RNA, 1410 nt, Artificial Sequence; identical to SEQ ID NO: 174574
  derived and/or modified CDS sequence (opt4) from neuraminidase__InfluenzaA__ABD15617

SEQ ID NO: 174846 - RNA, 1410 nt, Artificial Sequence; identical to SEQ ID NO: 174633
  derived and/or modified CDS sequence (opt4) from neuraminidase__InfluenzaA__ABD15639

SEQ ID NO: 174847 - RNA, 1410 nt, Artificial Sequence; identical to SEQ ID NO: 174790
  derived and/or modified CDS sequence (opt4) from neuraminidase__InfluenzaA__ABD15650

SEQ ID NO: 174848 - RNA, 1410 nt, Artificial Sequence; identical to SEQ ID NO: 174313
  derived and/or modified CDS sequence (opt4) from neuraminidase__InfluenzaA__ABD15661

SEQ ID NO: 174849 - RNA, 1410 nt, Artificial Sequence; identical to SEQ ID NO: 174790
  derived and/or modified CDS sequence (opt4) from neuraminidase__InfluenzaA__ABD15683

SEQ ID NO: 174850 - RNA, 1410 nt, Artificial Sequence; identical to SEQ ID NO: 174313
  derived and/or modified CDS sequence (opt4) from neuraminidase__InfluenzaA__ABD15694

SEQ ID NO: 174851 - RNA, 1410 nt, Artificial Sequence; identical to SEQ ID NO: 174790
  derived and/or modified CDS sequence (opt4) from neuraminidase__InfluenzaA__ABD15705

SEQ ID NO: 174852 - RNA, 1410 nt, Artificial Sequence; identical to SEQ ID NO: 174790
  derived and/or modified CDS sequence (opt4) from neuraminidase__InfluenzaA__ABD15727

SEQ ID NO: 174853 - RNA, 1410 nt, Artificial Sequence
  derived and/or modified CDS sequence (opt4) from neuraminidase__InfluenzaA__ABD15749
augaaccccaaccagaagaucaucaccaucggcagcgugagccugaccaucgccaccaucugcuuccugaugcagaucgccgugcuggugaccaccgugacccugcacuucaagcaguacgagugcaacagcccccccaacaaccaggugaugcugugcgagcccaccaucaucgagagaaacaucaccgagaucguguaccugaccaacaccaccaucgagaaggagaucugccccaagcuggccgaguacagaaacuggagcaagccccagugcaacaucaccggcuucgcccccuucagcaaggacaacagcaucagacugagcgccggcggcgacaucugggugaccagagagcccuacgugagcugcgaccccgacaagugcuaccaguucgcccugggccagggcaccacccugaacaacggccacagcaacgacaccgugcacgacagaacccccuacagaacccugcugaugaacgagcugggcgugcccuuccaccugggcaccaagcaggugugcaucgccuggagcagcagcagcugccacgacggcaaggccuggcugcacgugugcgugaccggcgacgacgagaacgccaccgccagcuucaucuacaacggcagacugguggacagcaucggcagcuggagcaagaagauccugagaacccaggagagcgagugcgugugcaucaacggcaccugcaccguggugaugaccgacggcagcgccagcggcaaggccgacaccaagauccuguucaucgaggagggcaagaucgugcacaccagccugcugagcggcagcgcccagcacguggaggagugcagcugcuaccccagauaccccggcgugagaugcgugugcagagacaacuggaagggcagcaacagacccaucguggacaucaacgugaaggacuacagcaucgugagcagcuacgugugcagcggccuggugggcgacacccccagaaagaacgacagcagcagcagcagccacugccuggaccccaacaacgaggagggcggccacggcgugaagggcugggccuucgacgacggcaacgacguguggaugggcagaaccaucagcgagaagcugagaagcggcuacgagaccuucaaggugaucgagggcuggagcaagcccaacagcaagcugcagaucaacagacaggugaucguggacagaggcaacagaagcggcuacagcggcaucuucagcguggagggcaagagcugcaucaacagaugcuucuacguggagcugaucagaggcagaaagcaggagaccgaggugcuguggaccagcaacagcaucgugguguucugcggcaccagcggcaccuacggcaccggcagcuggcccgacggcgccgacaucaaccugaugcccaucuga

SEQ ID NO: 174854 - RNA, 1410 nt, Artificial Sequence; identical to SEQ ID NO: 174853
  derived and/or modified CDS sequence (opt4) from neuraminidase__InfluenzaA__ABD15760

SEQ ID NO: 174855 - RNA, 1410 nt, Artificial Sequence; identical to SEQ ID NO: 174790
  derived and/or modified CDS sequence (opt4) from neuraminidase__InfluenzaA__ABD15771

SEQ ID NO: 174856 - RNA, 1410 nt, Artificial Sequence; identical to SEQ ID NO: 174790
  derived and/or modified CDS sequence (opt4) from neuraminidase__InfluenzaA__ABD15782

SEQ ID NO: 174857 - RNA, 1410 nt, Artificial Sequence; identical to SEQ ID NO: 174790
  derived and/or modified CDS sequence (opt4) from neuraminidase__InfluenzaA__ABD15793

SEQ ID NO: 174858 - RNA, 1410 nt, Artificial Sequence; identical to SEQ ID NO: 174774
  derived and/or modified CDS sequence (opt4) from neuraminidase__InfluenzaA__ABD16306

SEQ ID NO: 174859 - RNA, 1410 nt, Artificial Sequence
  derived and/or modified CDS sequence (opt4) from neuraminidase__InfluenzaA__ABD16317
augaaccccaaccagaagaucaucaccaucggcagcgugagccugaccaucagcaccaucugcuucuucaugcagaucgccauccugaucaccaccgugacccugcacuucaagcaguacgaguucaacagcccccccaacaaccaggugaugcugugcgagcccaccaucaucgagagaaacaucaccgagaucguguaccugaccaacaccaccaucgagaaggagaucugccccaagcuggccgaguacagaaacuggagcaagccccagugcaacaucaccggcuucgcccccuucagcaaggacaacagcaucagacugagcgccggcggcgacaucugggugaccagagagcccuacgugagcugcgaccccgacaagugcuaccaguucgcccugggccagggcaccacccugaacaacgugcacagcaacgacaccgugagagacagaacccccuacagaacccugcugaugaacgagcugggcgugcccuuccaccugggcaccaagcaggugugcaucgccuggagcagcagcagcugccacgacggcaaggccuggcugcacgugugcgugaccggcgacgacaagaacgccaccgccagcuucaucuacaacggcagacugguggacagcaucgugagcuggagcaaggagauccugagaacccaggagagcgagugcgugugcaucaacggcaccugcaccguggugaugaccgacggcagcgccagcggcaaggccgacaccaagauccuguucaucgaggagggcaagaucgugcacaccagcacccugagcggcagcgcccagcacguggaggagugcagcugcuaccccagauaccccggcgugagaugcgugugcagagacaacuggaagggcagcaacagacccaucguggacaucaacaucaaggacuacagcaucgugagcagcuacgugugcagcggccuggugggcgacacccccagaaagaacgacagcagcagcagcagccacugccuggaccccaacaacgaggagggcggccacggcgugaagggcugggccuucgacgacggcaacgacguguggaugggcagaaccaucagcgagaagcugagaagcggcuacgagaccuucaaggugaucgagggcuggagcaaccccaacagcaagcugcagaucaacagacaggugaucguggacagaggcaacagaagcggcuacagcggcaucuucagcguggagggcaagagcugcaucaacagaugcuucuacguggagcugaucagaggcagaaaggaggagaccgaggugcuguggaccagcaacagcaucgugguguucugcggcaccagcggcaccuacggcaccggcagcuggcccgacggcgccgacaucaaccugaugcccaucuga

SEQ ID NO: 174860 - RNA, 1410 nt, Artificial Sequence; identical to SEQ ID NO: 174774
  derived and/or modified CDS sequence (opt4) from neuraminidase__InfluenzaA__ABD16328

SEQ ID NO: 174861 - RNA, 1410 nt, Artificial Sequence
  derived and/or modified CDS sequence (opt4) from neuraminidase__InfluenzaA__ABD16339
augaaccccaaccagaagaucaucaccaucggcagcgugagccugaccaucagcaccaucugcuucuucaugcagaucgccauccugaucaccaccgugacccugcacuucaagcaguacgaguucaacagcccccccaacaaccaggugaugcugugcgagcccaccaucaucgagagaaacaucaccgagaucguguaccugaccaacaccaccaucgagaaggagaucugccccaagcuggccgaguacagaaacuggagcaagccccagugcgacaucaccggcuucgcccccuucagcaaggacaacagcaucagacugagcgccggcggcgacaucugggugaccagagagcccuacgugagcugcgaccccgacaagugcuaccaguucgcccugggccagggcaccacccugaacaacgugcacagcaacgacaccgugcacgacagaacccccuacagaacccugcugaugaacgagcugggcgugcccuuccaccugggcaccaagcaggugugcaucgccuggagcagcagcagcugccacgacggcaaggccuggcugcacgugugcgugaccggcgacgacaagaacgccaccgccagcuucaucuacaacggcagacugguggacagcaucgugagcuggagcaagaagauccugagaacccaggagagcgagugcgugugcaucaacggcaccugcaccguggugaugaccgacggcagcgccagcggcaaggccgacaccaagauccuguucaucgaggagggcaagaucgugcacaccagcacccugagcggcagcgcccagcacguggaggagugcagcugcuaccccagauaccccggcgugagaugcgugugcagagacaacuggaagggcagcaacagacccaucguggacaucaacaucaaggacuacagcaucgugagcagcuacgugugcagcggccuggugggcgacacccccagaaagaacgacagcagcagcagcggccacugccuggaccccaacaacgaggagggcggccacggcgugaagggcugggccuucgacgacggcaacgacguguggaugggcagaaccaucagcgagaagcugagaagcggcuacgagaccuucaaggugaucgagggcuggagcaaccccaacagcaagcugcagaucaacagacaggugaucguggacagaggcaacagaagcggcuacagcggcaucuucagcguggagggcaagagcugcaucaacagaugcuucuacguggagcugaucagaggcagaaaggaggagaccgaggugcuguggaccagcaacagcaucgugguguucugcggcaccagcggcaccuacggcaccggcagcuggcccgacggcgccgacaucaaccugaugcccaucuga

SEQ ID NO: 174862 - RNA, 1410 nt, Artificial Sequence
  derived and/or modified CDS sequence (opt4) from neuraminidase__InfluenzaA__ABD16361
augaaccccaaccagaagaucaucaccaucggcagcgugagccugaccaucagcaccaucugcuucuucaugcagaucgccauccugaucaccaccgugacccugcacuucaagcaguacgaguucaacagcccccccaacaaccaggugaugcugugcgagcccaccaucaucgagagaaacaucaccgagaucguguaccugaccaacaccaccaucgagaaggagaucugccccaagcuggccgaguacagaaacuggagcaagccccagugcgacaucaccggcuucgcccccuucagcaaggacaacagcaucagacugagcgccggcggcgacaucugggugaccagagagcccuacgugagcugcgaccccgacaagugcuaccaguucgcccugggccagggcaccacccugaacaacgugcacagcaacgacaccgugcacgacagaacccccuacagaacccugcugaugaacgagcugggcgugcccuuccaccugggcaccaagcaggugugcaucgccuggagcagcagcagcugccacgacggcaaggccuggcugcacgugugcgugaccggcgacgacaagaacgccaccgccagcuucaucuacaacggcaagcugguggacagcaucgugagcuggagcaagaagauccugagaacccaggagagcgagugcgugugcaucaacggcaccugcaccguggugaugaccgacggcagcgccagcggcaaggccgacaccaagauccuguucaucgaggagggcaagaucgugcacaccagcacccugagcggcagcgcccagcacguggaggagugcagcugcuaccccagauaccccggcgugagaugcgugugcagagacaacuggaagggcagcaacagacccaucguggacaucaacaucaaggacuacagcaucgugagcagcuacgugugcagcggccuggugggcgacacccccagaaagaacgacagcagcagcagcagccacugccuggaccccaacaacgaggagggcggccacggcgugaagggcugggccuucgacgacggcaacgacguguggaugggcagaaccaucagcgagaagcugagaagcggcuacgagaccuucaaggugaucgagggcuggagcaaccccaacagcaagcugcagaucaacagacaggugaucguggacagaggcaacagaagcggcuacagcggcaucuucagcguggagggcaagagcugcaucaacagaugcuucuacguggagcugaucagaggcagaaaggaggagaccgaggugcuguggaccagcaacagcaucgugguguucugcggcaccagcggcaccuacggcaccggcagcuggcccgacggcgccgacaucaaccugaugcccaucuga

SEQ ID NO: 174863 - RNA, 1410 nt, Artificial Sequence; identical to SEQ ID NO: 174774
  derived and/or modified CDS sequence (opt4) from neuraminidase__InfluenzaA__ABD16475

SEQ ID NO: 174864 - RNA, 1410 nt, Artificial Sequence; identical to SEQ ID NO: 174774
  derived and/or modified CDS sequence (opt4) from neuraminidase__InfluenzaA__ABD16486

SEQ ID NO: 174865 - RNA, 1410 nt, Artificial Sequence; identical to SEQ ID NO: 174801
  derived and/or modified CDS sequence (opt4) from neuraminidase__InfluenzaA__ABD16497

SEQ ID NO: 174866 - RNA, 1410 nt, Artificial Sequence; identical to SEQ ID NO: 174774
  derived and/or modified CDS sequence (opt4) from neuraminidase__InfluenzaA__ABD16508

SEQ ID NO: 174867 - RNA, 1410 nt, Artificial Sequence
  derived and/or modified CDS sequence (opt4) from neuraminidase__InfluenzaA__ABD16519
augaaccccaaccagaagaucaucaccaucggcagcgugagccugaccaucagcaccaucugcuucuucaugcagaucgccauccugaucaccaccgugacccugcacuucaagcaguacgaguucaacagcccccccaacaaccaggugaugcugugcgagcccaccaucaucgagagaaacaucaccgagaucguguaccugaccaacaccaccaucgagaaggagaucugccccaagcuggccgaguacagaaacuggagcaagccccagugcgacaucaccggcuucgcccccuucagcaaggacaacagcaucagacugagcgccggcggcgacaucugggugaccagagagcccuacgugagcugcgaccccgacaagugcuaccaguucgcccugggccagggcaccacccugaacaacgugcacagcaacgacaccgugcacgacagaacccccuacagaacccugcugaugaacgagcugggcgugcccuuccaccugggcaccaagcaggugugcaucgccuggagcagcagcagcugccacgacggcaaggccuggcugcacgugugcgugaccggcgacgacaagaacgccaccgccagcuucaucuacaacggcagacugguggacagcaucgugagcuggagcaaggacauccugagaacccaggagagcgagugcgugugcaucaacggcaccugcaccguggugaugaccgacggcagcgccagcggcaaggccgacaccaagauccuguucaucgaggagggcaagaucgugcacaccagcacccugagcggcagcgcccagcacguggaggagugcagcugcuaccccagauaccccggcgugagaugcgugugcagagacaacuggaagggcagcaacagacccaucguggacaucaacaucaaggacuacagcaucgugagcagcuacgugugcagcggccuggugggcgacacccccagaaagaccgacagcagcagcagcagccacugccuggaccccaacaacgaggagggcggccacggcgugaagggcugggccuucgacgacggcaacgacguguggaugggcagaaccaucagcgagaagcugagacugggcuacgagaccuucaaggugaucgagggcuggagcaaccccaacagcaagcugcagaucaacagacaggugaucguggacagaggcaacagaagcggcuacagcggcaucuucagcguggagggcaagagcugcaucaacagaugcuucuacguggagcugaucagaggcagaaaggaggagaccgaggugcuguggaccagcaacagcaucgugguguucugcggcaccagcggcaccuacggcaccggcagcuggcccgacggcgccgacaucaaccugaugcccaucuga

SEQ ID NO: 174868 - RNA, 1410 nt, Artificial Sequence
  derived and/or modified CDS sequence (opt4) from neuraminidase__InfluenzaA__ABD16530
augaaccccaaccagaagaucaucaccaucggcagcgugagccugaccaucgccaccaucugcuuccugaugcagaucgccauccuggugaccaccgugacccugcacuucaagcagcacgagugcaacagcccccccaacaaccaggugaugcugugcgagcccaccaucaucgagagaaacaucaccgagaucguguaccugaccaacaccaccaucgagaaggagaucugccccaagcugguggaguacagaaacuggagcaagccccagugcaacaucaccggcuucgcccccuucagcaaggacaacagcaucagacugagcgccggcggcgacaucugggugaccagagagcccuacgugagcugcgaccccgacaagugcuaccaguucgcccugggccagggcaccacccugaacaacggccacagcaacgacaccgugcacgacagaacccccuacagaacccugcugaugaacgagcugggcgugcccuuccaccugggcaccagacaggugugcaucgccuggagcagcagcagcugccacgacggcaaggccuggcugcacgugugcgugaccggcgacgacaagaacgccaccgccagcuucaucuacaacggcagacugguggacagcaucggcagcuggagcaagaagauccugagaacccaggagagcgagugcgugugcaucaacggcaccugcaccguggugaugaccgacggcagcgccagcggcaaggccgacaccaagauccuguucaucgaggagggcaagaucgugcacaucagcacccugagcggcagcgcccagcacguggaggagugcagcugcuaccccagauaccccggcgugagaugcgugugcagagacaacuggaagggcagcaacagacccaucguggacaucaacgugaaggacuacagcaucgugagcagcuacgugugcagcggccuggugggcgacacccccagaaagaacgacagcuucagcagcagccacugccuggaccccaacaacgaggagggcggccacggcgugaagggcugggccuucgacgacggcaacgacguguggaugggcagaaccaucagcgagaagcugagaagcggcuacgagaccuucaaggugaucgagggcuggagcaagcccaacagcaagcugcagaucaacagacaggugaucguggagagaggcaacagaagcggcuacagcggcaucuucagcguggagggcaagagaugcaucaacagaugcuucuacguggagcugaucagaggcagaaaggaggagaccgaggugugguggaccagcaacagcaucgugguguucugcggcaccagcggcaccuacggcaccggcagcuggcccgacggcgccgacaucaaccugaugcccaucuga

SEQ ID NO: 174869 - RNA, 1410 nt, Artificial Sequence; identical to SEQ ID NO: 174651
  derived and/or modified CDS sequence (opt4) from neuraminidase__InfluenzaA__ABD16541

SEQ ID NO: 174870 - RNA, 1410 nt, Artificial Sequence; identical to SEQ ID NO: 174774
  derived and/or modified CDS sequence (opt4) from neuraminidase__InfluenzaA__ABD16552

SEQ ID NO: 174871 - RNA, 1410 nt, Artificial Sequence; identical to SEQ ID NO: 174773
  derived and/or modified CDS sequence (opt4) from neuraminidase__InfluenzaA__ABD16563

SEQ ID NO: 174872 - RNA, 1410 nt, Artificial Sequence
  derived and/or modified CDS sequence (opt4) from neuraminidase__InfluenzaA__ABD16574
augaaccccaaccagaagaucaucaccaucggcagcgugagccugaccaucgccaccaucugcuuccugaugcagaucgccauccuggugaccaccgugacccugcacuucaagcaguacgagugcagcagcccccccaacaaccaggugaugcccugcgagcccaccaucaucgagagaaacaucaccgagaucguguaccugaccaacaccaccaucgagaaggagaucugccccaagcugguggaguacagaaacuggagcaagccccagugcaagaucaccggcuucgcccccuucagcaaggacaacagcaucagacugagcgccggcggcgacaucugggugaccagagagcccuacgugagcugcgaccccggcaagugcuaccaguucgcccugggccagggcaccacccugaacaacagacacagcaacgacaccgugcacgacagaacccccuacagaacccugcugaugaacgagcugggcgugcccuuccaccugggcaccaagcaggugugcaucgccuggagcagcagcagcugccacgacggcaaggccuggcugcacgugugcgugaccggccacgacgagaacgccaccgccagcuucaucuacgacggcagacugguggacagcaucggcagcuggagcaagaacauccugagaacccaggagagcgagugcgugugcaucaacggcaccugcaccguggugaugaccgacggcagcgccagcgagagagccgacaccaagauccuguucaucgaggagggcaagaucgugcacaucagcccccugagcggcagcgcccagcacguggaggagugcagcugcuaccccagauaccccggcgugagaugcgugugcagagacaacuggaagggcagcaacagacccaucguggacaucaacgugaaggacuacagcaucgugagcagcuacgugugcagcggccuggugggcgacacccccagaaagaacgacagaagcagcagcagcuacugcagaaaccccaacaacgagaagggcagccacggcgugaagggcugggccuucgacgacggcaacgacguguggaugggcagaaccaucggcgaggagcugagaagcggcuacgagaccuucaaggugaucggcggcuggagcacccccaacagcaagcugcagaucaacagacaggugaucguggacagcggcaacagaagcggcuacagcggcaucuucagcguggagggcaagagcugcaucaacagaugcuucuacguggagcugaucagaggcagaaagaaggagaccagagugugguggaccagcaacagcaucgugguguucugcggcaccagcggcaccuacggcaccggcagcuggcccgacggcgccgacaucaaccugaugcccaucuga

SEQ ID NO: 174873 - RNA, 1410 nt, Artificial Sequence
  derived and/or modified CDS sequence (opt4) from neuraminidase__InfluenzaA__ABD16585
augaaccccaaccagaagaucaucaccaucggcagcgugagccugaccaucgccaccaucugcuuccugaugcagaucgccauccuggugaccaccgugacccugcacuucaagcaguacgagugcagcagcccccccaacaaccaggugaugcccugcgagcccaccaucaucgagagaaacaucaccgagaucguguaccugaccaacaccaccaucgagaaggagaucugccccaagcugguggaguacagaaacuggagcaagccccagugcaagaucaccggcuucgcccccuucagcaaggacaacagcaucagacugagcgccggcggcgacaucugggugaccagagagcccuacgugagcugcgaccccggcaagugcuaccaguucgcccugggccagggcaccacccugaacaacagacacagcaacgacaccgugcacgacagaacccccuacagaacccugcugaugaacgagcugggcgugcccuuccaccugggcaccaagcaggugugcaucgccuggagcagcagcagcugccacgacggcaaggccuggcugcacgugugcgugaccggccacgacaagaacgccaccgccagcuucaucuacgacggcagacugguggacagcaucggcagcuggagcaagaacauccugagaacccaggagagcgagugcgugugcaucaacggcaccugcaccguggugaugaccgacggcagcgccagcgagagagccgacaccaagauccuguucaucgaggagggcaagaucgugcacaucagcccccugagcggcagcgcccagcacguggaggagugcagcugcuaccccagauaccccggcgugagaugcgugugcagagacaacuggaagggcagcaacagacccaucguggacaucaacgugaaggacuacagcaucgugagcagcuacgugugcagcggccuggugggcgacacccccagaaagaacgacagaagcagcagcagcuacugcagaaaccccaacaacgagaagggcagccacggcgugaagggcugggccuucgacgacggcaacgacguguggaugggcagaaccaucggcgaggagcugagaagcggcuacgagaccuucaaggugaucggcggcuggagcacccccaacagcaagcugcagaucaacagacaggugaucguggacagcggcaacagaagcggcuacagcggcaucuucagcguggagggcaagagcugcaucaacagaugcuucuacguggagcugaucagaggcagagagcaggagaccagagugugguggaccagcaacagcaucgugguguucugcggcaccagcggcaccuacggcaccggcagcuggcccgacggcgccgacaucaaccugaugcccaucuga

SEQ ID NO: 174874 - RNA, 1410 nt, Artificial Sequence
  derived and/or modified CDS sequence (opt4) from neuraminidase__InfluenzaA__ABD16721
augaaccccaaccagaagaucaucaccaucggcagcgugagccugaccaucgccaccaucugcuuccugaugcagaucgccauccuggugaccaccgugacccugcacuucaagcaguacgagugcagcagcccccccaacaaccaggugaugcccugcgagcccaucaucaucgagagaaacaucaccaagaucguguaccugaccaacaccaccaucgagaaggagaucugccccaagcugguggaguacagaaacuggagcaagccccagugcaagaucaccggcuucgcccccuucagcaaggacaacagcaucagacugagcgccggcggcgacaucugggugaccagagagcccuacgugagcugcgaccccggcaagugcuaccaguucgcccugggccagggcaccacccugaacaacaagcacagcaacgacaccauccacgacagaacccccuacagaacccugcugaugaacgagcugggcgugcccuuccaccugggcaccaagcaggugugcaucgccuggagcagcagcagcugccacgacggcaaggccuggcugcacgugugcgugaccggccacgacaagaacgccaccgccagcuucaucuacgacggcagacugguggacagcaucggcagcuggagcaagaacauccugagaacccaggagagcgagugcgugugcaucaacggcaccugcaccguggugaugaccgacggcagcgccagcgagagagccgacaccaagauccuguucaucgaggagggcaagaucgugcacaucagcccccugagcggcagcgcccagcacguggaggagugcagcugcuaccccagauaccccggcgugagaugcgugugcagagacaacuggaagggcagcaacagacccaucguggacaucaacgugaaggacuacagcaucgugagcagcuacgugugcagcggccuggugggcgacacccccagaaagaacgacagaagcagcagcagcuacugccagaaccccaacaacgagaagggcaaccacggcgugaagggcugggccuucgacgacggcaacgacguguggaugggcagaaccaucggcgaggagcugagaagcggcuacgagaccuucaaggugaucggcggcuggagcacccccaacagcaagcugcagaucaacagacaggugaucguggacagcaagaacagaagcggcuacagcggcaucuucagcguggagggcaagagcugcaucaacagaugcuucuacguggagcugaucagaggcagagagcaggagaccagagugugguggaccagcaacagcaucgugguguucugcggcaccagcggcaccuacggcaccggcagcuggcccgacggcgccgacaucaaccugaugcccaucuga

SEQ ID NO: 174875 - RNA, 1410 nt, Artificial Sequence; identical to SEQ ID NO: 174544
  derived and/or modified CDS sequence (opt4) from neuraminidase__InfluenzaA__ABD16732

SEQ ID NO: 174876 - RNA, 1410 nt, Artificial Sequence
  derived and/or modified CDS sequence (opt4) from neuraminidase__InfluenzaA__ABD16743
augaaccccaaccagaagaucaucaccaucggcagcgugagccugaccaucgccaccaucugcuuccugaugcagaucgccauccuggugaccaccgugacccugcacuucaagcaguacgagugcgacagccccgccaacaaccaggugaugcccugcgagcccaucaucaucgagagaaacaucaccgagaucguguaccugaccaacaccaccaucgagaaggagaucugccccaagcugguggaguacagaaacuggagcaagccccagugcaagaucaccggcuucgcccccuucagcaaggacaacagcaucagacugagcgccggcggcgacaucugggugaccagagagcccuacgugagcugcgaccccggcaagugcuaccaguucgcccugggccagggcaccacccuggacaacaagcacagcaacgacaccauccacgacagaaccccccacagaacccugcugaugaacgagcugggcgugcccuuccaccugggcaccagacaggugugcaucgccuggagcagcagcagcugccacgacggcaaggccuggcugcacgugugcgugaccggcuacgacaagaacgccaccgccagcuucaucuacgacggcagacugguggacagcaucggcagcuggagccagaacauccugagaacccaggagagcgagugcgugugcaucaacggcaccugcaccguggugaugaccgacggcagcgccagcggcagagccgacaccaagauccuguucaucgaggagggcaagaucgugcacaccagcccccugagcggcagcgcccagcacguggaggagugcagcugcuaccccagauaccccggcgugagaugcaucugcagagacaacuggaagggcagcaacagacccgugguggacaucaacgugaaggacuacagcaucgacagcagcuacgugugcagcggccuggugggcgacacccccagaaacaacgacagaagcagcagcagcuacugcagaaaccccaacaacgagaagggcacccacggcgugaagggcugggccuucgacgacggcaacgacguguggaugggcagaaccaucagcgaggacagcagaagcggcuacgagaccuucaaggugaucggcggcuggagcacccccaacagcaagcugcagaugaacagacaggugaucguggacagcgacaacagaagcggcuacagcggcaucuucagcguggagggcaagagcugcaucaacagaugcuucuacguggagcugaucagaggcagagagcaggagaccagagugugguggaccagcaacagcaucgugguguucugcggcaccagcggcaccuacggcaccggcagcuggcccgacggcgccgacaucaaccugaugcccaucuga

SEQ ID NO: 174877 - RNA, 1410 nt, Artificial Sequence; identical to SEQ ID NO: 174636
  derived and/or modified CDS sequence (opt4) from neuraminidase__InfluenzaA__ABD16754

SEQ ID NO: 174878 - RNA, 1410 nt, Artificial Sequence; identical to SEQ ID NO: 174734
  derived and/or modified CDS sequence (opt4) from neuraminidase__InfluenzaA__ABD16765

SEQ ID NO: 174879 - RNA, 1410 nt, Artificial Sequence; identical to SEQ ID NO: 174178
  derived and/or modified CDS sequence (opt4) from neuraminidase__InfluenzaA__ABD17326

SEQ ID NO: 174880 - RNA, 1410 nt, Artificial Sequence
  derived and/or modified CDS sequence (opt4) from neuraminidase__InfluenzaA__ABD38137
augaaccccaaccagaagaucaucaccaucggcagcgugagccugaccaucgccaccaucugcuuccugaugcagaucgccauccuggugaccaccgugacccugcacuucaagcaguacgagugcaacagcccccccaacaaccaggugaugcugugcgagcccaccaucaucgagagaaacaucaccgagaucguguaccugaccaacaccaccaucgagaaggagaucugccccaagcuggccgaguacagaaacuggagcaagccccagugcaacaucaccggcuucgcccccuucagcaaggacaacagcaucagacugagcgccggcggcgacaucugggugaccagagagcccuacgugagcugcgaccccgacaagugcuaccaguucgcccugggccagggcaccacccugaacaacggccacagcaacgacaccgugcacgacagaacccccuacagaacccugcugaugaacgagcugggcgugcccuuccaccugggcaccagacaggugugcaucgccuggagcagcagcagcugccacgacggcaaggccuggcugcacgugugcgugaccggcgacgacgagaacgccaccgccagcuucaucuacaacggcagacugguggacagcaucggcagcuggagcaagaagauccugagaacccaggagagcgagugcgugugcaucaacggcaccugcaccguggugaugaccgacggcagcgccagcggcaaggccgacaccaagauccuguucaucgaggagggcaagaucgugcacaucagcacccugagcggcagcgcccagcacguggaggagugcagcugcuaccccagauaccccggcgugagaugcgugugcagagacaacuggaagggcagcaacagacccaucaucgacaucaacgugaaggacuacagcaucgugagcagcuacgugugcagcggccuggugggcgacacccccagaaagaacgacagcuucagcagcagccacugccuggaccccaacaacgaggagggcggccacggcgugaagggcugggccuucgacgacggcaacgacguguggaugggcagaaccaucagcgagaagcugagaagcggcuacgagaccuucaaggugaucgagggcuggagcaagcccaacagcaagcugcagaccaacagacaggugaucguggagagaggcaacagaagcggcuacagcggcaucuucagcguggagggcaagagcugcaucaacagaugcuucuacguggagcugaucagaggcagaaaggaggagcccgaggugugguggaccagcaacagcaucgugguguucugcggcacccccggcaccuacggcaccggcagcuggcccgacggcgccgacaucaaccugaugcccaucuga

SEQ ID NO: 174881 - RNA, 1413 nt, Artificial Sequence; identical to SEQ ID NO: 174446
  derived and/or modified CDS sequence (opt4) from neuraminidase__InfluenzaA__ABD60782

SEQ ID NO: 174882 - RNA, 1410 nt, Artificial Sequence
  derived and/or modified CDS sequence (opt4) from neuraminidase__InfluenzaA__ABD60793
augaaccccaaccagaagaucaucaccaucggcagcgugagccugaccaucgccaccaucugcuuccugaugcagaucgccauccuggugaccaccgugacccugcacuucaagcaguacgagugcgacagccccgugaacaaccaggugaugcccugcgagcccaucaucaucgagagaaacaucaccgagaucguguaccugaccaacaccaccaucgagaaggagaucugccccaagcugguggaguacagaaacuggagcaagccccagugcaagaucaccggcuucgcccccuucagcaaggacaacagcaucagacugagcgccggcggcgacaucugggugaccagagagcccuacgugagcugcgaccccggcaagugcuaccaguucgcccugggccagggcaccacccuggacaacaagcacagcaacgacaccauccacgacagaaccccccacagaacccugcugaugaacgagcugggcgugcccuuccaccugggcaccagacaggugugcaucgccuggagcagcagcagcugccacgacggcaaggccuggcugcacgugugcgugaccggcuacgacaagaacgccaccgccagcuucaucuacgacggcagacugguggacagcaucgugagcuggagccagaacauccugagaacccaggagagcgagugcgugugcaucaacggcaccugcaccguggugaugaccgacggcagcgccagcgagagagccgacaccaagauccuguucaucgaggagggcaagaucgugcacaucagcccccugagcggcagcgcccagcacguggaggagugcagcugcuaccccagauaccccggcgugagaugcaucugcagagacaacuggaagggcagcaacagacccgugguggacaucaacgugaaggacuacagcaucgacagcagcuacgugugcagcggccuggugggcgacacccccagaaacaacgacagaagcagcaacagcuacugcagaaaccccaacaacgagaagggcaaccacggcgugaagggcugggccuucgacgacggcaacgaccuguggaugggcagaaccaucagcgaggacagcagaagcggcuacgagaccuucaaggugaucggcggcuggagcacccccaacagcaagcugcagaucaacagacaggugaucguggacagcgacaacagaagcggcuacagcggcaucuucagcguggagggcaagagcugcaucaacagaugcuucuacguggagcugaucagaggcagagagcaggagaccagagugugguggaccagcaacagcaucaucguguucugcggcaccagcggcaccuacggcaccggcagcuggcccgacggcgccgacaucaaccugaugcccaucuga

SEQ ID NO: 174883 - RNA, 1410 nt, Artificial Sequence; identical to SEQ ID NO: 174579
  derived and/or modified CDS sequence (opt4) from neuraminidase__InfluenzaA__ABD60804

SEQ ID NO: 174884 - RNA, 1410 nt, Artificial Sequence; identical to SEQ ID NO: 174772
  derived and/or modified CDS sequence (opt4) from neuraminidase__InfluenzaA__ABD60815

SEQ ID NO: 174885 - RNA, 1410 nt, Artificial Sequence; identical to SEQ ID NO: 174774
  derived and/or modified CDS sequence (opt4) from neuraminidase__InfluenzaA__ABD60826

SEQ ID NO: 174886 - RNA, 1410 nt, Artificial Sequence; identical to SEQ ID NO: 174853
  derived and/or modified CDS sequence (opt4) from neuraminidase__InfluenzaA__ABD60837

SEQ ID NO: 174887 - RNA, 1410 nt, Artificial Sequence
  derived and/or modified CDS sequence (opt4) from neuraminidase__InfluenzaA__ABD60848
augaaccccaaccagaagaucaucaccaucggcagcgugagccugaccaucgccaccaucugcuuccugaugcagguggccauccuggugaccaccgugacccugcacuucaagcaguacgagugcaacagcccccccaacaaccaggugaugcugugcgagcccaccaucaucgagagaaacaucaccgagaucguguaccugaccaacaccaccaucgagaaggagaucugccccaagcuggccgaguacagaaacuggagcaagccccagugcaacaucaccggcuucgcccccuucagcaaggacaacagcaucagacugagcgccggcggcgacaucugggugaccagagagcccuacgugagcugcgaccccgacaagugcuaccaguucgcccugggccagggcaccacccugaacaacggccacagcaacgacaccgugcacgacagaacccccuacagaacccugcugaugaacgagcugggcgugcccuuccaccugggcaccaagcaggugugcaucgccuggagcagcagcagcugccacgacggcaaggccuggcugcacgugugcgugaccggcgacgacgagaacgccaccgccagcuucaucuacaacggcagacugguggacagcaucggcagcuggagcaagaagauccugagaacccaggagagcgagugcgugugcaucaacggcaccugcaccguggugaugaccgacggcagcgccagcggcaaggccgacaccaagauccuguucaucgaggagggcaagaucgugcacaccagccugcugagcggcagcgcccagcacguggaggagugcagcugcuaccccagauaccccggcgugagaugcgugugcagagacaacuggaagggcagcaacagacccaucguggacaucaacgugaaggacuacagcaucgugagcagcuacgugugcagcggccuggugggcgacacccccagaaagaacgacagcagcagcagcagccacugccuggaccccaacaacgaggagggcggccacggcgugaagggcugggccuucgacgacggcaacgacguguggaugggcagaaccaucagcgagaagcugagaagcggcuacgagaccuucaaggugaucgagggcuggagcaagcccaacagcaagcugcagaucaacagacaggugaucguggacagaggcaacagaagcggcuacagcggcaucuucagcguggagggcaagagcugcaucaacagaugcuucuacguggagcugaucagaggcagaaagcaggagaccgaggugcuguggaccagcaacagcaucgugguguucugcggcaccagcggcaccuacggcaccggcagcuggcccgacggcgccgacaucaaccugaugcccaucuga

SEQ ID NO: 174888 - RNA, 1413 nt, Artificial Sequence
  derived and/or modified CDS sequence (opt4) from neuraminidase__InfluenzaA__ABD60881
augaaccccaaccagaagaucaucaccaucggcagcaucagcaucgccaucggcaucaucagccugaugcugcagaucggcaacaucaucagcaucugggccagccacagcauccagaccggcagccagaaccacaccggcaucugcaaccagagaaucaucaccuacgagaacagcaccugggugaaccacaccuacgugaacaucaacaacaccaacgugguggccggcaaggacaagaccagcgugacccuggccggcaacagcagccugugcagcaucagcggcugggccaucuacaccaaggacaacagcaucagaaucggcagcaagggcgacguguucgugaucagagagcccuucaucagcugcagccaccuggagugcagaaccuucuuccugacccagggcgcccugcugaacgacaagcacagcaacggcaccgugaaggacagaagccccuacagagcccugaugagcugcccccugggcgaggcccccagccccuacaacagcaaguucgagagcguggccuggagcgccagcgccugccacgacggcaugggcuggcugaccaucggcaucagcggccccgacaacggcgccguggccgugcugaaguacaacggcaucaucaccgagaccaucaagagcuggaagaagagaauccugagaacccaggagagcgagugcgugugcgugaacggcagcugcuucaccaucaugaccgacggccccagcaacggcgccgccagcuacaagaucuucaagaucgagaagggcaaggugaccaagagcaucgagcugaacgcccccaacuuccacuacgaggagugcagcugcuaccccgacaccggcaccgugaugugcgugugcagagacaacuggcacggcagcaacagacccugggugagcuucaaccagaaccuggacuaccagaucggcuacaucugcagcggcguguucggcgacaaccccagacccaaggacggcgagggcagcugcaaccccgugaccguggacggcgccgacggcgugaagggcuucagcuacaaguacggcaacggcguguggaucggcagaaccaagagcaacagacugagaaagggcuucgagaugaucugggaccccaacggcuggaccgacaccgacagcaacuucagcgugaagcaggacgugguggccaucaccgacuggagcggcuacagcggcagcuucgugcagcaccccgagcugaccggccuggacugcaucagacccugcuucuggguggagcuggugagaggccugcccagagagaacaccaccaucuggaccagcggcagcagcaucagcuucugcggcgugaacagcgacaccgccaacuggagcuggcccgacggcgccgagcugcccuucaccaucgacaaguga

SEQ ID NO: 174889 - RNA, 1413 nt, Artificial Sequence
  derived and/or modified CDS sequence (opt4) from neuraminidase__InfluenzaA__ABD60892
augaaccccaaccagaagaucaucaccaucggcagcaucagcaucgccaucggcaucaucagccugaugcugcagaucggcaacaucaucagcaucugggccagccacagcauccagaccggcagccagaaccacaccggcaucugcaaccagagagugaucaccuacgagaacagcaccugggugaaccacaccuacgugaacaucaacaacaccaacgugguggccggcaaggacaagaccagcgugacccuggccggcaacagcagccugugcagcaucagcggcugggccaucuacaccaaggacaacagcaucagaaucggcagcaagggcgacguguucgugaucagagagcccuucaucagcugcagccaccuggagugcagaaccuucuuccugacccagggcgcccugcugaacgacaagcacagcaacggcaccgugaaggacagaagccccuacagagcccugaugagcugcccccugggcgaggcccccagccccuacaacagcaaguucgagagcguggccuggagcgccagcgccugccacgacggcaugggcuggcugaccaucggcaucagcggccccgacaacggcgccguggccgugcugaaguacaacggcaucaucaccgagaccaucaagagcuggaagaagagaauccugagaacccaggagagcgagugcgugugcgugaacggcagcugcuucaccaucaugaccgacggccccagcaacggcgccgccagcuacaagaucuucaagaucgagaagggcaaggugaccaagagcaucgagcugaacgcccccaacuuccacuacgaggagugcagcugcuaccccgacaccggcaccgugaugugcgugugcagagacaacuggcacggcagcaacagacccugggugagcuucaaccagaaccuggacuaccagaucggcuacaucugcagcggcguguucggcgacaaccccagacccaaggacggcgagggcagcugcaaccccgugaccguggacggcgccgacggcgugaagggcuucagcuacaaguacggcaacggcguguggaucggcagaaccaagagcaacagacugagaaagggcuucgagaugaucugggaccccaacggcuggaccgacaccgacagcaacuucagcgugaagcaggacgugguggccaucaccgacuggagcggcuacagcggcagcuucgugcagcaccccgagcugaccggccuggacugcaucagacccugcuucuggguggagcuggugagaggccugcccagagagaacaccaccaucuggaccagcggcagcagcaucagcuucugcggcgugaacagcgacaccgccaacuggagcuggcccgacggcgccgagcugcccuucaccaucgacaaguga

SEQ ID NO: 174890 - RNA, 1413 nt, Artificial Sequence; identical to SEQ ID NO: 174888
  derived and/or modified CDS sequence (opt4) from neuraminidase__InfluenzaA__ABD60903

SEQ ID NO: 174891 - RNA, 1413 nt, Artificial Sequence; identical to SEQ ID NO: 174475
  derived and/or modified CDS sequence (opt4) from neuraminidase__InfluenzaA__ABD60914

SEQ ID NO: 174892 - RNA, 1410 nt, Artificial Sequence
  derived and/or modified CDS sequence (opt4) from neuraminidase__InfluenzaA__ABD60925
augaaccccaaccagaagaucaucaccaucggcagcgugagccugaccaucgccaccaucugcuuccugaugcagaucgccauccuggugaccaccgugacccugcacuucaagcagcacgagugcaacagcccccccaacaaccaggugaugcugugcgagcccaccaucaucgagagaaacaucaccgagaucguguaccugaccaacaccaccaucgagaaggagaucugccccaagcuggccgaguacagaaacuggagcaagccccagugcaacaucaccggcuucgcccccuucagcaaggacaacagcaucagacugagcgccggcggcgacaucugggugaccagagagcccuacgugagcugcgaccccgacaagugcuaccaguucgcccugggccagggcaccacccugaacaacggccacagcaacgacaccgugcacgacagaacccccuacagaacccugcugaugaacgagcugggcgugcccuuccaccugggcaccagacaggugugcaucgccuggagcagcagcagcugccacgacggcaaggccuggcugcacgugugcgugaccggcgacgacaagaacgccaccgccagcuucaucuacaacggcagacugguggacagcaucggcagcuggagcaagaagauccugagaacccaggagagcgagugcgugugcaucaacggcaccugcaccguggugaugaccgacggcagcgccagcggcaaggccgacaccaagauccuguucaucgaggagggcaagaucgugcacaucagcacccugagcggcagcgcccagcacguggaggagugcagcugcuaccccagauaccccggcgugagaugcgugugcagagacaacuggaagggcagcaacagacccaucguggacaucaacaucaaggacuacagcaucgugagcagcuacgugugcagcggccuggugggcgacacccccagaaagaacgacagcuucagcagcagccacugccuggaccccaacaacgaggagggcggccacggcgugaagggcugggccuucgacgacggcaacgacguguggaugggcagaaccaucagcgagaagcugagaagcggcuacgagaccuucaaggugaucgagggcuggagcaagcccaacagcaagcugcagaucaacagacaggugaucguggagagaggcaacagaagcggcuacagcggcaucuucagcguggagggcaagagcugcaucaacagaugcuucuacguggagcugaucagaggcagaaaggaggagaccgaggugugguggaccagcaacagcaucgugguguucugcggcaccagcggcaccuacggcaccggcagcuggcccgacggcgccgacaucaaccugaugcccaucuga

SEQ ID NO: 174893 - RNA, 1413 nt, Artificial Sequence
  derived and/or modified CDS sequence (opt4) from neuraminidase__InfluenzaA__ABD60947
augaaccccaaccagaagaucaucaccaucggcagcaucugcauggccaucggcaucaucagccugauccugcagaucggcaacaucaucagcaucugggugagccacagcauccagaccggcagccagaaccacaccggcaucugcaaccagagaaucaucaccuacgagaacagcaccugggugaaccagaccuacgugaacaucagcaacaccaacgugguggccggcaaggacaccaccagcaugacccuggccggcaacagcagccugugccccaucagaggcugggccaucuacagcaaggacaacagcaucagaaucggcagcaagggcgacguguucgugaucagagagcccuucaucagcugcagccaccuggagugcagaaccuucuuccugacccagggcgcccugcugaacgacaagcacagcaacggcaccaucaaggacagaagccccuacagagcccugaugagcugccccaucggcgaggcccccagccccuacaacagcagauucgagagcguggccuggagcgccagcgccugccacgacggcaugggcuggcugaccaucggcaucagcggccccgacgacggcgccguggccgugcugaaguacaacggcaucaucaccgagaccaucaagagcuggagaaagcagauccugagaacccaggagagcgagugcgugugcgugaacggcagcugcuucaccaucaugaccgacggccccagcgacggccccgccagcuacagaaucuucaagaucgagaagggcaagaucaccaagagcaucgagcuggacgcccccaacagccacuacgaggagugcagcugcuaccccgacaccggcaccgugaugugcgugugcagagacaacuggcacggcagcaacagacccugggugagcuucaaccagaaccuggacuaccagaucggcuacaucugcagcggcguguucggcgacaaccccagacccaaggacggcaagggcagcugcgaccccgugaacguggacggcgccgacggcgugaagggcuucagcuacagauacggcaacggcguguggaucggcagaaccaagagcaacagcagcagaaagggcuucgagaugaucugggaccccaacggcuggaccgacaccgacagcaacuuccuggugaagcaggacgugguggccaugaccgacuggagcggcuacagcggcagcuucgugcagcaccccgagcugaccggccuggacugcaugagacccugcuucuggguggagcugaucagaggcagacccagagagaagaccaccaucuggaccagcggcagcagcaucagcuucugcggcgugaacagcgacaccgugaacuggagcuggcccgacggcgccgagcugcccuucaccaucgacaaguga

SEQ ID NO: 174894 - RNA, 1410 nt, Artificial Sequence
  derived and/or modified CDS sequence (opt4) from neuraminidase__InfluenzaA__ABD61263
augaaccccaaccagaagaucaucaccaucggcagcgugagccugaccaucgccaccaucugcuuccugaugcagaucgccauccuggugaccaccgugacccugcacuucaagcagcacgagugcaacagcccccccaacaaccaggugaugcugugcgagcccaccaucaucgagagaaacaucaccgagaucguguaccugaccaacaccaccaucgagaaggagaucugccccaagcuggccgaguacagaaacuggagcaagccccagugcaacaucaccggcuucgcccccuucagcaaggacaacagcaucagacugagcgccggcggcgacaucugggugaccagagagcccuacgugagcugcgaccccgacaagugcuaccaguucgcccugggccagggcaccacccugaacaacggccacagcaacgacaccgugcacgacagaacccccuacagaacccugcugaugaacgagcugggcgugcccuuccaccugggcaccagacaggugugcaucgccuggagcagcagcagcugccacgacggcaaggccuggcugcacgugugcgugaccggcgacgacaagaacgccaccgccagcuucaucuacaacggcagacugguggacagcaucggcagcuggagcaagaagauccugagaacccaggagagcgagugcgugugcaucaacggcaccugcaccguggugaugaccgacggcagcgccagcggcaaggccgacaccaagauccuguucaucgaggagggcaagaucgugcacaucagcacccugagcggcagcgcccagcacguggaggagugcagcugcuaccccagauaccccggcgugagaugcgugugcagagacaacuggaagggcagcaacagacccaucguggacaucaacgugaaggacuacagcaucgugagcagcuacgugugcagcggccuggugggcgacacccccagaaagaacgacagcuucagcagcagccacugccuggaccccaacaacgaggagggcggccacggcaugaagggcugggccuucgacgacggcaacgacguguggaugggcagaaccaucagcgagaagcugagaagcggcuacgagaccuucaaggugaucgagggcuggagcaagcccaacagcaagcugcaggugaacagacaggugaucguggagagaggcaacagaagcggcuacagcggcaucuucagcguggagggcaagagcugcaucaacagaugcuucuacguggagcugaucagaggcagaaaggaggagaccgaggugugguggaccagcaacagcaucgugguguucugcggcaccagcggcaccuacggcaccggcagcuggcccgacggcgccgacaucaaccugaugcccaucuga

SEQ ID NO: 174895 - RNA, 1410 nt, Artificial Sequence; identical to SEQ ID NO: 174205
  derived and/or modified CDS sequence (opt4) from neuraminidase__InfluenzaA__ABD61274

SEQ ID NO: 174896 - RNA, 1410 nt, Artificial Sequence
  derived and/or modified CDS sequence (opt4) from neuraminidase__InfluenzaA__ABD61285
augaaccccaaccagaagaucaucaccaucggcagcgugagccugaccaucagcaccaucugcuucuucaugcagaucgccauccugaucaccaccgugacccugcacuucaagcaguacgaguucaacagcccccccaacaaccaggugaugcugugcgagcccaccaucaucgagagaaacaucaccgagaucguguaccugaccaacaccaccaucgagaaggagaucugccccaagcuggccgaguacagaaacuggagcaagccccagugcgacaucaccggcuucgcccccuucagcaaggacaacagcaucagacugagcgccggcggcgacaucugggugaccagagagcccuacgugagcugcgaccccgacaagugcuaccaguucgcccugggccagggcaccacccugaacaacgugcacagcaacgacaccgugcacgacagaacccccuacagaacccugcugaugaacgagcugggcgugcccuuccaccugggcaccaagcaggugugcaucgccuggagcagcagcagcugccacgacggcaaggccuggcugcacgugugcgugaccggcgacgacaagaacgccaccgccagcuucaucuacaacggcagacugguggacagcaucgugagcuggagcaaggagauccugagaacccaggagagcgagugcgugugcaucaacggcaccugcaccguggugaugaccgacggcaacgccagcggcaaggccgacaccaagauccuguucaucgaggagggcaagaucgugcacaccagcacccugagcggcagcgcccagcacguggaggagugcagcugcuaccccagauaccccggcgugagaugcgugugcagagacaacuggaagggcagcaacagacccaucguggacaucaacaucaaggacuacagcaucgugagcagcuacgugugcagcggccuggugggcgacacccccagaaagaacgacagcagcagcagcagccacugccuggaccccaacaacgaggagggcggccacggcgugaagggcugggccuucgacgacggcaacgacguguggaugggcagaaccaucagcgagaagcugagaagcggcuacgagaccuucaaggugaucgagggcuggagcaaccccaacagcaagcugcagaucaacagacaggugaucguggacagaggcaacagaagcggcuacagcggcaucuucagcguggagggcaagagcugcaucaacagaugcuucuacguggagcugaucagaggcagaaaggaggagaccgaggugcuguggaccagcaacagcaucgugguguucugcggcaccagcggcaccuacggcaccggcagcuggcccgacggcgccgacaucaaccugaugcccaucuga

SEQ ID NO: 174897 - RNA, 1410 nt, Artificial Sequence; identical to SEQ ID NO: 174651
  derived and/or modified CDS sequence (opt4) from neuraminidase__InfluenzaA__ABD61296

SEQ ID NO: 174898 - RNA, 1410 nt, Artificial Sequence; identical to SEQ ID NO: 174772
  derived and/or modified CDS sequence (opt4) from neuraminidase__InfluenzaA__ABD61307

SEQ ID NO: 174899 - RNA, 1410 nt, Artificial Sequence; identical to SEQ ID NO: 174790
  derived and/or modified CDS sequence (opt4) from neuraminidase__InfluenzaA__ABD61318

SEQ ID NO: 174900 - RNA, 1410 nt, Artificial Sequence; identical to SEQ ID NO: 174121
  derived and/or modified CDS sequence (opt4) from neuraminidase__InfluenzaA__ABD61340

SEQ ID NO: 174901 - RNA, 1410 nt, Artificial Sequence; identical to SEQ ID NO: 174121
  derived and/or modified CDS sequence (opt4) from neuraminidase__InfluenzaA__ABD61351

SEQ ID NO: 174902 - RNA, 1410 nt, Artificial Sequence
  derived and/or modified CDS sequence (opt4) from neuraminidase__InfluenzaA__ABD61362
augaaccccaaccagaagaucaucaccaucggcagcgugagccugaccaucgccaccaucugcuuccugaugcagaucgccauccuggugaccaccgugacccugcacuucaagcaguacgagugcaacagcccccccaacaaccaggugaugcugugcgagcccaccaucaucgagagaaacaucaccgagaucguguaccugaccaacaccaccaucgagaaggaggugugccccaagcuggccgaguacagaaacuggagcaagccccagugcaacaucaccggcuucgcccccuucagcaaggacaacagcaucagacugagcgccggcggcgacaucugggugaccagagagcccuacgugagcugcgaccccgacaagugcuaccaguucgcccugggccagggcaccacccugaacaacggccacagcaacgacaccgugcacgacagaacccccuacagaacccugcugaugaacgagcugggcgugcccuuccaccugggcaccaagcaggugugcaucgccuggagcagcagcagcugccacgacggcaaggccuggcugcacgugugcgugaccggcgacgacgagaacgccaccgccagcuucaucuacaacggcagacugguggacagcaucggcagcuggagcaagaagauccugagaacccaggagagcgagugcgugugcaucaacggcaccugcaccguggugaugaccgacggcagcgccagcggcaaggccgacaccaagauccuguucaucgaggagggcaagaucgugcacaccagcagccugagcggcagcgcccagcacguggaggagugcagcugcuaccccagauaccccggcgugagaugcgugugcagagacaacuggaagggcagcaacagacccaucguggacaucaacgugaaggacuacagcaucgugagcagcuacgugugcagcggccuggugggcgacacccccagaaagaacgacagcagcagcagcagccacugccuggaccccaacaacgaggagggcggccacggcgugaagggcugggccuucgacgacggcaacgacguguggaugggcagaaccaucagcgagaagcugagaagcggcuacgagaccuucaaggugaucgagggcuggagcaagcccaacagcaagcugcagaucaacagacaggugaucguggacagaggcaacagaagcggcuacagcggcaucuucagcguggagggcaagagcugcaucaacagaugcuucuacguggagcugaucagaggcagaaagcaggagaccgaggugcuguggaccagcaacagcaucgugguguucugcggcaccagcggcaccuacggcaccggcagcuggcccgacggcgccgacaucgaccugaugcccaucuga

SEQ ID NO: 174903 - RNA, 1410 nt, Artificial Sequence; identical to SEQ ID NO: 174853
  derived and/or modified CDS sequence (opt4) from neuraminidase__InfluenzaA__ABD61373

SEQ ID NO: 174904 - RNA, 1410 nt, Artificial Sequence
  derived and/or modified CDS sequence (opt4) from neuraminidase__InfluenzaA__ABD61384
augaaccccaaccagaagaucaucaccaucggcagcgugagccugaccaucgccaccaucugcuuccugaugcagaucgccauccuggugaccaccgugacccugcacuucaagcaguacgagugcaacagcccccccaacaaccaggugaugcugugcgagcccaccaucaucgagagaaacaucaccgagaucguguaccugaccaacaccaccaucgagaaggagaucugccccaagcuggccgaguacagaaacuggagcaagccccagugcaacaucaccggcuucgcccccuucagcaaggacaacagcaucagacugagcgccggcggcgacaucugggugaccagagagcccuacgugagcugcgaccccgacaagugcuaccaguucgcccugggccagggcaccacccugaacaacggccacagcaacgacaccgugcacgacagaacccccuacagaacccugcugaugaacgagcugggcgugcccuuccaccugggcaccaagcaggugugcaucgccuggagcagcagcagcugccacgacggcaaggccuggcugcacgugugcgugaccggcgacgacgagaacgccaccgccagcuucaucuacaacggcagacugguggacagcaucggcagcuggagcaagaagauccugagaacccaggagagcgagugcgugugcaucaacggcaccugcaccguggugaugaccgacggcagcgccagcggcaaggccgacaccaagauccuguucaucgaggagggcaagaucgugcacaccagcagccugagcggcagcgcccagcacguggaggagugcagcugcuaccccagauaccccggcgugagaugcgugugcagagacaacuggaagggcagcaacagacccaucguggacaucaacaucaaggacuacagcaucgugagcagcuacgugugcagcggccuggugggcgacacccccagaaagaacgacagcagcagcagcagccacugccuggaccccaacaacgaggagggcggccacggcgugaagggcugggccuucgacgacggcaacgacguguggaugggcagaaccaucagcgagaagcugagaagcggcuacgagaccuucaaggugaucgagggcuggagcaagcccaacagcaagcugcagaucaacagacaggugaucguggacagaggcaacagaagcggcuacagcggcaucuucagcguggagagcaagagcugcaucaacagaugcuucuacguggagcugaucagaggcagaaagcaggagaccgaggugcuguggaccagcaacagcaucgugguguucugcggcaccagcggcaccuacggcaccggcagcuggcccgacggcgccgacaucaaccugaugcccaucuga

SEQ ID NO: 174905 - RNA, 1410 nt, Artificial Sequence; identical to SEQ ID NO: 174790
  derived and/or modified CDS sequence (opt4) from neuraminidase__InfluenzaA__ABD61395

SEQ ID NO: 174906 - RNA, 1410 nt, Artificial Sequence; identical to SEQ ID NO: 174887
  derived and/or modified CDS sequence (opt4) from neuraminidase__InfluenzaA__ABD61406

SEQ ID NO: 174907 - RNA, 1413 nt, Artificial Sequence; identical to SEQ ID NO: 174888
  derived and/or modified CDS sequence (opt4) from neuraminidase__InfluenzaA__ABD61521

SEQ ID NO: 174908 - RNA, 1410 nt, Artificial Sequence
  derived and/or modified CDS sequence (opt4) from neuraminidase__InfluenzaA__ABD61532
augaaccccaaccagaagaucaucaccaucggcagcgugagccugaccaucgccaccaucugcuuccugaugcagaucgccauccuggugaccaccgugacccugcacuucaagcaguacgagugcagcagcccccccaacaaccaggugaugcccugcgagcccaucaucaucgagagaaacaucaccgagaucguguaccugaccaacaccaccaucgagaaggagaucugccccaagcugguggaguacagaaacuggagcaagccccagugcaagaucaccggcuucgcccccuucagcaaggacaacagcaucagacugagcgccggcggcgacaucugggugaccagagagcccuacgugagcugcgaccccggcaagugcuaccaguucgcccugggccagggcaccacccugaacaacaagcacagcaacgacaccauccacgacagaacccccuacagaacccugcugaugaacgagcugggcgugcccuuccaccugggcaccaagcaggugugcaucgccuggagcagcagcagcugccacgacggcaaggccuggcugcacgugugcgugaccggccacgacaagaacgccaccgccagcuucaucuacgacggcagacugguggacagcaucggcagcuggagcaagaacauccugagaacccaggagagcgagugcgugugcaucaacggcaccugcaccguggugaugaccgacggcagcgccagcgagagagccgacaccaagauccuguucaucgaggagggcaagaucgugcacaucagcccccugagcggcagcgcccagcacguggaggagugcagcugcuaccccagauaccccggcgugagaugcgugugcagagacaacuggaagggcagcaacagacccaucguggacaucaacgugaaggacuacagcaucgugagcagcuacgugugcagcggccuggugggcgacacccccagaaagaacgacagaagcagcagcagcuacugcagaaaccccaacaacgagaagggcaaccacggcgugaagggcugggccuucgacgacggcaacgacguguggaugggcagaaccaucggcgaggagcugagaagcggcuacgagaccuucaaggugaucggcggcuggagcacccccaacagcaagcugcagaucaacagacaggugaucguggacagcgagaacagaagcggcuacagcggcaucuucagcguggagggcaagagcugcaucaacagaugcuucuacguggagcugaucagaggcagagagcaggagaccagagugugguggaccagcaacagcaucgugguguucugcggcaccagcggcaccuacggcaccggcagcuggcccgacggcgccgacaucagccugaugcccaucuga

SEQ ID NO: 174909 - RNA, 1413 nt, Artificial Sequence
  derived and/or modified CDS sequence (opt4) from neuraminidase__InfluenzaA__ABD61543
augaaccccaaccagaagaucaucaccaucggcagcaucagcaucgccaucggcaucaucagccugaugcugcagaucggcaacaucaucagcaucugggccagccacagcauccagaccggcagccagaaccacaccggcaucugcaaccagagaaucaucaccuacgagaacagcaccugggugaaccacaccuacgugaacaucaacaacaccaacgugguggccggcaaggacaagaccagcgugacccuggccggcaacagcagccugugcagcaucagcggcugggccaucuacaccaaggacaacagcaucagaaucggcagcaagggcgacguguucgugaucagagagcccuucaucagcugcagccaccuggagugcagaaccuucuuccugacccagggcgcccugcugaacgacaagcacagcaacggcaccgugaaggacagaagccccuacagagcccugaugagcugcccccugggcgaggcccccagccccuacaacagcaaguucgagagcguggccuggagcgccagcgccugccacgacggcaugggcuggcugaccaucggcaucagcggccccgacaacggcgccguggccgugcugaaguacaacggcaucaucaccgagaccaucaagagcuggaagaagagaauccugagaacccaggagagcgagugcgugugcgugaacggcagcugcuucaccaucaugaccgacggccccagcaacggcgccgccagcuacaagaucuucaagaucgagaagggcaaggugaccaagagcaucgagcugaacgcccccaacuuccacuacgaggagugcagcugcuaccccgacaccggcaccgugaugugcgugugcagagacaacuggcacggcagcaacagacccugggugagcuucaaccagaaccuggacuaccagaucggcuacaucugcagcggcguguucggcgacaaccccagacccaaggacggcgagggcagcugcaaccccgugaccguggacggcgccgacggcgugaagggcuucagcuacaaguacggcaacggcguguggaucggcagaaccaagagcaacagacugagaaagggcuucgagaugaucugggaccccaacggcuggaccgacaccgacagcaacuucagcgugaagcaggacgugguggccaucaccgacuggagcggcuacagcggcaacuucgugcagcaccccgagcugaccggccuggacugcaucagacccugcuucuggguggagcuggugagaggccugcccagagagaacaccaccaucuggaccagcggcagcagcaucagcuucugcggcgugaacagcgacaccgccaacuggagcuggcccgacggcgccgagcugcccuucaccaucgacaaguga

SEQ ID NO: 174910 - RNA, 1413 nt, Artificial Sequence; identical to SEQ ID NO: 174888
  derived and/or modified CDS sequence (opt4) from neuraminidase__InfluenzaA__ABD63066

SEQ ID NO: 174911 - RNA, 1410 nt, Artificial Sequence; identical to SEQ ID NO: 174313
  derived and/or modified CDS sequence (opt4) from neuraminidase__InfluenzaA__ABD77601

SEQ ID NO: 174912 - RNA, 1410 nt, Artificial Sequence
  derived and/or modified CDS sequence (opt4) from neuraminidase__InfluenzaA__ABD77612
augaaccccaaccagaagaucaucaccaucggcagcgugagccugaccaucgccaccaucugcuuccugaugcagaucgccauccuggugaccaccgugacccugcacuucaagcaguacgagugcaacagcccccccaacaaccaggugaugcugugcgagcccaccaucaucgagagaaacaucaccgagaucguguaccugaccaacaccaccaucgagaaggagaugugccccaagcuggccgaguacagaaacuggcugaagccccagugcaacaucaccggcuucgcccccuucagcaaggacaacagcaucagacugagcgccggcggcgacaucugggugaccagagagcccuacgugagcugcgaccccgacaagugcuaccaguucgcccugggccagggcaccacccugaacaacggccacagcaacgacaccgugcacgacagaacccccuacagaacccugcugaugaacgagcugggcgugcccuuccaccugggcaccaagcaggugugcaucgccuggagcagcagcagcugccacgacggcaaggccuggcugcacgugugcgugaccggcgacgacgagaacgccaccgccagcaucaucuacaacggcagacugguggacagcaucggcagcuggagcaagaagauccugagaacccaggagagcgagugcgugugcaucaacggcaccugcaccguggugaugaccgacggcagcgccagcggcaaggccgacaccaagauccuguucaucaaggagggcaagaucgugcacaccagcagccugagcggcagcgcccagcacguggaggagugcagcugcuaccccagauaccccggcgugagaugcgugugcagagacaacuggaagggcagcaacagacccaucguggacaucaacgugaaggacuacagcaucgugagcagcuacgugugcagcggccuggugggcgacacccccagaaagaacgacagcagcagcagcagccacugccuggaccccaacaacgaggagggcggccacggcgugaagggcugggccuucgacgacggcaacgacguguggaugggcagaaccaucagcgagaagcugagaagcggcuacgagaccuucaaggugaucgagggcuggagcaaggccaacagcaagcugcagaucaacagacaggugaucguggacagaggcaacagaagcggcuacagcggcaucuucagcguggagagcaagagcugcaucaacagaugcuucuacguggagcugaucagaggcagaaagcaggagaccgaggugcuguggaccagcaacagcaucgugguguucugcggcaccagcggcaccuacggcaccggcagcuggcccgacggcgccgacaucaaccugaugcccaucuga

SEQ ID NO: 174913 - RNA, 1410 nt, Artificial Sequence
  derived and/or modified CDS sequence (opt4) from neuraminidase__InfluenzaA__ABD77634
augaaccccaaccagaagaucaucaccaucggcagcgugagccugaccaucgccaccaucugcuuccugaugcagaucgccauccuggugaccaccgugacccugcacuucaagcaguacgagugcaacagcccccccaacaaccaggugaugcugugcgagcccaccaucaucgagagaaacaucaccgagaucguguaccugaccaacaccaccaucgagaaggagaugugccccaagcuggccgaguacagaaacuggagcaagccccagugcaacaucaccggcuucgcccccuucagcaaggacaacagcaucagacugagcgccggcggcgacaucugggugaccagagagcccuacgugagcugcgaccccgacaagugcuaccaguucgcccugggccagggcaccacccugaacaacggccacagcaacgacaccgugcacgacagaacccccuacagaacccugcugaugaacgagcugggcgugcccuuccaccugggcaccaagcaggugugcaucgccuggagcagcagcagcugccacgacggcaaggccuggcugcacgugugcgugaccggcgacgacgagaacgccaccgccagcaucaucuacaacggcagacugguggacagcaucggcagcuggagcaagaagauccugagaacccaggagagcgagugcgugugcaucaacggcaccugcaccguggugaugaccgacggcagcgccagcggcaaggccgacaccaagauccuguucaucaaggagggcaagaucgugcacaccagcagccugagcggcagcgcccagcacguggaggagugcagcugcuaccccagauaccccggcgugagaugcgugugcagagacaacuggaagggcagcaacagacccaucguggacaucaacgugaaggacuacagcaucgugagcagcuacgugugcagcggccuggugggcgacacccccagaaagaacgacagcagcagcagcagccacugccuggaccccaacaacgaggagggcggccacggcgugaagggcugggccuucgacgacggcaacgacguguggaugggcagaaccaucagcgagaagcugagaagcggcuacgagaccuucaaggugaucgagggcuggagcaaggccaacagcaagcugcagaucaacagacaggugaucguggacagaggcaacagaagcggcuacagcggcaucuucagcguggagagcaagagcugcaucaacagaugcuucuacguggagcugaucagaggcagaaagcaggagaccgaggugcuguggaccagcaacagcaucgugguguucugcggcaccagcggcaccuacggcaccggcagcuggcccgacggcgccgacaucaaccugaugcccaucuga

SEQ ID NO: 174914 - RNA, 1410 nt, Artificial Sequence; identical to SEQ ID NO: 174913
  derived and/or modified CDS sequence (opt4) from neuraminidase__InfluenzaA__ABD77645

SEQ ID NO: 174915 - RNA, 1410 nt, Artificial Sequence; identical to SEQ ID NO: 174913
  derived and/or modified CDS sequence (opt4) from neuraminidase__InfluenzaA__ABD77656

SEQ ID NO: 174916 - RNA, 1410 nt, Artificial Sequence; identical to SEQ ID NO: 174186
  derived and/or modified CDS sequence (opt4) from neuraminidase__InfluenzaA__ABD77700

SEQ ID NO: 174917 - RNA, 1413 nt, Artificial Sequence; identical to SEQ ID NO: 174888
  derived and/or modified CDS sequence (opt4) from neuraminidase__InfluenzaA__ABD77722

SEQ ID NO: 174918 - RNA, 1413 nt, Artificial Sequence; identical to SEQ ID NO: 174888
  derived and/or modified CDS sequence (opt4) from neuraminidase__InfluenzaA__ABD77733

SEQ ID NO: 174919 - RNA, 1410 nt, Artificial Sequence
  derived and/or modified CDS sequence (opt4) from neuraminidase__InfluenzaA__ABD77744
augaaccccaaccagaagaucaucaccaucggcagcgugagccugaccaucgccaccaucugcuuccugaugcagaucgugauccuggugaccaccgugacccugcacuucaagcaguacgagugcaacagcccccccaacaaccaggugaugcugugcgagcccaccaucaucgagagaaacaucaccgagaucguguaccugaccaacaccaccaucgagaaggagaucugccccaagcuggccgaguacagaaacuggagcaagccccagugcaacaucaccggcuucgcccccuucagcaaggacaacagcaucagacugagcgccggcggcgacaucugggugaccagagagcccuacgugagcugcgaccccgacaagugcuaccaguucgcccugggccagggcaccacccugaacaacggccacagcaacgacaccgugcacgacagaacccccuacagaacccugcugaugaacgagcugggcgugcccuuccaccugggcaccaagcaggugugcaucgccuggagcagcagcagcugccacgacggcaaggccuggcugcacgugugcgugaccggcgacgacgagaacgccaccgccagcuucaucuacaacggcagacugguggacagcaucggcagcuggagcaagaagauccugagaacccaggagagcgagugcgugugcaucaacggcaccugcaccguggugaugaccgacggcagcgccagcggcaaggccgacaccaagauccuguucaucgaggagggcaagaucgugcacaccagccugcugagcggcagcgcccagcacguggaggagugcagcugcuaccccagauaccccggcgugagaugcgugugcagagacaacuggaagggcagcaacagacccaucguggacaucaacgugaaggacuacagcaucgugagcagcuacgugugcagcggccuggugggcgacacccccagaaagaacgacagcagcagcagcagccacugccuggaccccaacaacgaggagggcggccacggcgugaagggcugggccuucgacgacggcaacgacguguggaugggcagaaccaucagcgagaagcugagaagcggcuacgagaccuucaaggugaucgagggcuggagcaagcccaacagcaagcugcagaucaacagacaggugaucguggacagaggcaacagaagcggcuacagcggcaucuucagcguggagggcaagagcugcaucaacagaugcuucuacguggagcugaucagaggcagaaagcaggagaccgaggugcuguggaccagcaacagcaucgugguguucugcggcaccagcggcaccuacggcaccggcagcuggcccgacggcgccgacaucaaccugaugcccaucuga

SEQ ID NO: 174920 - RNA, 1410 nt, Artificial Sequence; identical to SEQ ID NO: 174913
  derived and/or modified CDS sequence (opt4) from neuraminidase__InfluenzaA__ABD77755

SEQ ID NO: 174921 - RNA, 1410 nt, Artificial Sequence; identical to SEQ ID NO: 174913
  derived and/or modified CDS sequence (opt4) from neuraminidase__InfluenzaA__ABD77766

SEQ ID NO: 174922 - RNA, 1410 nt, Artificial Sequence
  derived and/or modified CDS sequence (opt4) from neuraminidase__InfluenzaA__ABD77777
augaaccccaaccagaagaucaucaccaucggcagcgugagccugaccaucgccaccaucugcuuccugaugcagaucgugauccuggugaccaccgugacccugcacuucaagcaguacgagugcaacagcccccccaacaaccaggugaugcccugcgagcccaccaucaucgagagaaacaucaccgagaucguguaccugaccaacaccaccaucgagaaggagaucugccccaagcuggccgaguacagaaacuggagcaagccccagugcaacaucaccggcuucgcccccuucagcaaggacaacagcaucagacugagcgccggcggcgacaucugggugaccagagagcccuacgugagcugcgaccccgacaagugcuaccaguucgcccugggccagggcaccacccugaacaacggccacagcaacgacaccgugcacgacagaacccccuacagaacccugcugaugaacgagcugggcgugcccuuccaccugggcaccaagcaggugugcaucgccuggagcagcagcagcugccacgacggcaaggccuggcugcacgugugcgugaccggcgacgacgagaacgccaccgccagcuucaucuacaacggcagacugguggacagcaucggcagcuggagcaagaagauccugagaacccaggagagcgagugcgugugcaucaacggcaccugcaccguggugaugaccgacggcagcgccagcggcaaggccgacaccaagauccuguucaucgaggagggcaagaucgugcacaccagccugcugagcggcagcgcccagcacguggaggagugcagcugcuaccccagauaccccggcgugagaugcgugugcagagacaacuggaagggcagcaacagacccaucguggacaucaacgugaaggacuacagcaucgugagcagcuacgugugcagcggccuggugggcgacacccccagaaagaacgacagcagcagcagcagccacugccuggaccccaacaacgaggagggcggccacggcgugaagggcugggccuucgacgacggcaacgacguguggaugggcagaaccaucagcgagaagcugagaagcggcuacgagaccuucaaggugaucgagggcuggagcaagcccaacagcaagcugcagaucaacagacaggugaucguggacagaggcaacagaagcggcuacagcggcaucuucagcguggagggcaagagcugcaucaacagaugcuucuacguggagcugaucagaggcagaaagcaggagaccgaggugcuguggaccagcaacagcaucgugguguucugcggcaccagcggcaccuacggcaccggcagcuggcccgacggcgccgacaucaaccugaugcccaucuga

SEQ ID NO: 174923 - RNA, 1410 nt, Artificial Sequence; identical to SEQ ID NO: 174922
  derived and/or modified CDS sequence (opt4) from neuraminidase__InfluenzaA__ABD77788

SEQ ID NO: 174924 - RNA, 1362 nt, Artificial Sequence
  derived and/or modified CDS sequence (opt4) from neuraminidase__InfluenzaA__ABD77799
augaaccccaaccagaagaucaucaccaucggcagcaucugcaugguggugggcaucaucagccugauccugcagaucggcaacaucaucagcaucuggaucagccacagcauccagaccggcaaccagaaccacaccggcaucugcaaccagggcaucaucaccuacaacgugguggccggccaggacagcaccagcgugauccugaccggcaacagcagccugugccccaucagaggcugggccauccacagcaaggacaacggcaucagaaucggcagcaagggcgacguguucgugaucagagagcccuucaucagcugcagccaccuggagugcagaaccuucuuccugacccagggcgcccugcugaacgacaagcacagcaacggcaccgugaaggacagaagccccuacagagcccugaugagcugccccgugggcgaggcccccagccccuacaacagcagauucgagagcguggccuggagcgccagcgccugccacgacggcaugggcuggcugaccaucggcaucagcggccccgacaacggcgccguggccgugcugaaguacaacggcaucaucaccgagaccaucaagagcuggagaaagaagauccugagaacccaggagagcgagugcaccugcgugaacggcagcugcuucaccaucaugaccgacggccccagcaacggccuggccagcuacaagaucuucaagaucgagaagggcaaggugaccaagagcaucgagcugaacgcccccaacagccacuacgaggagugcagcugcuaccccgacaccggcaaggugaugugcgugugcagagacaacuggcacggcagcaacagacccugggugagcuucgaccagaaccuggacuaccagaucggcuacaucugcagcggcguguucggcgacaaccccagacccaaggacggcaccggcagcugcggccccgugagcgccgacggcgccaacggcgugaagggcuucagcuacagauacggcaacggcguguggaucggcagaaccaagagcgacagcagcagacacggcuucgagaugaucugggaccccaacggcuggaccgagaccgacagcagauucagcgugagacaggacgugguggccaugaccgacagaagcggcuacagcggcagcuucgugcagcaccccgagcugaccggccuggacugcaugagacccugcuucuggguggagcugaucagaggcagacccgaggaggagaccaucuggaccagcggcagcaucaucagcuucugcggcgugaacagcgacaccguggacuggagcuggcccgacggcgccgagcugcccuucaccaucgacaaguga

SEQ ID NO: 174925 - RNA, 1410 nt, Artificial Sequence
  derived and/or modified CDS sequence (opt4) from neuraminidase__InfluenzaA__ABD77810
augaaccccaaccagaagaucaucaccaucggcagcaucugcaugguggugggcaucaucagccugauccugcagaucggcaacaucgugagcaucuggaucagccacagcauccagaccggcaaccagaaccacaccggcaccugcaaccagagcaucaucaccuacaagaacagcaccugggugaaccagaccuacgugaacaucagcaacaccaacgugguggccggcaaggacaccaccagcgugauccuggccggcaacagcagccugugccccaucagaggcugggccaucuacagcaaggacaacggcgugagaaucggcagcaagggcgacguguucgugaucagagagcccuucaucagcugcagccaccuggagugcagaaccuucuuccugacccagggcgcccugcugaacgacaagcacagcaacggcaccgugaaggacagaagccccuacagagcccugaugagcugccccgugggcgaggcccccagccccuacaacagcagauucgagagcguggccuggagcgccagcgccugccacgacggcaugggcuggcugaccaucggcaucagcggccccgacgacggcgccguggccgugcugaaguacaacggcaucaucaccgagaccaucaagagcuggagaaaggagauccugagaacccaggagagcgagugcgugugcgugaacggcagcugcuucaccaucaugaccgacggccccagcggcggccccgccagcuacaagaucuucaagaucgagaagggcaaggugaccaagagcaucgagcuggacgcccccaacagccacuacgaggagugcagcugcuaccccgacaccagcaaggugaugugcgugugcagagacaacuggcacggcagcaacagacccugggugagcuucgaccagaaccuggacuaccagaugggcuacaucugcagcggcguguucggcgacaaccccagacccaaggacggcaagggcagcugcggccccguguacguggacggcgccaacggcgugaagggcuucagcuacagauacggcaacggcguguggaucggcagaaccaagagcaacagcagcagacagggcuucgagaugaucugggaccccaacggcuggaccgagaccgacagcaacuucuucaccaagcaggacgugguggccgugaccgacuggagcggcuacagcggcagcuucgugcagcaccccgagcugaccggccuggacugcaugagacccugcuucuggguggagcugaucagaggcagacccaaggagaacaccaucuggaccagcggcagcagcaucagcuucugcggcgugaacagcgacaccguggacuggagcuggcccgacggcgccgagcugcccuucaccaucgacaaguga

SEQ ID NO: 174926 - RNA, 1410 nt, Artificial Sequence
  derived and/or modified CDS sequence (opt4) from neuraminidase__InfluenzaA__ABD77832
augaaccccaaccagaagaucaucaccaucggcagcgugagccugaccaucgccaccaucugcuuccugaugcagaucgccauccuggugaccaccgugacccugcacuucaagcaguacgagugcaacagcccccccaacaaccaggugaugcugugcgagcccaccaucaucgagagaaacaucaccgagaucguguaccugaccaacaccaccaucgagaaggagaucugccccaagcuggccgaguacagaaacuggagcaagccccagugcaagaucaccggcuucgcccccuucagcaaggacaacagcaucagacugagcgccggcggcgacaucugggugaccagagagcccuacgugagcugcgaccccgacaagugcuaccaguucgcccugggccagggcaccacccugaacaacagacacagcaacgacaccgugcacgacagaacccccuacagaacccugcugaugaacgagcugggcgugcccuuccaccugggcaccaagcaggugugcaucgccuggagcagcagcagcugccacgacggcaaggccuggcugcacgugugcgugaccggccacgacgagaacgccaccgccagcuucaucuacggcggcagacugguggacagcaucggcagcuggagcaagaagauccugagaacccaggagagcgagugcgugugcaucaacggcaccugcaccguggugaugaccgacggcagcgccagcggcagagccgacaccaagauccuguucaucgaggagggcaagaucgugcacaucagcccccugagcggcagcgcccagcacguggaggagugcagcugcuaccccagauacagcggcgugagaugcgugugcagagacaacuggaagggcagcaacagacccaucguggacaucaacgugaaggacuacagcaucgugagcagcuacgugugcagcggccuggugggcgacacccccagaaagaacgacagcagcagcagcagccacugccugaaccccaacaacgaggagggcggccacggcgugaagggcugggccuucgacgacggcaacgacguguggaugggcagaaccaucagcgagaaguucagaagcggcuacgagaccuucaaggugaucggcggcuggagcaagcccaacagcaagcugcagaucaacagacaggugaucguggacagaggcaacagaagcggcuacagcggcaucuucagcguggagggcaagagcugcaucaacagaugcuucuacguggagcugaucagaggcagaaagcaggagaccgaggugugguggaccagcaacagcaucgugguguucugcggcaccagcggcaccuacggcaccggcagcuggcccgacggcgccgacaucaaccugaugcccaucuga

SEQ ID NO: 174927 - RNA, 1410 nt, Artificial Sequence
  derived and/or modified CDS sequence (opt4) from neuraminidase__InfluenzaA__ABD77876
augaaccccaaccagaagaucaucaccaucggcagcgugagccugaccaucgccaccaucugcuuccugaugcagaucgccauccuggugaccaccgugacccugcacuucaagcaguacgagugcaacagcccccccaacaaccaggugaugcugugcgagcccaccaucaucgagagaaacaucaccgagaucguguaccugaccaacaccaccaucgagaaggagaucugccccaagcuggccgaguacagaaacuggagcaagccccagugcaagaucaccggcuucgcccccuucagcaaggacaacagcaucagacugagcgccggcggcgacaucugggugaccagagagcccuacgugagcugcgaccccgacaagugcuaccaguucgcccugggccagggcaccacccugaacaacagacacagcaacgacaccgugcacgacagaacccccuacagaacccugcugaugaacgagcugggcgugcccuuccaccugggcaccaagcaggugugcaucgccuggagcagcagcagcugccacgacggcaaggccuggcugcacgugugcgugaccggccacgacgagaacgccaccgccagcuucaucuacgacggcagacugguggacagcaucggcagcuggagcaagaagauccugagaacccaggagagcgagugcgugugcaucaacggcaccugcaccguggugaugaccgacggcagcgccagcggcagagccgacaccaagauccuguucaucgaggagggcaagaucgugcacaucagcccccugagcggcagcgcccagcacguggaggagugcagcugcuaccccagauacagcggcgugagaugcgugugcagagacaacuggaagggcagcaacagacccaucguggacaucaacgugaaggacuacagcaucgugagcagcuacgugugcagcggccuggugggcgacacccccagaaagaacgacagcagcagcagcagccacugccugaaccccaacaacgaggagggcggccacggcgugaagggcugggccuucgacgacggcaacgacguguggaugggcagaaccaucagcgagaagcugagaagcggcuacgagaccuucaaggugaucgagggcuggagcaagcccaacagcaagcugcagaucaacagacaggugaucguggacagaggcaacagaagcggcuacagcggcaucuucagcguggagggcaagagcugcaucaacagaugcuucuacguggagcugaucagaggcagaaagcaggagaccgaggugugguggaccagcaacagcaucgugguguucugcggcaccagcggcaccuacggcaccggcagcuggcccgacggcgccgacaucaaccugaugcccaucuga

SEQ ID NO: 174928 - RNA, 1410 nt, Artificial Sequence; identical to SEQ ID NO: 174186
  derived and/or modified CDS sequence (opt4) from neuraminidase__InfluenzaA__ABD77887

SEQ ID NO: 174929 - RNA, 1410 nt, Artificial Sequence
  derived and/or modified CDS sequence (opt4) from neuraminidase__InfluenzaA__ABD77898
augaaccccaaccagaagaucaucaccaucggcagcgugagccugaccaucgccaccaucugcuuccugaugcagaucgccauccuggugaccaccgugacccugcacuucaagcaguacgagugcaacagcccccccaacaaccaggugaugcugugcgagcccaccaucaucgagagaaacaucaccgagaucguguaccugaccaacaccaccaucgagaaggagaucugccccaagcuggccgaguacagaaacuggagcaagccccagugcaagaucaccggcuucgcccccuucagcaaggacaacagcaucagacugagcgccggcggcgacaucugggugaccagagagcccuacgugagcugcgaccccgacaagugcuaccaguucgcccugggccagggcaccacccugaacaacagacacagcaacgacaccgugcacgacagaacccccuacagaacccugcugaugaacgagcugggcgugcccuuccaccugggcaccaagcaggugugcaucgccuggagcagcagcagcugccacgacggcaaggccuggcugcacgugugcgugaccggccacgacgagaacgccaccgccagcuucaucuacgacggcagacugguggacagcaucggcagcuggagcaagaagauccugagaacccaggagagcgagugcgugugcaucaacggcaccugcaccguggugaugaccgacggcagcgccagcggcagagccgacaccaagauccuguucaucgaggagggcaagaucauccacaucagcccccugagcggcagcgcccagcacguggaggagugcagcugcuaccccagauaccccggcgugagaugcgugugcagagacaacuggaagggcagcaacagacccaucguggacaucaacgugaaggacuacagcaucgugagcagcuacgugugcagcggccuggugggcgacacccccagaaagaacgacagcagcagcagcagccacugccugaaccccaacaacgaggagggcggccacggcgugaagggcugggccuucgacgacggcagcgacguguggaugggcagaaccaucagcgagaagcugagaagcggcuacgagaccuucaaggugaucgagggcuggagcaagcccaacagcaagcugcagaucaacagacaggugaucguggacagaggcaacagaagcggcuacagcggcaucuucagcguggagggcaagagcugcaucaacagaugcuucuacguggagcugaucagaggcagaaagcaggagaccgaggugugguggaccagcaacagcaucgugguguucugcggcaccagcggcaccuacggcaccggcagcuggcccgacggcgccgacaucaaccugaugcccaucuga

SEQ ID NO: 174930 - RNA, 1410 nt, Artificial Sequence
  derived and/or modified CDS sequence (opt4) from neuraminidase__InfluenzaA__ABD77909
augaaccccaaccagaagaucaucaccaucggcagcgugagccugaccaucgccaccaucugcuuccugaugcagaucgccauccuggugaccaccgugacccugcacuucaagcaguacgagugcaacagcccccccaacaaccaggugaugcugugcgagcccaccaucaucgagagaaacaucaccgagaucguguaccugaccaacaccaccaucgagaaggagaucugccccaagcuggccgaguacagaaacuggagcaagccccagugcaagaucaccggcuucgcccccuucagcaaggacaacagcaucagacugagcgccggcggcgacaucugggugaccagagagcccuacgugagcugcgaccccgacaagugcuaccaguucgcccugggccagggcaccacccugaacaacagacacagcaacgacaccgugcacgacagaacccccuacagaacccugcugaugaacgagcugggcgugcccuuccaccugggcaccaagcaggugugcaucgccuggagcagcagcagcugccacgacggcaaggccuggcugcacgugugcgugaccggccacgacgagaacgccaccgccagcuucaucuacgacggcagacugguggacagcaucggcagcuggagcaagaagauccugagaacccaggagagcgagugcgugugcaucaacggcaccugcaccguggugaugaccgacggcagcgccagcggcagagccgacaccaagauccuguucaucgaggagggcaagaucgugcacaucagcccccugagcggcagcgcccagcacguggaggagugcagcugcuaccccagauaccccggcgugagaugcgugugcagagacaacuggaagggcagcaacagacccaucguggacaucaacgugaaggacuacagcaucgugagcagcuacgugugcagcggccuggugggcgacacccccagaaagaacgacagcagcagcagcagccacugccugaaccccaacaacgaggagggcggccacggcgugaagggcugggccuucgacgacggcaacgacguguggaugggcagaaccaucagcgagaagcugagaagcggcuacgagaccuucaaggugaucgagggcuggagcaagcccaacagcaagcugcagaucaacagacaggugaucguggacagaggcaacagcagcggcuacagcggcaucuucagcguggagggcaagagcugcaucaacagaugcuucuacguggagcugaucagaggcagaaagcaggagaccgaggugugguggaccagcaacagcaucgugguguucugcggcaccagcggcaccuacggcaccggcagcuggcccgacggcgccgacaucaaccugaugcccaucuga

SEQ ID NO: 174931 - RNA, 1413 nt, Artificial Sequence; identical to SEQ ID NO: 174888
  derived and/or modified CDS sequence (opt4) from neuraminidase__InfluenzaA__ABD77920

SEQ ID NO: 174932 - RNA, 1413 nt, Artificial Sequence; identical to SEQ ID NO: 174888
  derived and/or modified CDS sequence (opt4) from neuraminidase__InfluenzaA__ABD77931

SEQ ID NO: 174933 - RNA, 1413 nt, Artificial Sequence; identical to SEQ ID NO: 174888
  derived and/or modified CDS sequence (opt4) from neuraminidase__InfluenzaA__ABD77942

SEQ ID NO: 174934 - RNA, 1413 nt, Artificial Sequence
  derived and/or modified CDS sequence (opt4) from neuraminidase__InfluenzaA__ABD77953
augaaccccaaccagaagaucaucaccaucggcagcaucagcaucgccaucggcaucaucagccugaugcugcagaucggcaacaucaucagcaucugggccagccacagcauccagaccggcagccagaaccacaccggcaucugcaaccagagaaucaucaccuacgagaacagcaccugggugaaccacaccuacgugaacaucaacaacaccaacgugguggccggcaaggacaagaccagcgugacccuggccggcaacagcagccugugcagcaucagcggcugggccaucuacaccaaggacaacagcaucagaaucggcagcaagggcgacguguucgugaucagagagcccuucaucagcugcagccaccuggagugcagaaccuucuuccugacccagggcgcccugcugaacgacaagcacagcaacggcaccgugaaggacagaagccccuacagagcccugaugagcugcccccugggcgaggcccccagccccuacaacagcaaguucgagagcguggccuggagcgccagcgccugccacgacggcaugggcuggcugaccaucggcaucagcggccccgacaacggcgccguggccgugcugaaguacaacggcaucaucaccgagaccaucaagagcuggaagaagagaauccugagaacccaggagagcgagugcgugugcgugaacggcagcugcuucaccaucaugaccgacggccccagcaacggcgccgccagcuacaagaucuucaagaucgagaagggcaaggugaccaagagcaucgagcugaacgcccccaacuuccacuacgaggagugcagcugcuaccccgacaccggcaccgugaugugcgugugcagagacaacuggcacggcagcaacagacccugggugagcuucaaccagaaccuggacuaccagaucggcuacaucugcagcggcguguucggcgacaaccccagacccaaggacggcgagggcagcugcaaccccgugaccguggacggcgccgacggcgugaagggcuucagcuacaaguacggcaacggcguguggaucggcagaaccaagagcaacagacugagaaagggcuucgagaugaucugggaccccaacggcuggaccgacaccgacagcaacuucagcgugaagcaggacgugguggccaucaccgacuggagcggcuacagcggcagcuucgugcagcaccccgagcugaccggccuggacugcaucagacccugcuuccugguggagcuggugagaggccugcccagagagaacaccaccaucuggaccagcggcagcagcaucagcuucugcggcgugaacagcgacaccgccaacuggagcuggcccgacggcgccgagcugcccuucaccaucgacaaguga

SEQ ID NO: 174935 - RNA, 1413 nt, Artificial Sequence
  derived and/or modified CDS sequence (opt4) from neuraminidase__InfluenzaA__ABD77964
augaaccccaaccagaagaucaucaccaucggcagcaucagcaucgccaucggcaucaucagccugaugcugcagaucggcaacaucaucagcaucugggccagccacagcauccagaccagaagccagaaccacaccggcaucugcaaccagagaaucaucaccuacgagaacagcaccugggugaaccacaccuacgugaacaucaacaacaccaacgugguggccggcaaggacaagaccagcgugacccuggccggcaacagcagccugugcagcaucagcggcugggccaucuacaccaaggacaacagcaucagaaucggcagcaagggcgacguguucgugaucagagagcccuucaucagcugcagccaccuggagugcagaaccuucuuccugacccagggcgcccugcugaacgacaagcacagcaacggcaccgugaaggacagaagccccuacagagcccugaugagcugcccccugggcgaggcccccagccccuacaacagcaaguucgagagcguggccuggagcgccagcgccugccacgacggcaugggcuggcugaccaucggcaucagcggccccgacaacggcgccguggccgugcugaaguacaacggcaucaucaccgagaccaucaagagcuggaagaagagaauccugagaacccaggagagcgagugcgugugcgugaacggcagcugcuucaccaucaugaccgacggccccagcaacggcgccgccagcuacaagaucuucaagaucgagaagggcaaggugaccaagagcaucgagcugaacgcccccaacuuccacuacgaggagugcagcugcuaccccgacaccggcaccgugaugugcgugugcagagacaacuggcacggcagcaacagacccugggugagcuucaaccagaaccuggacuaccagaucggcuacaucugcagcggcguguucggcgacaaccccagacccaaggacggcgagggcagcugcaaccccgugaccguggacggcgccgacggcgugaagggcuucagcuacaaguacggcaacggcguguggaucggcagaaccaagagcaacagacugagaaagggcuucgagaugaucugggaccccaacggcuggaccgacaccgacagcaacuucagcgugaagcaggacgugguggccaucaccgacuggagcggcuacagcggcagcuucgugcagcaccccgagcugaccggccuggacugcaucagacccugcuucuggguggagcuggugagaggccugcccagagagaacaccaccaucuggaccagcggcagcagcaucagcuucugcggcgugaacagcgacaccgccaacuggagcuggcccgacggcgccgagcugcccuucaccaucgacaaguga

SEQ ID NO: 174936 - RNA, 1413 nt, Artificial Sequence; identical to SEQ ID NO: 174888
  derived and/or modified CDS sequence (opt4) from neuraminidase__InfluenzaA__ABD77975

SEQ ID NO: 174937 - RNA, 1413 nt, Artificial Sequence; identical to SEQ ID NO: 174888
  derived and/or modified CDS sequence (opt4) from neuraminidase__InfluenzaA__ABD77986

SEQ ID NO: 174938 - RNA, 1413 nt, Artificial Sequence
  derived and/or modified CDS sequence (opt4) from neuraminidase__InfluenzaA__ABD77997
augaaccccaaccagaagaucaucaccaucggcagcaucagcaucgccaucggcauccugagccugaugcugcagaucggcaacaucaucagcaucugggccagccacagcauccagaccggcagccagaaccacaccggcaucugcaaccagagaaucaucaccuacgagaacagcaccugggugaaccacaccuacgugaacaucaacaacaccaacgugguggccggcaaggacaagaccagcgugacccuggccggcaacagcagccugugcagcaucagcggcugggccaucuacaccaaggacaacagcaucagaaucggcagcaagggcgacguguucgugaucagagagcccuucaucagcugcagccaccuggagugcagaaccuucuuccugacccagggcgcccugcugaacgacaagcacagcaacggcaccgugaaggacagaagccccuacagagcccugaugagcugcccccugggcgaggcccccagccccuacaacagcaaguucgagagcguggccuggagcgccagcgccugccacgacggcaugggcuggcugaccaucggcaucagcggccccgacaacggcgccguggccgugcugaaguacaacggcaucaucaccgagaccaucaagagcuggaagaagagaauccugagaacccaggagagcgagugcgugugcgugaacggcagcugcuucaccaucaugaccgacggccccagcaacggcgccgccagcuacaagaucuucaagaucgagaagggcaaggugaccaagagcaucgagcugaacgcccccaacuuccacuacgaggagugcagcugcuaccccgacaccggcaccgugaugugcgugugcagagacaacuggcacggcagcaacagacccugggugagcuucaaccagaaccuggacuaccagaucggcuacaucugcagcggcguguucggcgacaaccccagacccaaggacggcgagggcagcugcaaccccgugaccguggacggcgccgacggcgugaagggcuucagcuacaaguacggcaacggcguguggaucggcagaaccaagagcaacagacugagaaagggcuucgagaugaucugggaccccaacggcuggaccgacaccgacaacaacuucagcgugaagcaggacgugguggccaucaccgacuggagcggcuacagcggcagcuucgugcagcaccccgagcugaccggccuggacugcaucagacccugcuucuggguggagcuggugagaggccugcccagagagaacaccaccaucuggaccagcggcagcagcaucagcuucugcggcgugaacagcgacaccgccaacuggagcuggcccgacggcgccgagcugcccuucaccaucgacaaguga

SEQ ID NO: 174939 - RNA, 1413 nt, Artificial Sequence; identical to SEQ ID NO: 174888
  derived and/or modified CDS sequence (opt4) from neuraminidase__InfluenzaA__ABD78008

SEQ ID NO: 174940 - RNA, 1413 nt, Artificial Sequence; identical to SEQ ID NO: 174888
  derived and/or modified CDS sequence (opt4) from neuraminidase__InfluenzaA__ABD78019

SEQ ID NO: 174941 - RNA, 1413 nt, Artificial Sequence
  derived and/or modified CDS sequence (opt4) from neuraminidase__InfluenzaA__ABD78030
augaaccccaaccagaagaucaucaccaucggcagcaucagcaucgccaucggcaucaucagccugaugcugcagaucggcaacaucaucagcaucugggccagccacagcauccagaccggcagccagaaccacaccggcaucugcaaccagagaaucaucaccuacgagaacagcaccugggugaaccacaccuacgugaacaucaacaacaccaacgugguggccggcaaggacaagaccagcgugacccuggccggcaacagcagccugugcagcaucagcggcugggccaucuacaccaaggacaacagcaucagaaucggcagcaagggcgacguguucgugaucagagagcccuucaucagcugcagccaccuggagugcagaaccuucuuccugacccagggcgcccugcugaacgacaagcacagcaacagaaccgugaaggacagaagccccuacagagcccugaugagcugcccccugggcgaggcccccagccccuacaacagcaaguucgagagcguggccuggagcgccagcgccugccacgacggcaugggcuggcugaccaucggcaucagcggccccgacaacggcgccguggccgugcugaaguacaacggcaucaucaccgagaccaucaagagcuggaagaagagaauccugagaacccaggagagcgagugcgugugcgugaacggcagcugcuucaccaucaugaccgacggccccaacaacggcgccgccagcuacaagaucuucaagaucgagaagggcaaggugaccaagagcaucgagcugaacgcccccaacuuccacuacgaggagugcagcugcuaccccgacaccggcaccgugaugugcgugugcagagacaacuggcacggcagcaacagacccugggugagcuucaaccagaaccuggacuaccagaucggcuacaucugcagcggcguguucggcgacaaccccagacccaaggacggcgagggcagcugcaaccccgugaccguggacggcgccgacggcgugaagggcuucagcuacaaguacggcaacggcguguggaucggcagaaccaagagcaacagacugagaaagggcuucgagaugaucugggaccccaacggcuggaccgacaccgacagcaacuucagcgugaagcaggacgugguggccaucaccgacuggagcggcuacagcggcagcuucgugcagcaccccgagcugaccggccuggacugcaucagacccugcuucuggguggagcuggugagaggccugcccagagagaacaccaccaucuggaccagcggcagcagcaucagcuucugcggcgugaacagcgacaccgccaacuggagcuggcccgacggcgccgagcugcccuucaccaucgacaaguga

SEQ ID NO: 174942 - RNA, 1413 nt, Artificial Sequence
  derived and/or modified CDS sequence (opt4) from neuraminidase__InfluenzaA__ABD78041
augaaccccaaccagaagaucaucaccaucggcagcaucagcaucgccaucggcaucaucagccugaugcugcagaucggcaacaucaucagcaucugggccagccacagcauccagaccggcagccagaaccacaccggcaucugcaaccagagaaucaucaccuacgagaacagcaccugggugaaccacaccuacgugaacaucaacaacaccaacgugguggccggcaaggacaagaccagcgugacccuggccggcaacagcagccugugcagcaucagcggcugggccaucuacaccaaggacaacagcaucagaaucggcagcaagggcgacguguucgugaucagagagcccuucaucagcugcagccaccuggagugcagaaccuucuuccugacccagggcgcccugcugaacgacaagcacagcaacggcaccgugaaggacagaagccccuacagagcccugaugagcugcccccugggcgaggcccccagccccuacaacagcaaguucgagagcguggccuggagcgccagcgccugccacgacggcaugggcuggcugaccaucggcaucagcggccccgacaacggcgccguggccgugcugaaguacaacggcaucaucaccgagaccaucaagagcuggaagaagagaauccugagaacccaggagagcgagugcgugugcgugaacggcagcugcuucaccaucaugaccgacggccccagcaacggcgccgccagcuacaagaucuucaagaucgagaagggcaaggugaccaagagcaucgagcugaacgcccccaacuuccacuacgaggagugcagcugcuaccccgacaccagcaccgugaugugcgugugcagagacaacuggcacggcagcaacagacccugggugagcuucaaccagaaccuggacuaccagaucggcuacaucugcagcggcguguucggcgacaaccccagacccaaggacggcgagggcagcugcaaccccgugaccguggacggcgccgacggcgugaagggcuucagcuacaaguacggcaacggcguguggaucggcagaaccaagagcaacagacugagaaagggcuucgagaugaucugggaccccaacggcuggaccgacaccgacagcaacuucagcgugaagcaggacgugguggccaucaccgacuggagcggcuacagcggcagcuucgugcagcaccccgagcugaccggccuggacugcaucagacccugcuucuggguggagcuggugagaggccugcccagagagaacaccaccaucuggaccagcggcagcagcaucagcuucugcggcgugaacagcgacaccgccaacuggagcuggcccgacggcgccgagcugcccuucaccaucgacaaguga

SEQ ID NO: 174943 - RNA, 1410 nt, Artificial Sequence; identical to SEQ ID NO: 174922
  derived and/or modified CDS sequence (opt4) from neuraminidase__InfluenzaA__ABD78052

SEQ ID NO: 174944 - RNA, 1413 nt, Artificial Sequence; identical to SEQ ID NO: 174456
  derived and/or modified CDS sequence (opt4) from neuraminidase__InfluenzaA__ABD78063

SEQ ID NO: 174945 - RNA, 1413 nt, Artificial Sequence; identical to SEQ ID NO: 174456
  derived and/or modified CDS sequence (opt4) from neuraminidase__InfluenzaA__ABD78074

SEQ ID NO: 174946 - RNA, 1413 nt, Artificial Sequence; identical to SEQ ID NO: 174456
  derived and/or modified CDS sequence (opt4) from neuraminidase__InfluenzaA__ABD78085

SEQ ID NO: 174947 - RNA, 1413 nt, Artificial Sequence; identical to SEQ ID NO: 174456
  derived and/or modified CDS sequence (opt4) from neuraminidase__InfluenzaA__ABD78096

SEQ ID NO: 174948 - RNA, 1410 nt, Artificial Sequence
  derived and/or modified CDS sequence (opt4) from neuraminidase__InfluenzaA__ABD78118
augaaccccaaccagaagaucaucaccaucggcagcgugagccugaccaucgccaccaucugcuuccugaugcagaucgccauccuggugaccaccgugacccugcacuucaagcaguacgagugcaacagcccccccaacaaccaggugaugcugugcgagcccaccaucaucgagagaaacaucaccgagaucguguaccugaccaacaccaccaucgagaaggagaugugccccaagcuggccgaguacagaaacuggagcaagccccagugcaagaucaccggcuucgcccccuucagcaaggacaacagcaucagacugagcgccggcggcgacaucugggugaccagagagcccuacgugagcugcgaccccgacaagugcuaccaguucgcccugggccagggcaccacccugaacaacagacacagcaacgacaccgugcacgacagaacccccuacagaacccugcugaugaacgagcugggcgugcccuuccaccugggcaccaagcaggugugcaucgccuggagcagcagcagcugccacgacggcaaggccuggcugcacgugugcgugaccggccacgacgagaacgccaccgccagcuucaucuacgacggcagacugguggacagcaucggcagcuggagcaagaagauccugagaacccaggagagcgagugcgugugcaucaacggcaccugcaccguggugaugaccgacggcagcgccagcggcagagccgacaccaagauccuguucaucgaggagggcaagaucgugcacaucagcccccugagcggcagcgcccagcacguggaggagugcagcugcuaccccagauacagcggcgugagaugcgugugcagagacaacuggaagggcagcaacagacccaucguggacaucaacgugaaggacuacagcaucgugagcagcuacgugugcagcggccuggugggcgacacccccagaaagaacgacagcagcagcagcagccacugccugaaccccaacaacgaggagggcggccacggcgugaagggcugggccuucgacgacggcaacgacguguggaugggcagaaccaucagcgagaaguucagaagcggcuacgagaccuucaaggugaucggcggcuggagcaagcccaacagcaagcugcagaucaacagacaggugaucguggacagaggcaacagaagcggcuacagcggcaucuucagcguggagggcaagagcugcaucaacagaugcuucuacguggagcugaucagaggcagaaagcaggagaccgaggugugguggaccagcaacagcaucgugguguucugcggcaccagcggcaccuacggcaccggcagcuggcccgacggcgccgacaucaaccugaugcccaucuga

SEQ ID NO: 174949 - RNA, 1410 nt, Artificial Sequence; identical to SEQ ID NO: 174948
  derived and/or modified CDS sequence (opt4) from neuraminidase__InfluenzaA__ABD78129

SEQ ID NO: 174950 - RNA, 1410 nt, Artificial Sequence; identical to SEQ ID NO: 174178
  derived and/or modified CDS sequence (opt4) from neuraminidase__InfluenzaA__ABD79035

SEQ ID NO: 174951 - RNA, 1353 nt, Artificial Sequence
  derived and/or modified CDS sequence (opt4) from neuraminidase__InfluenzaA__ABD79115
augaaccccaaccagaagaucaucaccaucggcagcaucugcaugguggugggcaucaucagccugaucuuccagaucggcaacaucgugagcaucuggaucagccacagcaucaccggcaccugcaacagaagcaucuacgugaacaucagcaacaccaacgugguggccggcaaggacaccaccagcgugauccuggccggcaacagcagccugugccccaucagaggcugggccaucuacagcaaggacaacggcgugagaaucggcagcaagggcgacguguucgugaucagagagcccuucaucagcugcagccaccuggagugcagaaccuucuuccugacccagggcgcccugcugaacgacaagcacagcaacggcaccgugaaggacagaagccccuacagaacccugaugagcugccccgugggcgaggcccccagccccuacaacagcagauucgagagcguggccuggagcgccagcgccugccacgacggcaugggcuggcugaccaucggcaucagcggccccgacgacggcgccguggccgugcugaaguacaacggcaucaucaccggcaccaucaagagcuggagaaaggagauccugagaacccaggagagcgagugcgugugcgugaacggcagcugcuucaccaucaugaccgacggccccagcggcggccccgccagcuacaagaucuucaagaucgagaagggcaaggugaccaagagcaucgagcuggacgcccccaacagccacuacgaggagugcagcugcuaccccgacaccagcaaggugaugugcgugugcagagacaacuggcacggcagcaacagacccugggugagcuucgaccagaaccuggacuaccagaugggcuacaucugcagcggcguguucggcgacaaccccagacccaaggacggcaagggcagcugcggccccguguacguggacggcgccaacggcgugaagggcuucagcuacagauacggcaacggcguguggaucggcagaaccaagagcagcagcagcagacagggcuucgagaugaucugggaccccaacggcuggaccgagaccgacagcaacuucuucaugaagcaggacgugguggccgugaccgacuggagcggcuacagcggcagcuucgugcagcaccccgagcugaccggccuggacugcaugagacccugcuucuggguggagcugaucagaggcagacccaaggagaacaccaucuggaccagcggcagcagcaucagcuucugcggcgugaacagcgacaccguggacuggagcuggcccgacggcgccgagcugcccuucaccaucgacaaguga

SEQ ID NO: 174952 - RNA, 1410 nt, Artificial Sequence
  derived and/or modified CDS sequence (opt4) from neuraminidase__InfluenzaA__ABD79126
augaaccccaaccagaagaucaucaccaucggcagcgugagccugaccaucaccaccaucugcuuccugaugcagaucgccauccuggugaucaccgugacccugcacuucaagcagugcgagugcaacagcccccccaacaaccaggugaugcugugcgagcccaccaucaucgagagaaacaucaccgagaucguguaccugaccaacaccaccaucgagaaggagaucugccccaagcuggccgaguacagaaacuggagcaagccccagugcaagaucaccggcuucgcccccuucagcaaggacaacagcaucagacugagcgccggcggcgacaucugggugaccagagagcccuacgugagcugcgaccccggcaagugcuaccaguucgcccugggccagggcaccacccugaacaacagacacagcaacgacaccgugcacgacagaacccccuacagaacccugcugaugaacgagcugggcgugcccuuccaccugggcaccaagcaggugugcaucgccuggagcagcagcagcugccacgacggcaaggccuggcugcacgugugcgugaccggccacaacgagaacgccaccgccagcuucaucuacgacggcagacugguggacagcaucggcagcuggagcaagaacauccugagaacccaggagagcgagugcgugugcaucaacggcaccugcaccguggugaugaccgacggcagcgccagcggcagagccgacaccaagauccuguucaucgaggagggcaagaucgugcacaucagcccccugagcggcagcgcccagcacguggaggagugcagcugcuaccccagauaccccggcgugagaugcgugugcagagacaacuggaagggcagcaacagacccaucguggacaucaacgugaaggacuacagcaucgugagcagcuacgugugcagcggccuggugggcgacacccccagaaagaacgacagcagcagcagcagcuacugccuggaccccaacaacgaggagggcggccacggcgugaagggcugggccuucgacgacggcaacgacguguggaugggcagaaccaucagcgagaagcugagaagcggcuacgagaccuucaaggugaucggcggcuggagcaagcccaacagcaagcugcagaucaacagacaggugaucguggacaagggcaacagaagcggcuacagcggcaucuucagcguggagggcaagagcugcaucaacagaugcuucuacguggagcugaucagaggcagaaagcaggagaccgaggugugguggaccagcaacagcaucgugguguucugcggcaccagcggcaccuacggcaccggcagcuggcccgacggcgccgacaucaaccugaugcccaucuga

SEQ ID NO: 174953 - RNA, 1410 nt, Artificial Sequence; identical to SEQ ID NO: 174952
  derived and/or modified CDS sequence (opt4) from neuraminidase__InfluenzaA__ABD79137

SEQ ID NO: 174954 - RNA, 1410 nt, Artificial Sequence; identical to SEQ ID NO: 174952
  derived and/or modified CDS sequence (opt4) from neuraminidase__InfluenzaA__ABD79148

SEQ ID NO: 174955 - RNA, 1410 nt, Artificial Sequence; identical to SEQ ID NO: 174952
  derived and/or modified CDS sequence (opt4) from neuraminidase__InfluenzaA__ABD79159

SEQ ID NO: 174956 - RNA, 1410 nt, Artificial Sequence
  derived and/or modified CDS sequence (opt4) from neuraminidase__InfluenzaA__ABD79170
augaaccccaaccagaagaucaucaccaucggcagcgugagccugaccaucaccaccaucugcuuccugaugcagaucgccauccuggugaucaccgugacccugcacuucaagcagugcgagugcaacagcccccccaacaaccaggugaugcugugcgagcccaccaucaucgagagaaacaucaccgagaucguguaccugaccaacaccaccaucgagaaggagaucugccccaagcuggccgaguacagaaacuggagcaagccccagugcaagaucaccggcuucgcccccuucagcaaggacaacagcaucagacugagcgccggcggcgacaucugggugaccagagagcccuacgugagcugcgaccccggcaagugcuaccaguucgcccugggccagggcaccacccugaacaacagacacagcaacaacaccgugcacgacagaacccccuacagaacccugcugaugaacgagcugggcgugcccuuccaccugggcaccaagcaggugugcaucgccuggagcagcagcagcugccacgacggcaaggccuggcugcacgugugcgugaccggccacaacgagaacgccaccgccagcuucaucuacgacggcagacugguggacagcaucggcagcuggagcaagaacauccugagaacccaggagagcgagugcgugugcaucaacggcaccugcaccguggugaugaccgacggcagcgccagcggcagagccgacaccaagauccuguucaucaaggagggcaagaucgugcacgugagcccccugagcggcagcgcccagcacguggaggagugcagcugcuaccccagauaccccggcgugagaugcgugugcagagacaacuggaagggcagcaacagacccaucguggacaucaacgugaaggacuacagcaucgugagcagcuacgugugcagcggccuggugggcgacacccccagaaagaacgacagcagcagcagcagcuacugccuggaccccaacaacgaggagggcggccacggcgugaagggcugggccuucgacgacggcaacgacguguggaugggcagaaccaucagcgagaagcugagaagcggcuacgagaccuucaaggugaucggcggcuggagcaagcccaacagcaagcugcagaucaacagacaggugaucguggacaagggcaacagaagcggcuacagcggcaucuucagcguggagggcaagagcugcaucaacagaugcuucuacguggagcugaucagaggcagaaagcaggagaccgaggugugguggaccagcaacagcaucgugguguucugcggcaccagcggcaccuacggcaccggcagcuggcccgacggcgccgacaucaaccugaugcccaucuga

SEQ ID NO: 174957 - RNA, 1410 nt, Artificial Sequence; identical to SEQ ID NO: 174952
  derived and/or modified CDS sequence (opt4) from neuraminidase__InfluenzaA__ABD79181

SEQ ID NO: 174958 - RNA, 1410 nt, Artificial Sequence; identical to SEQ ID NO: 174952
  derived and/or modified CDS sequence (opt4) from neuraminidase__InfluenzaA__ABD79192

SEQ ID NO: 174959 - RNA, 1410 nt, Artificial Sequence
  derived and/or modified CDS sequence (opt4) from neuraminidase__InfluenzaA__ABD79203
augaaccccaaccagaagaucaucaccaucggcagcgugagccugaccaucaccaccaucugcuuccugaugcagaucgccauccuggugaucaccgugacccugcacuucaagcagugcgagugcaacagcccccccaacaaccaggugaugcugugcgagcccaccaucaucgagagaaacaucaccgagaucguguaccugaccaacaccaccaucgagaaggagaagugccccaagcuggccgaguacagaaacuggagcaagccccagugcaagaucaccggcuucgcccccuucagcaaggacaacagcaucagacugagcgccggcggcgacaucugggugaccagagagcccuacgugagcugcgaccccggcaagugcuaccaguucgcccugggccagggcaccacccugaacaacagacacagcaacgacaccgugcacgacagaacccccuacagaacccugcugaugaacgagcugggcgugcccuuccaccugggcaccaagcaggugugcaucgccuggagcagcagcagcugccacgacggcaaggccuggcugcacgugugcgugaccggccacaacgagaacgccaccgccagcuucaucuacgacggcagacugguggacagcaucggcagcuggagcaagaacauccugagaacccaggagagcgagugcgugugcaucaacggcaccugcaccguggugaugaccgacggcagcgccagcggcagagccgacaccaagauccuguucaucgaggagggcaagaucgugcacaucagcccccugagcggcagcgcccagcacguggaggagugcagcugcuaccccagauaccccggcgugagaugcgugugcagagacaacuggaagggcagcaacagacccaucguggacaucaacaugaaggacuacagcaucgugagcagcuacgugugcagcggccuggugggcgacacccccagaaagaacgacagcagcagcagcagcuacugccuggaccccaacaacgaggagggcggccacggcgugaagggcugggccuucgacgacggcaacgacguguggaugggcagaaccaucagcgagaagcugagaagcggcuacgagaccuucaaggugaucggcggcuggagcaagcccaacagcaagcugcagaucaacagacaggugaucguggacaagggcaacagaagcggcuacagcggcaucuucagcguggagggcaagagcugcaucaacagaugcuucuacguggagcugaucagaggcagaaagcaggagaccgaggugugguggaccagcaacagcaucgugguguucugcggcaccagcggcaccuacggcaccggcagcuggcccgacggcgccgacaucaaccugaugcccaucuga

SEQ ID NO: 174960 - RNA, 1410 nt, Artificial Sequence; identical to SEQ ID NO: 174952
  derived and/or modified CDS sequence (opt4) from neuraminidase__InfluenzaA__ABD79214

SEQ ID NO: 174961 - RNA, 1410 nt, Artificial Sequence
  derived and/or modified CDS sequence (opt4) from neuraminidase__InfluenzaA__ABD79236
augaaccccaaccagaagaucaucaccaucggcagcgugagccugaccaucaccaccaucugcuuccugaugcagaucgccauccuggugaucaccgugacccugcacuucaagcagugcgagugcaacagcccccccaacaaccaggugaugcugugcgagcccaccaucaucgagagaaacaucaccgagaucguguaccugaccaacaccaccaucgagaaggagaucugccccaagcuggccgaguacagaaacuggagcaagccccagugcaagaucaccggcuucgcccccuucagcaaggacaacagcaucagacugagcgccggcggcgacaucugggugaccagagagcccuacgugagcugcgaccccggcaagugcuaccaguucgcccugggccagggcaccacccugaacaacagacacagcaacaacaccgcccacgacagaacccccuacagaacccugcugaugaacgagcugggcgugcccuuccaccugggcaccaagcaggugugcaucgccuggagcagcagcagcugccacgacggcaaggccuggcugcacgugugcgugaccggccacaacgagaacgccaccgccagcuucaucuacgacggcagacugguggacagcaucggcagcuggagcaagaacauccugagaacccaggagagcgagugcgugugcaucaacggcaccugcaccguggugaugaccgacggcagcgccagcggcagagccgacaccaagauccuguucaucaaggagggcaagaucgugcacaucagcccccugagcggcagcgcccagcacguggaggagugcagcugcuaccccagauaccccggcgugagaugcgugugcagagacaacuggaagggcagcaacagacccaucguggacaucaacgugaaggacuacagcaucgugagcagcuacgugugcagcggccuggugggcgacacccccagaaagaacgacagcagcagcagcagcuacugccuggaccccaacaacgaggagggcggccacggcgugaagggcugggccuucgacgacggcaacgacguguggaugggcagaaccaucagcgagaagcugagaagcggcuacgagaccuucaaggugaucggcggcuggagcaagcccaacagcaagcugcagaucaacagacaggugaucguggacaagggcaacagaagcggcuacagcggcaucuucagcguggagggcaagagcugcaucaacagaugcuucuacguggagcugaucagaggcagaaagcaggagaccgaggugugguggaccagcaacagcaucgugguguucugcggcaccagcggcaccuacggcaccggcagcuggcccgacggcgccgacaucaaccugaugcccaucuga

SEQ ID NO: 174962 - RNA, 1410 nt, Artificial Sequence
  derived and/or modified CDS sequence (opt4) from neuraminidase__InfluenzaA__ABD79247
augaaccccaaccagaagaucaucaccaucggcagcgugagccugaccaucaccaccaucugcuuccugaugcagaucgccauccuggugaucaccgugacccugcacuucaagcagugcgagugcaaccccccccccaacaaccaggugaugcugugcgagcccaccaucaucgagagaaacaucaccgagaucguguaccugaccaacaccaccaucgagaaggagaucugccccaagcuggccgaguacagaaacuggagcaagccccagugcaagaucaccggcuucgcccccuucagcaaggacaacagcaucagacugagcgccggcggcgacaucugggugaccagagagcccuacgugagcugcgaccccggcaagugcuaccaguucgcccugggccagggcaccacccugaacaacagacacagcaacgacaccgugcacgacagaacccccuacagaacccugcugaugaacgagcugggcgugcccuuccaccugggcaccaagcaggugugcaucgccuggagcagcagcagcugccacgacggcaaggccuggcugcacgugugcgugaccggccacaacgagaacgccaccgccagcuucaucuacgacggcagacugguggacagcaucggcagcuggagcaagaacauccugagaacccaggagagcgagugcgugugcaucaacggcaccugcaccguggugaugaccgacggcagcgccagcggcagagccgacaccaagauccuguucaucgaggagggcaagaucgugcacaucagcccccugagcggcagcgcccagcacguggaggagugcagcugcuaccccagauaccccggcgugagaugcgugugcagagacaacuggaagggcagcaacagacccaucguggacaucaacgugaaggacuacagcaucgugagcagcuacgugugcagcggccuggugggcgacacccccagaaagaacgacagcagcagcagcagcuacugccuggaccccaacaacgaggagggcggccacggcgugaagggcugggccuucgacgacggcaacgacguguggaugggcagaaccaucagcgagaagcugagaagcggcuacgagaccuucaaggugaugggcggcuggagcaagcccaacagcaagcugcagaucaacagacaggugaucguggacagaggcaacagaagcggcuacagcggcaucuucagcguggagggcaagagcugcaucaacagaugcuucuacguggagcugaucagaggcagaaagcaggagaccgaggugugguggaccagcaacagcaucgugguguucugcggcaccagcggcaccuacggcaccggcagcuggcccgacggcgccgacaucaaccugaugcccaucuga

SEQ ID NO: 174963 - RNA, 1410 nt, Artificial Sequence; identical to SEQ ID NO: 174387
  derived and/or modified CDS sequence (opt4) from neuraminidase__InfluenzaA__ABD94737

SEQ ID NO: 174964 - RNA, 1410 nt, Artificial Sequence; identical to SEQ ID NO: 174772
  derived and/or modified CDS sequence (opt4) from neuraminidase__InfluenzaA__ABD94748

SEQ ID NO: 174965 - RNA, 1413 nt, Artificial Sequence; identical to SEQ ID NO: 174888
  derived and/or modified CDS sequence (opt4) from neuraminidase__InfluenzaA__ABD94759

SEQ ID NO: 174966 - RNA, 1410 nt, Artificial Sequence; identical to SEQ ID NO: 174121
  derived and/or modified CDS sequence (opt4) from neuraminidase__InfluenzaA__ABD94770

SEQ ID NO: 174967 - RNA, 1413 nt, Artificial Sequence; identical to SEQ ID NO: 174456
  derived and/or modified CDS sequence (opt4) from neuraminidase__InfluenzaA__ABD94792

SEQ ID NO: 174968 - RNA, 1413 nt, Artificial Sequence; identical to SEQ ID NO: 174456
  derived and/or modified CDS sequence (opt4) from neuraminidase__InfluenzaA__ABD94803

SEQ ID NO: 174969 - RNA, 1413 nt, Artificial Sequence; identical to SEQ ID NO: 174456
  derived and/or modified CDS sequence (opt4) from neuraminidase__InfluenzaA__ABD94814

SEQ ID NO: 174970 - RNA, 1410 nt, Artificial Sequence; identical to SEQ ID NO: 174633
  derived and/or modified CDS sequence (opt4) from neuraminidase__InfluenzaA__ABD94825

SEQ ID NO: 174971 - RNA, 1410 nt, Artificial Sequence
  derived and/or modified CDS sequence (opt4) from neuraminidase__InfluenzaA__ABD94847
augaaccccaaccagaagaucaucaccaucggcagcgugagccugaccaucgccaccaucugcuuccugaugcagaucgccauccuggugaccaccgugacccugcacuucaagcaguacgagugcaacagcccccccaacaaccaggugaugcugugcgagcccaagaucaucgagagaaacaucaccgagaucguguaccugaccaacaccaccaucgagaaggagaucugccccaagcuggccgaguacagaaacuggagcaagccccagugcaagaucaccggcuucgcccccuucagcaaggacaacagcaucagacugagcgccggcggcgacaucugggugaccagagagcccuacgugagcugcgaccccgacaagugcuaccaguucgcccugggccagggcaccacccugaacaacagacacagcaacgacaccgugcacgacagaacccccuacagaacccugcugaugaacgagcugggcgugcccuuccaccugggcaccaagcaggugugcaucgccuggagcagcagcagcugccacgacggcaaggccuggcugcacgugugcgugaccggccacgacgagaacgccaccgccagcuucaucuacgacggcagacugguggacagcaucggcagcuggagcaagaagauccugagaacccaggagagcgagugcgugugcaucaacggcaccugcaccguggugaugaccgacggcagcgccagcggcagagccgugaccaagauccuguucaucgaggagggcaagaucgugcacaucagcccccugcugggcagcgcccagcacguggaggagugcagcugcuaccccagauaccccggcgugagaugcgugugcagagacaacuggaagggcagcaacagacccaucguggacaucaacgugaaggacuacagcaucgugagcagcuacgugugcagcggccuggugggcgacacccccagaaagaacgacagcagcagcagcagccacugccugaaccccaacaacgaggagggcggccacggcgugaagggcugggccuucgacgacggcaacgacguguggaugggcagaaccaucagcgagaagcugagaagcggcuacgagaccuucaaggugaucgagggcuggagcaagcccaacagcaagcugcagaucaacagacaggugaucguggacagaggcaacagaagcggcuacagcggcaucuucagcguggagggcaagagcugcaucaacagaugcuucuacguggagcugaucagaggcagaaagcaggagaccgaggugugguggaccagcaacagcaucgugguguucugcggcaccagcggcaccuacggcaccggcagcuggcccgacggcgccgacaucaaccugaugcccaucuga

SEQ ID NO: 174972 - RNA, 1410 nt, Artificial Sequence; identical to SEQ ID NO: 174186
  derived and/or modified CDS sequence (opt4) from neuraminidase__InfluenzaA__ABD94858

SEQ ID NO: 174973 - RNA, 1410 nt, Artificial Sequence; identical to SEQ ID NO: 174186
  derived and/or modified CDS sequence (opt4) from neuraminidase__InfluenzaA__ABD94880

SEQ ID NO: 174974 - RNA, 1410 nt, Artificial Sequence
  derived and/or modified CDS sequence (opt4) from neuraminidase__InfluenzaA__ABD94891
augaaccccaaccagaagaucaucaccaucggcagcgugagccugaccaucaccaccaucugcuuccugaugcagaucgccauccuggugaucaccgugacccugcacuucaagcagugcgagugcaacagcccccccaacaaccaggugaugcugugcgagcccaccaucaucgagagaaacaucaccgagaucguguaccugaccaacaccaccaucgagaaggagaucugccccaagcuggccgaguacagaaacuggagcaagccccagugcaagaucaccggcuucgcccccuucagcaaggacaacagcaucagacugagcgccggcggcgacaucugggugaccagagagcccuacgugagcugcgaccccggcaagugcuaccaguucgcccugggccagggcaccacccugaacaacagacacagcaacgacaccgugcacgacagaacccccuacagaacccugcugaugaacgagcugggcgugcccuuccaccugggcaccaagcaggugugcaucgccuggagcagcagcagcugccacgacggcaaggccuggcugcacgugugcgugaccggccacaacgagaacgccaccgccagcuucaucuacgacggcagacugguggacagcaucggcagcuggagcaagaacauccugagaacccaggagagcgagugcgugugcaucaacggcaccugcaccguggugaugaccgacggcagcgccagcggcagagccgacaccaaggugcuguucaucgaggagggcaagaucgugcacaucagccagcugagcggcagcgcccagcacguggaggagugcagcugcuaccccagauaccccggcgugagaugcgugugcagagacaacuggaagggcagcaacagacccaucguggacaucaacgugaaggacuacagcaucgugagcagcuacgugugcagcggccuggugggcgacacccccagaaagaacgacagcagcagcagcagcuacugccuggaccccaacaacgaggagggcggccacggcgugaagggcugggccuucgacgacggcaacgacguguggaugggcagaaccaucagcgagaagcugagaagcggcuacgagaccuucaaggugaucggcggcuggagcaagcccaacagcaagcugcagaucaacagacaggugaucguggacagaggcaacagaagcggcuacagcggcaucuucagcguggagggcaagagcugcaucaacagaugcuucuacguggagcugaucagaggcagaaagcaggagaccgaggugugguggaccagcaacagcaucgugguguucugcggcaccagcggcaccuacggcaccggcagcuggcccgacggcgccgacaucaaccugaugcccaucuga

SEQ ID NO: 174975 - RNA, 1410 nt, Artificial Sequence; identical to SEQ ID NO: 174952
  derived and/or modified CDS sequence (opt4) from neuraminidase__InfluenzaA__ABD94902

SEQ ID NO: 174976 - RNA, 1410 nt, Artificial Sequence
  derived and/or modified CDS sequence (opt4) from neuraminidase__InfluenzaA__ABD94924
augaaccccaaccagaagaucaucaccaucggcagcgugagccugaccaucgccaccaucugccugcugaugcagaucgccauccuggugaccaccgugacccugcacuucaagcaguacgagugcaacagcccccccaacaaccaggugaugcugugcgagcccaccaucaucgagagaaacaucaccgagaucguguaccugaccaacaccaccaucgagaaggagaucugccccaagcuggccgaguacagaaacuggagcaagccccagugcaagaucaccggcuucgcccccuucagcaaggacaacagcaucagacugagcgccggcggcgacaucugggugaccagagagcccuacgugagcugcgaccccgacaagugcuaccaguucgcccugggccagggcaccacccugaacaacagacacagcaacgacaccgugcacgacagaacccccuacagaacccugcugaugaacgagcugggcgugcccuuccaccugggcaccaagcaggugugcaucgccuggagcagcagcagcugccacgacggcaaggccuggcugcacgugugcgugaccggccacgacgagaacgccaccgccagcuucaucuacgacggcagacugguggacagcaucggcagcuggagcaagaagauccugagaacccaggagagcgagugcgugugcaucaacggcaccugcaccguggugaugaccgacggcagcgccagcggcagagccgacaccaagauccuguucaucgaggagggcaagaucgugcacaucagccagcugcugggcagcgcccagcacguggaggagugcagcugcuaccccagauaccccggcgugagaugcgugugcagagacaacuggaagggcagcaacagacccaucguggacaucaacgugaaggacuacagcaucgugagcagcuacgugugcagcggccuggugggcgacacccccagaaagaacgacagcagcagcagcagccacugccugaaccccaacaacgaggagggcggccacggcgugaagggcugggccuucgacgacggcaacgacguguggaugggcagaaccaucagcgagaagcugagaagcggcuacgagaccuucaaggugaucgagggcuggagcaagcccaacagcaagcugcagaucaacagacaggugaucguggacagaggcaacagaagcggcuacagcggcaucuucagcguggagggcaagagcugcaucaacagaugcuucuacguggagcugaucagaggcagaaagcaggagaccgaggugugguggaccagcaacagcaucgugguguucugcggcaccagcggcaccuacggcaccggcagcuggcccgacggcgccgacaucaaccugaugcccaucuga

SEQ ID NO: 174977 - RNA, 1410 nt, Artificial Sequence
  derived and/or modified CDS sequence (opt4) from neuraminidase__InfluenzaA__ABD94946
augaaccccaaccagaagaucaucaccaucggcagcgugagccugaccaucgccaccaucugcuuccugacccagaucgccauccuggugaccaccgugacccugcacuucaagcaguacgagugcaacagcccccccaacaaccaggugaugcugugcgagcccaccaucaucgagagaaacaucaccgagaucguguaccugaccaacaccaccaucgagaaggagaucugccccaagcuggccgaguacagaaacuggagcaagccccagugcaacaucaccggcuucgcccccuucagcaaggacaacagcaucagacugagcgccggcggcgacaucugggugaccagagagcccuacgugagcugcgaccccgacaagugcuaccaguucgcccugggccagggcaccacccugaacaacggccacagcaacgacaccgugcacgacagaacccccuacagaacccugcugaugaacgagcugggcgugcccuuccaccugggcaccaagcaggugugcaucgccuggagcagcagcagcugccacgacggcaaggccuggcugcacgugugcgugaccggcgacgacaagaacgccaccgccagcuucaucuacaacggcagacugguggacagcaucggcagcuggagcaagaagauccugagaacccaggagagcgagugcgugugcaucaacggcaccugcaccguggugaugaccgacggcagcgccagcggcaaggccgacaccaagauccuguucaucgaggagggcaagaucgugcacaccagccugcugagcggcagcgcccagcacguggaggagugcagcugcuaccccagauaccccggcgugagaugcgugugcagagacaacuggaagggcagcaacagacccaucguggacaucaacgugaaggacuacagcaucgugagcagcuacgugugcagcggccuggugggcgacacccccagaaagaacgacagaagcagcagcagccacugccuggaccccaacaacgaggagggcggccacggcgugaagggcugggccuucgacgacggcaacgacguguggaugggcagaaccaucagcgagaagcugagaagcggcuacgagaccuucaaggugaucgagggcuggagcaagcccaacagcaagcugcagaucaacagacaggugaucguggacagagacaacagaagcggcuacagcggcaucuucagcguggagggcaagagcugcaucaacagaugcuucuacguggagcugaucagaggcagaaaccaggagaccgaggugcuguggaccagcaacagcaucgugguguucugcggcaccagcggcaccuacggcaccggcagcuggcccgacggcgccgacaucaaccugaugcccaucuga

SEQ ID NO: 174978 - RNA, 1410 nt, Artificial Sequence
  derived and/or modified CDS sequence (opt4) from neuraminidase__InfluenzaA__ABD94957
augaaccccaaccagaagaucaucaccaucggcagcgugagccugaccaucagcaccaucugcuucuucaugcagaucgccauccugaucaccaccgugacccugcacuucaagcaguacgaguucaacagcccccccaacaaccaggugaugcugugcgagcccaccaucaucgagagaaacaucaccgagaucguguaccugaccaacaccaccaucgagaaggagaucugccccaagcuggccgaguacagaaacuggagcaagccccagugcgacaucaccggcuucgcccccuucagcaaggacaacagcaucagacugagcgccggcggcgacaucugggugaccagagagcccuacgugagcugcgaccccgacaagugcuaccaguucgcccugggccagggcaccacccugaacaacgugcacagcaacgacaccgugcacgacagaacccccuacagaacccugcugaugaacgagcugggcgugcccuuccaccugggcaccaagcaggugugcaucgccuggagcagcagcagcugccacgacggcaaggccuggcugcacgugugcgugaccggcgacgacaagaacgccaccgccagcuucaucuacaacggcagacugguggacagcaucgugagcuggagcaagaagauccugagaacccaggagagcgagugcgugugcaucaacggcaccugcaccguggugaugaccgacggcagcgccagcggcaaggccgacaccaagauccuguucaucgaggagggcaagaucgugcacaccagcacccugagcggcagcgcccagcacguggaggagugcagcugcuaccccagauaccccggcgugagaugcgugugcagagacaacuggaagggcagcaacagacccaucguggacaucaacaucaaggacuacagcaucgugagcagcuacgugugcagcggccuggugggcgacacccccagaaagaacgacagcagcagcagcagccacugccuggaccccaacaacgaggagggcggccacggcgugaagggcugggccuucgacgacggcaacgacguguggaugggcagaaccaucagcgagaagcugagaagcggcuacgagaccuucaaggugaucgagggcuggagcaaccccaacagcaagcugcagaucaacagacaggugaucguggacagaggcaacagaagcggcuacagcggcaucuucagcguggagagcaagagcugcaucaacagaugcuucuacguggagcugaucagaggcagaaaggaggagaccgaggugcuguggaccagcaacagcaucgugguguucugcggcaccagcggcaccuacggcaccggcagcuggcccgacggcgccgacaucaaccugaugcccaucuga

SEQ ID NO: 174979 - RNA, 1413 nt, Artificial Sequence; identical to SEQ ID NO: 174888
  derived and/or modified CDS sequence (opt4) from neuraminidase__InfluenzaA__ABD94968

SEQ ID NO: 174980 - RNA, 1413 nt, Artificial Sequence; identical to SEQ ID NO: 174888
  derived and/or modified CDS sequence (opt4) from neuraminidase__InfluenzaA__ABD94990

SEQ ID NO: 174981 - RNA, 1413 nt, Artificial Sequence
  derived and/or modified CDS sequence (opt4) from neuraminidase__InfluenzaA__ABD95001
augaaccccaaccagaagaucaucaccaucggcagcaucagcaucgccaucggcaucaucagccugaugcugcagaucggcaacaucaucagcaucugggccagccacagcauccagaccggcagccagaaccacaccggcaucugcaaccagagaaucaucaccuacgagaacagcaccugggugaaccacaccuacgugaacauccacaacaccaacgugguggccggcaaggacaagaccagcgugacccuggccggcaacagcagccugugcagcaucagcggcugggccaucuacaccaaggacaacagcaucagaaucggcagcaagggcgacguguucgugaucagagagcccuucaucagcugcagccaccuggagugcagaaccuucuuccugacccagggcgcccugcugaacgacaagcacagcaacggcaccgugaaggacagaagccccuacagagcccugaugagcugcccccugggcgaggcccccagccccuacaacagcaaguucgagagcguggccuggagcgccagcgccugccacgacggcaugggcuggcugaccaucggcaucagcggccccgacaacggcgccguggccgugcugaaguacaacggcaucaucaccgagaccaucaagagcuggaagaagagaauccugagaacccaggagagcgagugcgugugcgugaacggcagcugcuucaccaucaugaccgacggccccagcaacggcgccgccagcuacaagaucuucaagaucgagaagggcaaggugaccaagagcaucgagcugaacgcccccaacuuccacuacgaggagugcagcugcuaccccgacaccggcaccgugaugugcgugugcagagacaacuggcacggcagcaacagacccugggugagcuucaaccagaaccuggacuaccagaucggcuacaucugcagcggcguguucggcgacaaccccagacccaaggacggcgagggcagcugcaaccccgugaccguggacggcgccgacggcgugaagggcuucagcuacaaguacggcaacggcguguggaucggcagaaccaagagcaacagacugagaaagggcuucgagaugaucugggaccccaacggcuggaccgacaccgacagcaacuucagcaugaagcaggacgugguggccaucaccgacuggagcggcuacagcggcagcuucgugcagcaccccgagcugaccggccuggacugcaucagacccugcuucuggguggagcuggugagaggccugcccagagagaacaccaccaucuggaccagcggcagcagcaucagcuucugcggcgugaacagcgacaccgccaacuggagcuggcccgacggcgccgagcugcccuucaccaucgacaaguga

SEQ ID NO: 174982 - RNA, 1413 nt, Artificial Sequence
  derived and/or modified CDS sequence (opt4) from neuraminidase__InfluenzaA__ABD95012
augaaccccaaccagaagaucaucaccaucggcagcaucagcaucgccaucggcaucaucagccugaugcugcagaucggcaacaucaucagcaucugggccagccacagcauccagaccggcagccagaaccacaccggcaucugcaaccagagaaucaucaccuacgagaacagcaccugggugaaccacaccuacgugaacaucaacaacaccaacgugguggccggcaaggacaagaccagcgugacccuggccggcaacagcagccugugcagcaucagcggcugggccaucuacaccaaggacaacagcaucagaaucggcagcaagggcgacguguucgugaucagagagcccuucaucagcugcagccaccuggagugcagaaccuucuuccugacccagggcgcccugcugaacgacaagcacagcaacggcaccgugaaggacagaagccccuacagagcccugaugagcugcccccugggcgaggcccccagccccuacaacagcaaguucgagagcguggccuggagcgccagcgccugccacgacggcaugggcuggcugaccaucggcaucagcggccccgacaacggcgccguggccgugcugaaguacaacggcaucaucaccgagaccaucaagagcuggaagaagagaauccugagaacccaggagagcgagugcgugugcgugaacggcagcugcuucaccaucaugaccgacggccccagcaacggcgccgccagcuacaagaucuucaagaucgagaagggcaaggugaccaagagcaucgagcugaacgcccccaacuuccacuacgaggagugcagcugcuaccccgacaccggcaccgugaugugcgugugcagagacaacuggcacggcagcaacagacccugggugagcuucaaccagaaccuggacuaccagaucggcuacaucugcagcggcguguucggcgacaaccccagacccaaggacggcgagggcagcugcaaccccgugaccguggacggcgccgacggcgugaagggcuucagcuacaaguacggcaacggcguguggaucggcagaaccaagagcaacagacugagaaagggcuucgagaugaucugggaccccaacggcuggaccaacaccgacagcaacuucagcgugaagcaggacgugguggccaucaccgacuggagcggcuacagcggcagcuucgugcagcaccccgagcugaccggccuggacugcaucagacccugcuucuggguggagcuggugagaggccugcccagagagaacaccaccaucuggaccagcggcagcagcaucagcuucugcggcgugaacagcgacaccgccaacuggagcuggcccgacggcgccgagcugcccuucaccaucgacaaguga

SEQ ID NO: 174983 - RNA, 1413 nt, Artificial Sequence; identical to SEQ ID NO: 174888
  derived and/or modified CDS sequence (opt4) from neuraminidase__InfluenzaA__ABD95023

SEQ ID NO: 174984 - RNA, 1413 nt, Artificial Sequence
  derived and/or modified CDS sequence (opt4) from neuraminidase__InfluenzaA__ABD95034
augaaccccaaccagaagaucaucaccaucggcagcaucagcaucgccaucggcaucaucagccugaugcugcagaucggcaacaucaucagcaucugggccagccacagcauccagaccggcagccagaaccacaccggcaucugcaaccagagaaucaucaccuacgagaacagcaccugggugaaccacaccuacgugaacaucaacaacaccaacgugguggccggcaaggacaagaccagcgugacccuggccggcaacagcagccugugcagcaucagcggcugggccaucuacaccaaggacaacagcaucagaaucggcagcaagggcgacguguucgugaucagagagcccuucaucagcugcagccaccuggagugcagaaccuucuuccugacccagggcgcccugcugaacgacaagcacagcaacggcaccgugaaggacagaagccccuacagagcccugaugagcugcccccugggcgaggcccccagccccuacaacagcaaguucgagagcguggccuggagcgccagcgccugccacgacggcaugggcuggcugaccaucggcaucagcggccccgacaacggcgccguggccgugcugaaguacaacggcaucaucaccgagaccaucaagagcuggaagaagagaauccugagaacccaggagagcgagugcgugugcgugaacggcagcugcuucaccaucaugaccgacggccccagcaacggcgccgccagcuacaagaucuucaagaucgagaagggcaaggugaccaagagcaucgagcugaacgcccccaacuuccacuacgaggagugcagcugcuaccccgacaccggcaccgugaugugcgugugcagagacaacuggcacggcagcaacagacccugggugagcuucaaccagaaccuggacuaccagaucggcuacaucugcagcggcguguucggcgacaaccccagacccaaggacggcgagggcagcugcaaccccgugaccguggacggcgccgacggcgugaagggcuucagcuacaaguacggcaacggcguguggaucggcagaaccaagagcaacagacugagaaagggcuucgagaugaucugggaccccaacggcuggaccgacaccgacagcaacuucagcgugaagcaggacgugguggccaucaccgacuggagcggcuacagcggcagcuucauccagcaccccgagcugaccggccuggacugcaucagacccugcuucuggguggagcuggugagaggccugcccagagagaacaccaccaucuggaccagcggcagcagcaucagcuucugcggcgugaacagcgacaccgccaacuggagcuggcccgacggcgccgagcugcccuucaccaucgacaaguga

SEQ ID NO: 174985 - RNA, 1413 nt, Artificial Sequence
  derived and/or modified CDS sequence (opt4) from neuraminidase__InfluenzaA__ABD95056
augaaccccaaccagaagaucaucaccaucggcagcaucagcaucgccaucggcaucaucagccugaugcugcagaucggcaacaucaucagcaucugggccagccacagcauccagaccggcagccagaaccacaccggcgugugcaaccagagaaucaucaccuacgagaacagcaccugggugaaccacaccuacgugaacaucaacaacaccaacgugaucgccggcaaggacaagaccagcgugacccuggccggcaacagcagccugugcagcaucagcggcugggccaucuacaccaaggacaacagcaucagaaucggcagcaagggcgacguguucgugaucagagagcccuucaucagcugcagccaccuggagugcagaaccuucuuccugacccagggcgcccugcugaacgacaagcacagcaacggcaccgugaaggacagaagccccuacagagcccugaugagcugcccccugggcgaggcccccagccccuacaacagcaaguucgagagcguggccuggagcgccagcgccugccacgacggcaugggcuggcugaccaucggcaucagcggccccgacaacggcgccguggccgugcugaaguacaacggcaucaucaccgagaccaucaagagcuggaagaagcagauccugagaacccaggagagcgagugcgugugcgugaacggcagcugcuucaccaucaugaccgacggccccagcaacggcgccgccagcuacaagaucuucaagaucgagaagggcaagaucaccaagagcaucgagcugaacgcccccaacuuccacuacgaggagugcagcugcuaccccgacaccggcaccgugaugugcgugugcagagacaacuggcacggcagcaacagacccugggugagcuucaaccagaaccuggacuaccagaucggcuacaucugcagcggcguguucggcgacaaccccagacccaaggacggcgagggcagcugcaaccccgugaccguggacggcgccaacggcgugaagggcuucagcuacaaguacggcaacggcguguggaucggcagaaccaagagcaacagacugagaaagggcuucgagaugaucugggaccccaacggcuggaccgacaccgacagcgacuucagcgugaagcaggacgugguggccaucaccgacuggagcggcuacagcggcagcuucgugcagcaccccgagcugaccggccugaacugcaucagacccugcuucuggguggagcuggugagaggccugcccaaggagaacaccaccaucuggaccagcggcagcagcaucagcuucugcggcgugaacagcgacaccgccaacuggagcuggcccgacggcgccgagcugcccuucaccaucgacaaguga

SEQ ID NO: 174986 - RNA, 1413 nt, Artificial Sequence; identical to SEQ ID NO: 174456
  derived and/or modified CDS sequence (opt4) from neuraminidase__InfluenzaA__ABD95067

SEQ ID NO: 174987 - RNA, 1413 nt, Artificial Sequence; identical to SEQ ID NO: 174456
  derived and/or modified CDS sequence (opt4) from neuraminidase__InfluenzaA__ABD95078

SEQ ID NO: 174988 - RNA, 1413 nt, Artificial Sequence; identical to SEQ ID NO: 174985
  derived and/or modified CDS sequence (opt4) from neuraminidase__InfluenzaA__ABD95089

SEQ ID NO: 174989 - RNA, 1413 nt, Artificial Sequence; identical to SEQ ID NO: 174456
  derived and/or modified CDS sequence (opt4) from neuraminidase__InfluenzaA__ABD95100

SEQ ID NO: 174990 - RNA, 1413 nt, Artificial Sequence
  derived and/or modified CDS sequence (opt4) from neuraminidase__InfluenzaA__ABD95111
augaaccccaaccagaagaucaucaccaucggcagcaucagcaucgccaucggcaugaucagccugaugcugcagaucggcaacaucaucagcaucugggccagccacagcauccagaccggcagccagaaccacaccggcgugugcaaccagagaaucaucaccuacgagaacagcaccugggugaaccacaccuacgugaacaucaacaacaccaacgugaucgccggcaaggacaagaccagcgugacccuggccggcaacagcagccugugcagcaucagcggcugggccaucuacaccaaggacaacagcaucagaaucggcagcaagggcgacguguucgugaucagagagcccuucaucagcugcagccaccuggagugcagaaccuucuuccugacccagggcgcccugcugaacgacaagcacagcaacggcaccgugaaggacagaagccccuacagagcccugaugagcugcccccugggcgaggcccccagccccuacaacagcaaguucgagagcguggccuggagcgccagcgccugccacgacggcaugggcuggcugaccaucggcaucagcggccccgacaacggcgccguggccgugcugaaguacaacggcaucaucaccgagaccaucaagagcuggaagaagcagauccugagaacccaggagagcgagugcgugugcgugaacggcagcugcuucaccaucaugaccgacggccccagcaacggcgccgccagcuacaagaucuucaagaucgagaagggcaaggugaccaagagcaucgagcugaacgcccccaacuuccacuacgaggagugcagcugcuaccccgacaccggcaccgugaugugcgugugcagagacaacuggcacggcagcaacagacccugggugagcuucaaccagaaccuggacuaccagaucggcuacaucugcagcggcguguucggcgacaaccccagacccaaggacggcgagggcagcugcaaccccgugaccguggacggcgccaacggcgugaagggcuucagcuacaaguacggcaacggcguguggaucggcagaaccaagagcaacagacugagaaagggcuucgagaugaucugggaccccaacggcuggaccgacaccgacagcgacuucagcgugaagcaggacgugguggccaucaccgacuggagcggcuacagcggcagcuucgugcagcaccccgagcugaccggccuggacugcaucagacccugcuucuggguggagcuggugagaggccugcccaaggagaacaccaccaucuggaccagcggcagcagcaucagcuucugcggcgugaacagcgacaccgccaacuggagcuggcccgacggcgccgagcugcccuucaccaucgacaaguga

SEQ ID NO: 174991 - RNA, 1413 nt, Artificial Sequence; identical to SEQ ID NO: 174990
  derived and/or modified CDS sequence (opt4) from neuraminidase__InfluenzaA__ABD95122

SEQ ID NO: 174992 - RNA, 1413 nt, Artificial Sequence; identical to SEQ ID NO: 174456
  derived and/or modified CDS sequence (opt4) from neuraminidase__InfluenzaA__ABD95144

SEQ ID NO: 174993 - RNA, 1413 nt, Artificial Sequence; identical to SEQ ID NO: 174456
  derived and/or modified CDS sequence (opt4) from neuraminidase__InfluenzaA__ABD95155

SEQ ID NO: 174994 - RNA, 1413 nt, Artificial Sequence
  derived and/or modified CDS sequence (opt4) from neuraminidase__InfluenzaA__ABD95166
augaaccccaaccagaagaucaucaccaucggcagcaucagcaucgccaucggcaugaucagccugaugcugcagaucggcaacaucaucagcaucugggccagccacagcauccagaccggcagccagaaccacaccggcgugugcaaccagagaaucaucaccuacgagaacagcaccugggugaaccacaccuacgugaacaucaacaacaccaacgugaucgccgagaaggacaagaccagcgugacccuggccggcaacagcagccugugcagcaucagcggcugggccaucuacaccaaggacaacagcaucagaaucggcagcaagggcgacguguucgugaucagagagcccuucaucagcugcagccaccuggagugcagaaccuucuuccugacccagggcgcccugcugaacgacaagcacagcaacggcaccgugaaggacagaagccccuacagagcccugaugagcugcccccugggcgaggcccccagccccuacaacagcaaguucgagagcguggccuggagcgccagcgccugccacgacggcaugggcuggcugaccaucggcaucagcggccccgacaacggcgccguggccgugcugaaguacaacggcaucaucaccgagaccaucaagagcuggaagaagcagauccugagaacccaggagagcgagugcgugugcgugaacggcagcugcuucaccaucaugaccgacggccccagcaacggcgccgccagcuacaagaucuucaagaucgagaagggcaaggugaccaagagcaucgagcugaacgcccccaacuuccacuacgaggagugcagcugcuaccccgacaccggcaccgugaugugcgugugcagagacaacuggcacggcagcaacagacccugggugagcuucaaccagaaccuggacuaccagaucggcuacaucugcagcggcguguucggcgacaaccccagacccaaggacggcgagggcagcugcaaccccgugaccguggacggcgccaacggcgugaagggcuucagcuacaaguacggcaacggcguguggaucggcagaaccaagagcaacagacugagaaagggcuucgagaugaucugggaccccaacggcuggaccgacaccgacagcgacuucagcgugaagcaggacgugguggccaucaccgacuggagcggcuacagcggcagcuucgugcagcaccccgagcugaccggccuggacugcaucagacccugcuucuggguggagcuggugagaggccugcccaaggagaacaccaccaucuggaccagcggcagcagcaucagcuucugcggcgugaacagcgacaccgccaacuggagcuggcccgacggcgccgagcugcccuucaccaucgacaaguga

SEQ ID NO: 174995 - RNA, 1413 nt, Artificial Sequence; identical to SEQ ID NO: 174985
  derived and/or modified CDS sequence (opt4) from neuraminidase__InfluenzaA__ABD95177

SEQ ID NO: 174996 - RNA, 1413 nt, Artificial Sequence
  derived and/or modified CDS sequence (opt4) from neuraminidase__InfluenzaA__ABD95188
augaaccccaaccagaagaucaucaccaucggcagcaucagcaccaccaucggcaucaucagccugaugcugcagaucggcaacaucaucagcaucugggccagccacagcauccagaccggcagccagaaccacaccggcgugugcaaccagagaaucaucaccuacgagaacagcaccugggugaaccacaccuacgugaacaucaacaacaccaacgugaucgccggcaaggacaagaccagcgugacccuggccggcaacagcagccugugcagcaucagcggcugggccaucuacaccaaggacaacagcaucagaaucggcagcaagggcgacguguucgugaucagagagcccuucaucagcugcagccaccuggagugcagaaccuucuuccugacccagggcgcccugcugaacgacaagcacagcaacggcaccgugaaggacagaagccccuacagagcccugaugagcugcccccugggcgaggcccccagccccuacaacagcaaguucgagagcguggccuggagcgccagcgccugccacgacggcaugggcuggcugaccaucggcaucagcggccccgacaacggcgccguggccgugcugaaguacaacggcaucaucaccgagaccaucaagagcuggaagaagcagauccugagaacccaggagagcgagugcgugugcgugaacggcagcugcuucaccaucaugaccgacggccccagcaacggcgccgccagcuacaagaucuucaagaucgagaagggcaaggugaccaagagcaucgagcugaacgcccccaacuuccacuacgaggagugcagcugcuaccccgacaccggcaccgugaugugcgugugcagagacaacuggcacggcagcaacagacccugggugagcuucaaccagaaccuggacuaccagaucggcuacaucugcagcggcguguucggcgacaaccccagacccaaggacggcgagggcagcugcaaccccgugaccguggacggcgccaacggcgugaagggcuucagcuacaaguacggcaacggcguguggaucggcagaaccaagagcaacagacugagaaagggcuucgagaugaucugggaccccaacggcuggaccgacaccgacagcgacuucagcgugaagcaggacgugguggccaucaccgacuggagcggcuacagcggcagcuucgugcagcaccccgagcugaccggccuggacugcaucagacccugcuucuggguggagcuggugagaggccugcccaaggagaacaccaccaucuggaccagcggcagcagcaucagcuucugcggcgugaacagcgacaccgccaacuggagcuggcccgacggcgccgagcugcccuucaccaucgacaaguga

SEQ ID NO: 174997 - RNA, 1413 nt, Artificial Sequence; identical to SEQ ID NO: 174985
  derived and/or modified CDS sequence (opt4) from neuraminidase__InfluenzaA__ABD95199

SEQ ID NO: 174998 - RNA, 1413 nt, Artificial Sequence; identical to SEQ ID NO: 174475
  derived and/or modified CDS sequence (opt4) from neuraminidase__InfluenzaA__ABD95210

SEQ ID NO: 174999 - RNA, 1413 nt, Artificial Sequence
  derived and/or modified CDS sequence (opt4) from neuraminidase__InfluenzaA__ABD95221
augaaccccaaccagaagaucaucaccaucggcagcaucagcaucgccaucggcaugaucagccugaugcugcagaucggcaacaucaucagcaucugggccagccacagcauccagaccggcagccagaaccacaccggcgugugcaaccagagaaucaucaccuacgagaacagcaccugggugaaccacaccuacgugaacaucaacaacaccaacgugaucgccggcaaggacaagaccagcgugacccuggccggcaacagcagccugugcagcaucagcggcugggccaucuacaccaaggacaacagcaucagaaucggcagcaagggcgacguguucgugaucagagagcccuucaucagcugcagccaccuggagugcagaaccuucuuccugacccagggcgcccugcugaacgacaagcacagcaacggcaccgugaaggacagaagccccuacagagcccugaugagcugcccccugggcgaggcccccagccccuacaacagcaaguucgagagcguggccuggagcgccagcgccugccacgacggcaugggcuggcugaccaucggcaucagcggccccgacaacggcgccguggccgugcugaaguacaacggcaucaucaccgagaccaucaagagcuggaagaagcagauccugagaacccaggagagcgagugcgugugcgugaacggcagcugcuucaccaucaugaccgacggccccagcaacggcgccgccagcuacaagaucuucaagaucgagaagggcaaggugaccaagagcaucgagcugaacgcccccaacagccacuacgaggagugcagcugcuaccccgacaccggcaccgugaugugcgugugcagagacaacuggcacggcagcaacagacccugggugagcuucaaccagaaccuggacuaccagaucggcuacaucugcagcggcguguucggcgacaaccccagacccaaggacggcgagggcagcugcaaccccgugaccguggacggcgccaacggcgugaagggcuucagcuacaaguacggcaacggcguguggaucggcagaaccaagagcaacagacugagaaagggcuucgagaugaucugggaccccaacggcuggaccgacaccgacagcgacuucagcgugaagcaggacgugguggccaucaccgacuggagcggcuacagcggcagcuucgugcagcaccccgagcugaccggccuggacugcaucagacccugcuucuggguggagcuggugagaggccugcccaaggagaacaccaccaucuggaccagcggcagcagcaucagcuucugcggcgugaacagcgacaccgccaacuggagcuggcccgacggcgccgagcugcccuucaccaucgacaaguga

SEQ ID NO: 175000 - RNA, 1413 nt, Artificial Sequence; identical to SEQ ID NO: 174990
  derived and/or modified CDS sequence (opt4) from neuraminidase__InfluenzaA__ABD95232

SEQ ID NO: 175001 - RNA, 1413 nt, Artificial Sequence; identical to SEQ ID NO: 174456
  derived and/or modified CDS sequence (opt4) from neuraminidase__InfluenzaA__ABD95243

SEQ ID NO: 175002 - RNA, 1413 nt, Artificial Sequence; identical to SEQ ID NO: 174990
  derived and/or modified CDS sequence (opt4) from neuraminidase__InfluenzaA__ABD95254

SEQ ID NO: 175003 - RNA, 1413 nt, Artificial Sequence; identical to SEQ ID NO: 174475
  derived and/or modified CDS sequence (opt4) from neuraminidase__InfluenzaA__ABD95265

SEQ ID NO: 175004 - RNA, 1413 nt, Artificial Sequence; identical to SEQ ID NO: 174456
  derived and/or modified CDS sequence (opt4) from neuraminidase__InfluenzaA__ABD95276

SEQ ID NO: 175005 - RNA, 1413 nt, Artificial Sequence
  derived and/or modified CDS sequence (opt4) from neuraminidase__InfluenzaA__ABD95287
augaaccccaaccagaagaucaucaccaucggcagcaucagcguggccaucggcaucaucagccugaugcugcagaucggcaacaucaucagcaucugggccagccacagcauccagaccggcagccagaaccacaccggcgugugcaaccagagaaucaucaccuacgagaacagcaccugggugaaccacaccuacgugaacaucaacaacaccaacgugaucgccggcaaggacaagaccagcgugacccuggccggcaacagcagccugugcagcaucagcggcugggccaucuacaccaaggacaacagcaucagaaucggcagcaagggcgacguguucgugaucagagagcccuucaucagcugcagccaccuggagugcagaaccuucuuccugacccagggcgcccugcugaacgacaagcacagcaacggcaccgugaaggacagaagccccuacagagcccugaugagcugcccccugggcgaggcccccagccccuacaacagcaaguucgagagcguggccuggagcgccagcgccugccacgacggcaugggcuggcugaccaucggcaucagcggccccgacaacggcgccguggccgugcugaaguacaacggcaucaucaccgagaccaucaagagcuggaagaagcagauccugagaacccaggagagcgagugcgugugcgugaacggcagcugcuucaccaucaugaccgacggccccagcaacggcgccgccagcuacaagaucuucaagaucgagaagggcaaggugaccaagagcaucgagcugaacgcccccaacuuccacuacgaggagugcagcugcuaccccgacaccggcaccgugaugugcgugugcagagacaacuggcacggcagcaacagacccugggugagcuucaaccagaaccuggacuaccagaucggcuacaucugcagcggcguguucggcgacaaccccagacccaaggacggcgagggcagcugcaaccccgugaccguggacggcgccaacggcgugaagggcuucagcuacaaguacggcaacggcguguggaucggcagaaccaagagcaacagacugagaaagggcuucgagaugaucugggaccccaacggcuggaccgacaccgacagcgacuucagcgugaagcaggacgugguggccaucaccgacuggagcggcuacagcggcagcuucgugcagcaccccgagcugaccggccuggacugcaucagacccugcuucuggguggagcuggugagaggccugcccaaggagaacaccaccaucuggaccagcggcagcagcaucagcuucugcggcgugaacagcgacaccgccaacuggagcuggcccgacggcgccgagcugcccuucaccaucgacaaguga

SEQ ID NO: 175006 - RNA, 1413 nt, Artificial Sequence; identical to SEQ ID NO: 174456
  derived and/or modified CDS sequence (opt4) from neuraminidase__InfluenzaA__ABD95298

SEQ ID NO: 175007 - RNA, 1413 nt, Artificial Sequence
  derived and/or modified CDS sequence (opt4) from neuraminidase__InfluenzaA__ABD95309
augaaccccaaccagaagaucaucaccaucggcagcaucagcaucgccaucggcaugaucagccugaugcugcagaucggcaacaucaucagcaucugggccagccacagcauccagaccggcagccagaaccacaccggcgugugcaaccagagaaucaucaccuacgagaacagcaccugggugaaccacaccuacgugaacaucaacaacaccaacgugaucgccggcaaggacaagaccagcgugacccuggccggcaacagcagccugugcagcaucagcggcugggccaucuacaccaaggacaacagcaucagaaucggcagcaagggcgacguguucgugaucagagagcccuucaucagcugcagccaccuggagugcagaaccuucuuccugacccagggcgcccugcugaacgacaagcacagcaacggcaccgugaaggacagaagccccuacagagcccugaugagcugcccccugggcgaggcccccagccccuacaacagcaaguucgagagcguggccuggagcgccagcgccugccacgacggcaugggcuggcugaccaucggcaucagcggccccgacaacggcgccguggccgugcugaaguacaacggcaucaucaccgagaccaucaagagcuggaagaagcagauccugagaacccaggagagcgagugcgugugcgugaacggcagcugcuucaccaucaugaccgacggccccagcaacggcgccgccagcuacaagaucuucaagaucgagaagggcaaggugaccaagagcaucgagcugaacgcccccaacuuccacuacgaggagugcagcugcuaccccgacaccggcaccgugaugugcgugugcagagacaacuggcacggcagcaacagacccugggugagcuucaaccagaaccuggacuaccagaucggcuacaucugcagcggcguguucggcgacaaccccagacccaaggacggcgagggcagcugcaaccccgugaccguggacggcgccaacggcgugaagggcuucagcuacaaguacggcaacggcguguggaucggcagaaccaagugcaacagacugagaaagggcuucgagaugaucugggaccccaacggcuggaccgacaccgacagcgacuucagcgugaagcaggacgugguggccaucaccgacuggagcggcuacagcggcagcuucgugcagcaccccgagcugaccggccuggacugcaucagacccugcuucuggguggagcuggugagaggccugcccaaggagaacaccaccaucuggaccagcggcagcagcaucagcuucugcggcgugaacagcgacaccgccaacuggagcuggcccgacggcgccgagcugcccuucaccaucgacaaguga

SEQ ID NO: 175008 - RNA, 1413 nt, Artificial Sequence; identical to SEQ ID NO: 174456
  derived and/or modified CDS sequence (opt4) from neuraminidase__InfluenzaA__ABD95320

SEQ ID NO: 175009 - RNA, 1413 nt, Artificial Sequence; identical to SEQ ID NO: 174985
  derived and/or modified CDS sequence (opt4) from neuraminidase__InfluenzaA__ABD95331

SEQ ID NO: 175010 - RNA, 1413 nt, Artificial Sequence
  derived and/or modified CDS sequence (opt4) from neuraminidase__InfluenzaA__ABD95342
augaaccccaaccagaagaucaucaccaucggcagcaucugcauggccaucggcaucaucagccugauccugcagaucggcaacaucaucagcaucugggugagccacagcauccagaccggcagccagaaccacaccggcaucugcaaccagagaaucaucaccuacgagaacagcaccugggugaaccagaccuacgugaacaucaacaacaccaacgugguggccggcaaggacaccaccagcgugacccuggccggcaacagcagccugugccccgugagaggcugggccaucuacagcaaggacaacagcaucagaaucggcagcaagggcgacguguucgugaucagagagcccuucaucagcugcagccaccuggagugcagaaccuucuuccugacccagggcgcccugcugaacgacaagcacagcaacggcaccgugaaggacagaagccccuacagagcccugaugagcugccccaucggcgaggcccccagccccuacaacagcagauucgagagcguggccuggagcgccagcgccugccacgacggcaugggcuggcugaccaucggcaucagcggccccgacgacggcgccguggccgugcugaaguacaacggcaucaucaccgagaccaucaagagcuggagaaagagaauccugagaacccaggagagcgagugcgugugcaucaacggcagcugcuucaccaucaugaccgacggccccagcaacggccccgccagcuacagaaucuucaagaucgagaagggcaagaucaccaagagcaucgagcuggacgcccccaacagccacuacgaggagugcagcugcuaccccgacaccggcaccgugaugugcgugugcagagacaacuggcacggcagcaacagacccugggugagcuucaaccagaaccuggacuaccagaucggcuacaucugcagcggcguguucggcgacaaccccagacccaaggacggcaagggcagcugcggccccgugaccguggacggcgccgacggcgugaagggcuucagcuacagauacggcaacggcguguggaucggcagaaccaagagcaacagcagcagaaagggcuucgagaugaucugggaccccaacggcuggaccgacaccgacagcaacuuccuggugaagcaggacgugguggccaugaccgacuggagcggcuacagcggcagcuucgugcagcaccccgagcugaccggccuggacugcaugagacccugcuucuggguggagcugaucagaggcagacccagagagaagaccaccaucuggaccagcggcagcagcaucagcuucugcggcgugaacagcgacaccgugaacuggagcuggcccgacggcgccgagcugcccuucaccaucgacaaguga

SEQ ID NO: 175011 - RNA, 1413 nt, Artificial Sequence
  derived and/or modified CDS sequence (opt4) from neuraminidase__InfluenzaA__ABD95353
augaaccccaaccagaagaucaucaccaucggcagcaucugcauggccaucggcaucaucagccugauccugcagaucggcaacaucaucagcaucugggugagccacagcauccagaccggcagccagaaccacaccggcaucugcaaccagagaaucaucaccuacgagaacagcaccugggugaaccagaccuacgugaacaucagcaacaccaacgugguggccggcaaggacaccaccagcaugacccuggccggcaacagcagccugugccccaucagaggcugggccaucuacagcaaggacaacagcaucagaaucggcagcaagggcgacguguucgugaucagagagcccuucaucagcugcagccaccuggagugcagaaccuucuuccugacccagggcgcccugcugaacgacaagcacagcaacggcaccgugaaggacagaagccccuacagagcccugaugagcugccccaucggcgaggcccccagccccuacaacagcagauucgagagcguggccuggagcgccagcgccugccacgacggcaugggcuggcugaccaucggcaucagcggccccgacgacggcgccguggccgugcugaaguacaacggcaucaucaccgagaccaucaagagcuggagaaagcagauccugagaacccaggagagcgagugcgugugcgugaacggcagcugcuucaccaucaugaccgacggccccagcgacggccccgccagcuacagaaucuucaagaucgagaagggcaagaucaccaagagcaucgagcuggacgcccccaacagccacuacgaggagugcagcugcuaccccgacaccggcaccgugaugugcgugugcagagacaacuggcacggcagcaacagacccugggugagcuucaaccagaaccuggacuaccagaucggcuacaucugcagcggcguguucggcgacaaccccagacccaaggacggcaagggcagcugcgaccccgugaacguggacggcgccgacggcgugaagggcuucagcuacagauacggcaacggcguguggaucggcagaaccaagagcaacagcagcagaaagggcuucgagaugaucugggaccccaacggcuggaccgacaccgacagcaacuuccuggugaagcaggacgugguggccaugaccgacuggagcggcuacagcggcagcuucgugcagcaccccgagcugaccggccuggacugcaugagacccugcuucuggguggagcugaucagaggcagacccagagagaagaccaccaucuggaccagcggcagcagcaucagcuucugcggcgugaacagcgacaccgugaacuggagcuggcccgacggcgccgagcugcccuucaccaucgacaaguga

SEQ ID NO: 175012 - RNA, 1413 nt, Artificial Sequence; identical to SEQ ID NO: 174888
  derived and/or modified CDS sequence (opt4) from neuraminidase__InfluenzaA__ABE11660

SEQ ID NO: 175013 - RNA, 1413 nt, Artificial Sequence
  derived and/or modified CDS sequence (opt4) from neuraminidase__InfluenzaA__ABE11671
augaaccccaaccagaagaucaucaccaucggcagcaucagcaucgccaucggcaucaucagccugaugcugcagaucggcaacaucaucagcaucugggccagccacagcauccagaccggcagccagaaccacaccggcgugugcaaccagagaaucaucaccuacgagaacagcaccugggugaaccacaccuacgugaacaucaacaacaccaacgugguggccggcaaggacaagaccagcgugacccuggccggcaacagcagccugugcagcaucagcggcugggccaucuacaccaaggacaacagcaucagaaucggcagcaagggcgacguguucgugaucagagagcccuucaucagcugcagccaccuggagugcagaaccuucuuccugacccagggcgcccugcugaacgacaagcacagcaacggcaccgugaaggacagaagccccuacagagcccugaugagcugcccccugggcgaggcccccagccccuacaacagcaaguucgagagcguggccuggagcgccagcgccugccacgacggcaugggcuggcugaccaucggcaucagcggccccgacaacggcgccguggccgugcugaaguacaacggcaucaucaccgagaccaucaagagcuggaagaagcagauccugagaacccaggagagcgagugcgugugcgugaacggcagcugcuucaccaucaugaccgacggccccagcaacggcgccgccagcuacaagaucuucaagaucgagaagggcaaggugaacaagagcaucgagcugaacgcccccaacuuccacuacgaggagugcagcugcuaccccgacaccggcaccgugaugugcgugugcagagacaacuggcacggcagcaacagacccugggugagcuucaaccagaaccuggacuaccagaucggcuacaucugcagcggcguguucggcgacaaccccagacccaaggacggcgagggcagcugcaaccccgugaccguggacggcgccaacggcgugaagggcuucagcuacaaguacggcaacggcguguggaucggcagaaccaagagcaacagacugagaaagggcuucgagaugaucugggaccccaacggcuggaccgacaccgacagcgacuucagcgugaagcaggacgugguggccaucaccgacuggagcggcuacagcggcagcuucgugcagcaccccgagcugaccggccuggacugcaucagacccugcuucuggguggagcuggugagaggccugcccagagagaacaccaccaucuggaccagcggcagcagcaucagcuucugcggcgugaacagcgacaccgccaacuggagcuggcccgacggcgccgagcugcccuucaccaucgacaaguga

SEQ ID NO: 175014 - RNA, 1413 nt, Artificial Sequence
  derived and/or modified CDS sequence (opt4) from neuraminidase__InfluenzaA__ABE11682
augaaccccaaccagaagaucaucaccaucggcagcaucagcaucgccaucggcaucaucagccugaugcugcagaucggcaacaucaucagcaucugggccagccacagcauccagaccggcagccagaaccacaccggcaucugcaaccagagaaucaucaccuacgagaacagcaccugggugaaccacaccuacgugaacaucaacaacaccaacgugguggccggcgaggacaagaccagcgugacccuggccggcaacagcagccugugcagcaucagcggcugggccaucuacaccaaggacaacagcaucagaaucggcagcaagggcgacguguucgugaucagagagcccuucaucagcugcagccaccuggagugcagaaccuucuuccugacccagggcgcccugcugaacgacaagcacagcaacggcaccgugaaggacagaagccccuacagagcccugaugagcugcccccugggcgaggcccccagccccuacaacagcaaguucgagagcguggccuggagcgccagcgccugccacgacggcaugggcuggcugaccaucggcaucagcggccccgacaacggcgccguggccgugcugaaguacaacggcaucaucaccgagaccaucaagagcuggaagaagagaauccugagaacccaggagagcgagugcgugugcgugaacggcagcugcuucaccaucaugaccgacggccccagcaacggcgccgccagcuacaagaucuucaagaucgagaagggcaaggugaccaagagcaucgagcugaacgcccccaacuuccacuacgaggagugcagcugcuaccccgacaccggcaccgugaugugcgugugcagagacaacuggcacggcagcaacagacccugggugagcuucaaccagaaccuggacuaccagaucggcuacaucugcagcggcguguucggcgacaaccccagacccaaggacggcgagggcagcugcaaccccgugaccguggacggcgccgacggcgugaagggcuucagcuacaaguacggcaacggcguguggaucggcagaaccaagagcaacagacugagaaagggcuucgagaugaucugggaccccaacggcuggaccgacaccgacagcgacuucagcgugaagcaggacgugguggccaucaccgacuggagcggcuacagcggcagcuucgugcagcaccccgagcugaccggccuggacugcaucagacccugcuucuggguggagcuggugagaggccugcccagagagaacaccaccaucuggaccagcggcagcagcaucagcuucugcggcgugaacagcgacaccgccaacuggagcuggcccgacggcgccgagcugcccuucaccaucgacaaguga

SEQ ID NO: 175015 - RNA, 1413 nt, Artificial Sequence; identical to SEQ ID NO: 174456
  derived and/or modified CDS sequence (opt4) from neuraminidase__InfluenzaA__ABE11693

SEQ ID NO: 175016 - RNA, 1413 nt, Artificial Sequence; identical to SEQ ID NO: 174456
  derived and/or modified CDS sequence (opt4) from neuraminidase__InfluenzaA__ABE11704

SEQ ID NO: 175017 - RNA, 1413 nt, Artificial Sequence; identical to SEQ ID NO: 174456
  derived and/or modified CDS sequence (opt4) from neuraminidase__InfluenzaA__ABE11715

SEQ ID NO: 175018 - RNA, 1413 nt, Artificial Sequence; identical to SEQ ID NO: 174985
  derived and/or modified CDS sequence (opt4) from neuraminidase__InfluenzaA__ABE11726

SEQ ID NO: 175019 - RNA, 1413 nt, Artificial Sequence; identical to SEQ ID NO: 174990
  derived and/or modified CDS sequence (opt4) from neuraminidase__InfluenzaA__ABE11737

SEQ ID NO: 175020 - RNA, 1413 nt, Artificial Sequence; identical to SEQ ID NO: 174456
  derived and/or modified CDS sequence (opt4) from neuraminidase__InfluenzaA__ABE11815

SEQ ID NO: 175021 - RNA, 1413 nt, Artificial Sequence; identical to SEQ ID NO: 174985
  derived and/or modified CDS sequence (opt4) from neuraminidase__InfluenzaA__ABE11826

SEQ ID NO: 175022 - RNA, 1413 nt, Artificial Sequence; identical to SEQ ID NO: 174985
  derived and/or modified CDS sequence (opt4) from neuraminidase__InfluenzaA__ABE11837

SEQ ID NO: 175023 - RNA, 1413 nt, Artificial Sequence; identical to SEQ ID NO: 174985
  derived and/or modified CDS sequence (opt4) from neuraminidase__InfluenzaA__ABE11848

SEQ ID NO: 175024 - RNA, 1413 nt, Artificial Sequence; identical to SEQ ID NO: 174990
  derived and/or modified CDS sequence (opt4) from neuraminidase__InfluenzaA__ABE11859

SEQ ID NO: 175025 - RNA, 1413 nt, Artificial Sequence
  derived and/or modified CDS sequence (opt4) from neuraminidase__InfluenzaA__ABE11903
augaaccccaaccagaagaucaucaccaucggcagcaucagcauggccaucggcaucaucagccugauccugcagaucggcaacaucaucagcaucugggccagccacagcauccagaccggcagccagaacuacaccggcaucugcaaccagagaaucaucaccuacgagaacagcaccugggugaaccagaccuacgugaacaucaacaacaccaacgugguggccggcaaggacaagaccagcaugacccuggccggcaacagcagccugugccccaucagaggcugggccaucuacaccaaggacaacagcaucagaaucggcagcaagggcgacguguucgugaucagagagcccuucaucagcugcagccaccuggagugcagaaccuucuuccugacccagggcgcccugcugaacgacaagcacagcaacggcaccgugaaggacagaagccccuacagagcccugaugagcugcccccugggcgaggcccccagccccuacaacagcagauucgagagcguggccuggagcgccagcgccugccacgacggccugggcuggcugaccaucggcaucagcggccccgacaacggcgccguggccgugcugaaguacaacggcaucaucaccgagaccaucaagagcuggaagaagcagauccugagaacccaggagagcgagugcgugugcgugaacggcagcugcuucaccaucaugaccgacggccccagcaacggcgccgccagcuacagaaucuucaagaucgagaagggcagagugaccaagagcaucgagcuggacgcccccaacuaccacuacgaggagugcagcugcuaccccgacaccggcaccgugaugugcgugugcagagacaacuggcacggcagcaacagacccugggugagcuucaaccagaaccuggacuaccagaucggcuacaucugcagcggcguguucggcgacaaccccagacccaaggacggcgagggcagcugcaaccccgugaccguggacggcgccgacggcgugaagggcuucagcuacagauacggcaacggcguguggaucggcagaaccaagagcaacagacugagaaagggcuucgagaugaucugggaccccaacggcuggaccgacaccgacagcgacuucagcaugaagcaggacgugguggccaugaccgacuggagcggcuacagcggcagcuucgugcagcaccccgagcugaccggccuggacugcaugagacccugcuucuggguggagcuggugagaggccugcccagagagaacaccaccaucuggaccagcggcagcagcaucagcuucugcggcgugaacagcgagaccgccaacuggagcuggcccgacggcgccgagcugcccuucaccaucgacaaguga

SEQ ID NO: 175026 - RNA, 1413 nt, Artificial Sequence
  derived and/or modified CDS sequence (opt4) from neuraminidase__InfluenzaA__ABE11925
augaaccccaaccagaagaucaucaccaucggcagcaucagcaucgccaucggcaucaucagccugauccugcagaucggcaacaucaucagcaucugggccagccacagcauccagaccggcagccagaaccacaccggcaucugcaaccagagaaucaucaccuacgagaacagcaccugggugaaccagaccuacgugaacaucaacaacaccaacgugguggccggcaaggacaagaccagcaugacccuggccggcaacagcagccugugccccaucagaggcugggccaucuacaccaaggacaacagcaucagaaucggcagcaagggcgacguguucgugaucagagagcccuucaucagcugcagccaccuggagugcagaaccuucuuccugacccagggcgcccugcugaacgacaagcacagcaacggcaccgugaaggacagaagccccuacagagcccugaugagcugcccccugggcgaggcccccagccccuacaacagcagauucgagagcguggccuggagcgccagcgccugccacgacggccugggcuggcugaccaucggcaucagcggccccgacaacggcgccguggccgugcugaaguacaacggcaucaucaccgagaccaucaagagcuggaagaagagaauccugagaacccaggagagcgagugcgugugcaugaacggcagcugcuucaccaucaugaccgacggccccagcaacggcgccgccagcuacagaaucuucaagaucgagaagggcaaggugaccaagagcaucgagcuggacgcccccaacuaccacuacgaggagugcagcugcuaccccgacaccggcaccgugaugugcgugugcagagacaacuggcacggcagcaacagacccugggugagcuucaaccagaaccuggacuaccagaucggcuacaucugcagcggcguguucggcgacaaccccagacccaaggacggcgagggcagcugcaaccccgugaccgccgacggcgccgacggcgugaagggcuucagcuacagauacggcaacggcguguggaucggcagaaccaagagcaacagacugagaaagggcuucgagaugaucugggaccccaacggcuggaccgacaccgacagcgacuucagcaugaagcaggacaucguggccaugaccgacuggagcggcuacagcggcagcuucgugcagcaccccgagcugaccggccuggacugcaugagacccugcuucuggguggagcuggugagaggccugcccagagagaacaccaccaucuggaccagcggcagcagcaucagcuucugcggcgugaacagcgacaccgccaacuggagcuggcccgacggcgccgagcugcccuucaccaucgacaaguga

SEQ ID NO: 175027 - RNA, 1413 nt, Artificial Sequence
  derived and/or modified CDS sequence (opt4) from neuraminidase__InfluenzaA__ABE11952
augaaccccaaccagaagaucaucaccaucggcagcaucagcauggccaucggcaucaucagccugauccugcagaucggcaacaucaucagcaucugggccagccacagcauccagaccggcagccagaacuacaccggcaucugcaaccagagaaucaucaccuacgagaacagcaccugggugaaccagaccuacgugaacaucaacaacaccaacgugguggccggcaaggacaagaccagcaugacccuggccggcaacagcagccugugccccaucagaggcugggccaucuacaccaaggacaacagcaucagaaucggcagcaagggcgacguguucgugaucagagagcccuucaucagcugcagccaccuggagugcagaaccuucuuccugacccagggcgcccugcugaacgacaagcacagcaacggcaccgugaaggacagaagccccuacagagcccugaugagcugcccccugggcgaggcccccagccccuacaacagcagauucgagagcguggccuggagcgccagcgccugccacgacggccugggcuggcugaccaucggcaucagcggccccgacaacggcgccguggccgugcugaaguacaacggcaucaucaccgagaccaucaagagcuggaagaagcagauccugagaacccaggagagcgagugcgugugcgugaacggcagcugcuucaccaucaugaccgacggccccagcaacggcgccgccagcuacagaaucuucaagaucgagaagggcagagugaccaagagcaucgagcuggacgcccccaacuaccacuacgaggagugcagcugcuaccccgacaccggcaccgugaugugcgugugcagagacaacuggcacggcagcaacagacccugggugagcuucaaccagaaccuggacuaccagaucggcuacaucugcagcggcguguucggcgacaaccccagacccaaggacggcgagggcagcugcaaccccgugaccguggacggcgccgacggcgugaagggcuucagcuacagauacggcaacggcguguggaucggcagaaccaagagcaacagacugagaaagggcuucgagaugaucugggaccccaacggcuggaccgacaccgacagcgacuucagcaugaagcaggacgugguggccaugaccgacuggagcggcuacagcggcagcuucgugcagcaccccgagcugaccggccuggacugcaugagacccugcuucuggguggagcuggugagaggccugcccagagagaacaccaccaucuggaccagcggcagcagcaucagcuucugcggcgugaacagcgagaccgccgacuggagcuggcccgacggcgccgagcugcccuucaccaucgacaaguga

SEQ ID NO: 175028 - RNA, 1413 nt, Artificial Sequence
  derived and/or modified CDS sequence (opt4) from neuraminidase__InfluenzaA__ABE12035
augaaccccaaccagaagaucaucaccaucggcagcaucagcaucgccaucggcaucaucagccugauccugcagaucggcaacaucaucagcaucugggccagccacagcauccagaccggcagccagaaccacaccggcaucugcaaccagagaaucaucaccuacgagaacagcaccugggugaaccagaccuacgugaacaucaacaacaccaacgugguggccggcaaggacaagaccagcaugacccuggccggcaacagcagccugugccccaucagaggcugggccaucuacaccaaggacaacagcaucagaaucggcagcaagggcgacguguucgugaucagagagcccuucaucagcugcagccaccuggagugcagaaccuucuuccugacccagggcgcccugcugaacgacaagcacagcaacggcaccgugaaggacagaagccccuacagagcccugaugagcugcccccugggcgaggcccccagccccuacaacagcagauucgagagcguggccuggagcgccagcgccugccacgacggccugggcuggcugaccaucggcaucagcggccccgacaacggcgccguggccgugcugaaguacaacggcaucaucaccgagaccaucaagagcuggaagaagagaauccugagaacccaggagagcgagugcgugugcaugaacggcagcugcuucaccaucaugaccgacggccccagcaacggcgccgccagcuacagaaucuucaagaucgagaagggcagagugaccaagagcaucgagcuggacgcccccaacuaccacuacgaggagugcagcugcuaccccgacaccggcaccgugaugugcgugugcagagacaacuggcacggcagcaacagacccugggugagcuucaaccagaaccuggacuaccagaucggcuacaucugcagcggcguguucggcgacaaccccagacccaaggacggcgagggcagcugcaaccccgugaccguggacggcgccgacggcgugaagggcuucagcuacagauacggcaacggcguguggaucggcagaaccaagagcaacagacugagaaagggcuucgagaugaucugggaccccaacggcuggaccgacaccgacagcgacuucagcaugaagcaggacaucguggccaugaccgacuggagcggcuacagcggcagcuucgugcagcaccccgagcugaccggccuggacugcaugagacccugcuucuggguggagcuggugagaggccugcccagagagaacaccaccaucuggaccagcggcagcagcaucagcuucugcggcgugaacagcgacaccgccaacuggagcuggcccgacggcgccgagcugcccuucaccaucgacaaguga

SEQ ID NO: 175029 - RNA, 1410 nt, Artificial Sequence; identical to SEQ ID NO: 174790
  derived and/or modified CDS sequence (opt4) from neuraminidase__InfluenzaA__ABE12094

SEQ ID NO: 175030 - RNA, 1410 nt, Artificial Sequence; identical to SEQ ID NO: 174922
  derived and/or modified CDS sequence (opt4) from neuraminidase__InfluenzaA__ABE12126

SEQ ID NO: 175031 - RNA, 1413 nt, Artificial Sequence; identical to SEQ ID NO: 174456
  derived and/or modified CDS sequence (opt4) from neuraminidase__InfluenzaA__ABE12263

SEQ ID NO: 175032 - RNA, 1410 nt, Artificial Sequence
  derived and/or modified CDS sequence (opt4) from neuraminidase__InfluenzaA__ABE12626
augaaccccaaccagaagaucaucaccaucggcagcgugagccugaccaucgccaccaucugcuuccugaugcagaucgccauccuggugaccaccgugacccugcacuucaagcaguacgagugcgacagccccgccaacaaccaggugaugcccugcgagcccaucaucaucgagagaaacaucaccgagaucguguaccugaccaacaccaccaucgagaaggagaucugccccaagcugguggaguacagaaaguggagcaagccccagugcaagaucaccggcuucgcccccuucagcaaggacaacagcaucagacugagcgccggcggcgacaucugggugaccagagagcccuacgugagcugcgaccccggcaagugcuaccaguucgcccugggccagggcaccacccuggacaacaagcacagcaacgacaccauccacgacagaaucccccacagaacccugcugaugaacgagcugggcgugcccuuccaccugggcaccagacaggugugcaucgccuggagcagcagcagcugccacgacggcaaggccuggcugcacgugugcgugaccggcgacgacaagaacgccaccgccagcuucaucuacgacggcagacugguggacagcaucggcagcuggagccagaacauccugagaacccaggagagcgagugcgugugcaucaacggcaccugcaccguggugaugaccgacggcagcgccagcggcagagccgacaccagaauccuguucaucgaggagggcaagaucgugcacaucagcccccugagcggcagcgcccagcacguggaggagugcagcugcuaccccagauaccccggcgugagaugcaucugcagagacaacuggaagggcagcaacagacccgugguggacaucaacgugaaggacuacagcaucgacagcagcuacgugugcagcggccuggugggcgacacccccagaaacaacgacagaagcagcaacagcuacugcagaaaccccaacaacgagagaggcaaccacggcgugaagggcugggccuucgacgacggcaacgacguguggaugggcagaaccaucagcaaggacagcagaagcggcuacgagaccuucaaggugaucggcggcuggagcacccccaacagcaagagccagaucaacagacaggugaucguggacagcgacaacagaagcggcuacagcggcaucuucagcguggagggcaagagcugcaucaacagaugcuucuacguggagcugaucagaggcagagagcaggagaccagagugugguggaccagcaacagcaucgugguguucugcggcaccagcggcaccuacggcaccggcagcuggcccgacggcgccgacaucaaccugaugcccaucuga

SEQ ID NO: 175033 - RNA, 1410 nt, Artificial Sequence
  derived and/or modified CDS sequence (opt4) from neuraminidase__InfluenzaA__ABE12650
augaaccccaaccagaagaucaucaccaucggcagcgugagccugaccaucgccaccaucugcuuccugaugcagaucgccauccuggugaccaccgugacccugcacuucaagcaguacgagugcaacagcccccccaacaaccaggugaugcugugcgagcccaccaucaucgagagaaacaucaccgagaucguguaccugaccaacaccaccaucgagaaggagaucugccccaagcuggccgaguacagaaacuggagcaagccccagugcaagaucaccggcuucgcccccuucagcaaggacaacagcaucagacugagcgccggcggcgacaucugggugaccagagagcccuacgugagcugcgaccccgacaagugcuaccaguucgcccugggccagggcaccacccugaacaacagacacagcaacgacaccgugcacgacagaacccccuacagaacccugcugaugaacgagcugggcgugcccuuccaccugggcaccaagcaggugugcaucgccuggagcagcagcagcugccacgacggcaaggccuggcugcacgugugcgugaccggccacgacgagaacgccaccgccagcuucaucuacgacggcagacugguggacagcaucggcagcuggagcaagaagauccugagaacccaggagagcgagugcgugugcaucaacggcaccugcaccguggugaugaccgacggcagcgccagcggcagagccgacaccaagauccuguucaucaaggagggcaagaucgugcacaucagcccccugcugggcagcgcccagcacguggaggagugcagcugcuaccccagauaccccggcgugagaugcgugugcagagacaacuggaagggcagcaacagacccaucguggacaucaacgugaaggacuacagcaucgugagcagcuacgugugcagcggccuggugggcgacacccccagaaagaacgacagcagcagcagcagccacugccugaaccccaacaacgaggagggcggccacggcgugaagggcugggccuucgacgacggcaacgacguguggaugggcagaaccaucagcgagaagcugagaagcggcuacgagaccuucaaggugaucgagggcuggagcaagcccaacagcaagcugcagaucaacagacaggugaucguggacagaggcaacagaagcggcuacagcggcaucuucagcguggagggcaagagcugcaucaacagaugcuucuacguggagcugaucagaggcagaaagcaggagaccgaggugugguggaccagcaacagcaucgugguguucugcggcaccagcggcaccuacggcaccggcagcuggcccgacggcgccgacaucaaccugaugcccaucuga

SEQ ID NO: 175034 - RNA, 1410 nt, Artificial Sequence
  derived and/or modified CDS sequence (opt4) from neuraminidase__InfluenzaA__ABE13095
augaaccccaaccagaagaucaucaccaucggcagcgugagccugaccaucaccaccaucugcuuccugaugcagaucgccauccuggugaucaccgugacccugcacuucaagcagugcgagugcaacagcccccccaacaaccaggugaugcugugcgagcccaccaucaucgagagaaacaucaccgagaucguguaccugaccaacaccaccaucgagaaggagaucugccccaagcuggccgaguacagaaacuggagcaagccccagugcaagaucaccggcuucgcccccuucagcaaggacaacagcaucagacugagcgccggcggcgacaucugggugaccagagagcccuacgugagcugcgaccccggcaagugcuaccaguucgcccugggccagggcaccacccugaacaacagacacagcaacgacaccgugcacgacagaacccccuacagaacccugcugaugaacgagcugggcgugcccuuccaccugggcaccaagcaggugugcaucgccuggagcagcagcagcugccacgacggcaaggccuggcugcacgugugcgugaccggccacaacgagaacgccaccgccagcuucaucuacgacggcagacugguggacagcaucggcagcuggagcaagaacauccugagaacccaggagagcgagugcgugugcaucaacggcaccugcaccguggugaugaccgacggcagcgccagcggcagagccgacaccaagauccuguucaucgaggagggcaagaucgugcacaucagcccccugagcggcagcgcccagcacguggaggagugcagcugcuaccccagauaccccggcgugagaugcgugugcagagacaacuggaagggcagcaacagacccaucguggacaucaacgugaaggacuacagcaucgugagcagcuacgugugcagcggccuggugggcgacacccccagaaagaacgacggcagcagcagcagcuacugccuggaccccaacaacgaggagggcggccacggcgugaagggcugggccuucgacgacggcaacgacguguggaugggcagaaccaucagcgagaagcugagaagcggcuacgagaccuucaaggugaucggcggcuggagcaagcccaacagcaagcugcagaucaacagacaggugaucguggacaagggcaacagaagcggcuacagcggcaucuucagcguggagggcaagagcugcaucaacagaugcuucuacguggagcugaucagaggcagaaagcaggagaccgaggugugguggaccagcaacagcaucgugguguucugcggcaccagcggcaccuacggcaccggcagcuggcccgacggcgccgacaucaaccugaugcccaucuga

SEQ ID NO: 175035 - RNA, 1410 nt, Artificial Sequence; identical to SEQ ID NO: 174186
  derived and/or modified CDS sequence (opt4) from neuraminidase__InfluenzaA__ABE13332

SEQ ID NO: 175036 - RNA, 1410 nt, Artificial Sequence; identical to SEQ ID NO: 174186
  derived and/or modified CDS sequence (opt4) from neuraminidase__InfluenzaA__ABE13558

SEQ ID NO: 175037 - RNA, 1410 nt, Artificial Sequence
  derived and/or modified CDS sequence (opt4) from neuraminidase__InfluenzaA__ABE13642
augaaccccaaccagaagaucaucaccaucggcagcgugagccugaccaucgccaccaucugcuuccugaugcagaucgccauccuggugaccaccgugacccugcacuucaagcaguacgagugcaacagcccccccaacaaccaggugaugcugugcgagcccaccaucaucgagagaaacaucaccgagaucguguaccugaccaacaccaccaucgagaaggagaucugccccaagcuggccgaguacagaaacuggagcaagccccagugcaagaucaccggcuucgcccccuucagcaaggacaacagcaucagacugagcgccggcggcgacaucugggugaccagagagcccuacgugagcugcgaccccggcaagugcuaccaguucgcccugggccagggcaccacccugaacaacagacacagcaacgacaccgugcacgagagaacccccuacagaacccugcugaugaacgagcugggcgugcccuuccaccugggcaccaagcaggugugcaucgccuggagcagcagcagcugccacgacggcaaggccuggcugcacgugugcgugaccggccacgacgagaacgccaccgccagcuucaucuacaacggcagacugguggacagcaucggcagcuggagcaagaacauccugagaacccaggagagcgagugcgugugcaucaacggcaccugcaccguggugaugaccgacggcagcgccagcggcagagccgacaccaagauccuguucaucgaggagggcaagaucgugcacaucagcccccugagcggcagcgcccagcacguggaggagugcagcugcuaccccagauaccccggcgugagaugcgugugcagagacaacuggaagggcagcaacagacccaucguggacaucaacgugaaggacuacagcaucgugagcagcuacgugugcagcggccuggugggcgacacccccagaaagaacgacagcagcagcagcagccacugccugaaccccaacaacgaggagggcggccacggcgugaagggcugggccuucgacgacggcaacgacguguggaugggcagaaccaucagcgagaagcugagaagcggcuacgagaccuucaaggugaucggcggcuggagcaagcccaacagcaagcugcagaucaacagacaggugaucguggacagaggcaacagaagcggcuacagcggcaucuucagcguggagggcaagagcugcaucaacagaugcuucuacguggagcugaucagaggcagaaagcaggagaccgaggugugguggaccagcaacagcaucgugguguucugcggcaccagcggcaccuacggcaccggcagcuggcccgacggcgccgacaucaaccugaugcccaucuga

SEQ ID NO: 175038 - RNA, 1410 nt, Artificial Sequence
  derived and/or modified CDS sequence (opt4) from neuraminidase__InfluenzaA__ABE13668
augaaccccaaccagaagaucaucaccaucggcagcgugagccugaccaucgccaccaucugcuuccugaugcagaucgccauccuggugaccaccgugacccugcacuucaagcaguacgagugcaacagcccccccaacaaccaggugaugcugugcgagcccaccaucaucgagagaaacaucaccgagaucguguaccugaccaacaccaccaucgagaaggagaucugccccaagcuggccgaguacagaaacuggagcaagccccagugcaagaucaccggcuucgcccccuucagcaaggacaacagcaucagacugagcgccggcggcgacaucugggugaccagagagcccuacgugagcugcgaccccggcaagugcuaccaguucgcccugggccagggcaccacccugaacaacagacacagcaacgacaccgugcacgacagaacccccuacagaacccugcugaugaacgagcugggcgugcccuuccaccugggcaccaagcaggugugcaucgccuggagcagcagcagcugccacgacggcaaggccuggcugcacgugugcgugaccggccacgacgagaacgccaccgccagcuucaucuacgacggcagacugguggacagcaucggcagcuggagcaagaacauccugagaacccaggagagcgagugcgugugcaucaacggcaccugcaccguggugaugaccgacggcagcgccagcggcagagccgacaccaagauccuguucaucgaggagggcaagaucgugcacaucagcccccugagcggcagcgcccagcacguggaggagugcagcugcuaccccagauaccccggcgugagaugcgugugcagagacaacuggaagggcagcaacagacccaucguggacaucaacgugaaggacuacagcaucgugagcagcuacgugugcagcggccuggugggcgacacccccagaaagaacgacagcagcagcagcagccacugccugaaccccaacaacgaggagggcggccacggcgugaagggcugggccuucgacgacggcaacgacguguggaugggcagaaccaucagcgagaagcugagaagcggcuacgagaccuucaaggugaucggcggcuggagcaagcccaacagcaagcugcagaucaacagacaggugaucguggacagaggcaacagaagcggcuacagcggcaucuucagcguggagggcaagagcugcaucaacagaugcuucuacguggagcugaucagaggcagaaagcaggagaccgaggugugguggaccagcaacagcaucgugguguucugcggcaccagcggcaccuacggcaccggcagcuggcccgacggcgccgacaucaaccugaugcccaucuga

SEQ ID NO: 175039 - RNA, 1410 nt, Artificial Sequence
  derived and/or modified CDS sequence (opt4) from neuraminidase__InfluenzaA__ABE13836
augaaccccaaccagaagaucaucaccaucggcagcgugagccugaccaucgccaccaucugcuuccugaugcagaucgccauccuggugaccaccgugacccugcacuucaagcaguacgagugcaacagccugcccaacaaccaggugaugcugugcgagcccaccaucaucgagagaaacaucaccgagaucguguaccugaccaacaccaccaucgagaaggagaucugccccaagcuggccgaguacagaaacuggagcaagccccagugcaagaucaccggcuucgcccccuucagcaaggacaacagcaucagacugagcgccggcggcgacaucugggugaccagagagcccuacgugagcugcgaccccggcaagugcuaccaguucgcccugggccagggcaccacccugaacaacagacacagcaacgacaccgugcacgacagaacccccuacagaacccugcugaugaacgagcugggcgugcccuuccaccugggcaccaagcaggugugcaucgccuggagcagcagcagcugccacgacggcaaggccuggcugcacgugugcgugaccggccacgacgagaacgccaccgccagcuucaucuacgacggcagacugguggacagcaucggcagcuggagcaagaacauccugagaacccaggagagcgagugcgugugcaucaacggcaccugcaccguggugaugaccgacggcagcgccagcggcagagccgacaccaagauccuguucaucgaggagggcaagaucgugcacaucagcccccugagcggcagcgcccagcacguggaggagugcagcugcuaccccagauaccccggcgugagaugcgugugcagagacaacuggaagggcagcaacagacccaucguggacaucaacgugaaggacuacagcaucgugagcagcuacgugugcagcggccuggugggcgacacccccagaaagaacgacagcagcagcagcagccacugccugaaccccaacaacgaggagggcggccacggcgugaagggcugggccuucgacgacggcaacgacguguggaugggcagaaccaucagcgagaagcugagaagcggcuacgagaccuucaaggugaucggcggcuggagcaagcccaacagcaagcugcagaucaacagacaggugaucguggacagaggcaacagaagcggcuacagcggcaucuucagcguggagggcaagagcugcaucaacagaugcuucuacguggagcugaucagaggcagaaagcaggagaccgaggugugguggaccagcaacagcaucgugguguucugcggcaccagcggcaccuacggcaccggcagcuggcccgacggcgccgacaucaaccugaugcccaucuga

SEQ ID NO: 175040 - RNA, 1410 nt, Artificial Sequence
  derived and/or modified CDS sequence (opt4) from neuraminidase__InfluenzaA__ABE14033
augaaccccaaccagaagaucaucaccaucggcagcgugagccugaccaucgccaccaucugcuuccugaugcagaucgccauccuggugaccaccgugacccugcacuucaagcaguacgagugcaacagcccccccaacaaccaggugaugcugugcgagcccaccaucaucgagagaaacaucaccgagaucguguaccugaccaacaccaccaucgagaaggagaucugccccaagcuggccgaguacagaaacuggagcaagccccagugcaagaucaccggcuucgcccccuucagcaaggacaacagcaucagacugagcgccggcggcgacaucugggugaccagagagcccuacgugagcugcgaccccggcaagugcuaccaguucgcccugggccagggcaccacccugaacaacagacacagcaacgacaccgugcacgacagaacccccuacagaacccugcugaugaacgagcugggcgugcccuuccaccugggcaccaagcaggugugcaucgccuggagcagcagcagcugccacgacggcaaggccuggcugcacgugugcgugaccggccacgacgagaacgccaccgccagcuucaucuacgacggcagacugguggacagcaucggcagcuggagcaagaacauccugagaacccaggagagcgagugcgugugcaucaacggcaccugcaccguggugaugaccgacggcagcgccagcggcagagccgacaccaagauccuguucaucgaggagggcaagaucgugcacaucagcccccugagcggcagcgcccagcacguggaggagugcagcugcuaccccagauaccccggcgugagaugcgugugcagagacaacuggaagggcagcaacagacccaucguggacaucaacgugaaggacuacagcaucgugagcagcuacgugugcagcggccuggugggcgacacccccagaaagaacgacagcagcagcagcagcuacugccugaaccccaacaacgaggagggcggccacggcgugaagggcugggccuucgacgacggcaacgacguguggaugggcagaaccaucagcgagaagcugagaagcggcuacgagaccuucaaggugaucggcggcuggagcaagcccaacagcaagcugcagaucaacagacaggugaucguggacagaggcaacagaagcggcuacagcggcaucuucagcguggagggcaagagcugcaucaacagaugcuucuacguggagcugaucagaggcagaaagcaggagaccgaggugugguggaccagcaacagcaucgugguguucugcggcaccagcggcaccuacggcaccggcagcuggcccgacggcgccgacaucaaccugaugcccaucuga

SEQ ID NO: 175041 - RNA, 1410 nt, Artificial Sequence
  derived and/or modified CDS sequence (opt4) from neuraminidase__InfluenzaA__ABE14055
augaaccccaaccagaagaucaucaccaucggcagcgugagccugaccaucgccaccaucugcuuccugaugcagaucgccauccuggugaccaccgugacccugcacuucaagcaguacgagugcaacagcccccccaacaaccaggugaugcugugcgagcccaccaucaucgagagaaacaucaccgagaucguguaccugaccaacaccaccaucgagaaggagaucugccccaagcuggccgaguacagaaacuggagcaagccccagugcaagaucaccggcuucgcccccuucagcaaggacaacagcaucagacugagcgccggcggcgacaucugggugaccagagagcccuacgugagcugcgaccccgacaagugcuaccaguucgcccugggccagggcaccacccugaacaacagacacagcaacgacaccgugcacgacagaacccccuacagaacccugcugaugaacgagcugggcgugcccuuccaccugggcaccaagcaggugugcaucgccuggagcagcagcagcugccacgacggcaaggccuggcugcacgugugcgugaccggccacgacgagaacgccaccgccagcuucaucuacgacggcagacugguggacagcaucagcagcuggagcaagaacauccugagaacccaggagagcgagugcgugugcaucaacggcaccugcaccguggugaugaccgacggcagcagcagcggcagagccgacaccaagauccuguucaucgaggagggcaagaucgugcacaucagcccccugagcggcagcgcccagcacguggaggagugcagcugcuaccccagauaccccggcgugagaugcgugugcagagacaacuggaagggcagcaacagacccaucguggacaucaacgugaaggacuacagcaucgugagcagcuacgugugcagcggccuggugggcgacacccccagaaagaacgacagcagcagcagcagcuacugccugaaccccaacaacgaggagggcggccacggcgugaagggcugggccuucgacgacggcaacgacguguggaugggcagaaccaucagcgagaagcugagaagcggcuacgagaccuucaaggugaucggcggcuggagcaagcccaacagcaagcugcagaucaacagacaggugaucguggacagaggcaacagaagcggcuacagcggcaucuucagcguggagggcaagagcugcgugaacagaugcuucuacguggagcugaucagaggcagaaagcaggagaccgaggugugguggaccagcaacagcaucgugguguucugcggcaccagcggcaccuacggcaccggcagcuggcccgacggcgccgacaucaaccugaugcccaucuga

SEQ ID NO: 175042 - RNA, 1410 nt, Artificial Sequence
  derived and/or modified CDS sequence (opt4) from neuraminidase__InfluenzaA__ABE14857
augaaccccaaccagaagaucaucaccaucggcagcgugagccugaccaucgccaccaucugcuuccugaugcagaucgccauccuggugaccaccgugacccugcacuucaagcaguacgagugcaacagcccccccaacaaccaggugaugcugugcgagcccaccaucaucgagagaaacaccaccgagaucguguaccugaccaacaccaccaucgagaaggagaucugccccaagcuggccgaguacagaaacuggagcaagccccagugcaagaucaccggcuucgcccccuucagcaaggacaacagcaucagacugagcgccggcggcgacaucugggugaccagagagcccuacgugagcugcgaccccggcaagugcuaccaguucgcccugggccagggcaccacccugaacaacagacacagcaacgacaccgugcacgacagaacccccuacagaacccugcugaugaacgagcugggcgugcccuuccaccugggcaccaagcaggugugcaucgccuggagcagcagcagcugccacgacggcaaggccuggcugcacgugugcgugaccggccacgacgagaacgccaccgccagcuucaucuacgacggcagacugguggacagcaucggcagcuggagcaagaacauccugagaacccaggagagcgagugcgugugcaucaacggcaccugcaccguggugaugaccgacggcagcgccagcggcagagccgacaccaagauccuguucaucgaggagggcaagaucgugcacaucagcccccugagcggcagcgcccagcacguggaggagugcagcugcuaccccagauaccccggcgugagaugcgugugcagagacaacuggaagggcagcaacagacccaucguggacaucaacgugaaggacuacagcaucgugagcagcuacgugugcagcggccuggugggcgacacccccagaaagaacgacagcagcagcagcagcuacugccugaaccccaacaacgaggagggcggccacggcgugaagggcugggccuucgacgacggcaacgacguguggaugggcagaaccaucagcgagaagcugagaagcggcuacgagaccuucaaggugaucggcggcuggagcaagcccaacagcaagcugcagaucaacagacaggugaucguggacagaggcaacagaagcggcuacagcggcaucuucagcguggagggcaagagcugcaucaacagaugcuucuacguggagcugaucagaggcagaaagcaggagaccgaggugugguggaccagcaacagcaucgugguguucugcggcaccagcggcaccuacggcaccggcagcuggcccgacggcgccgacaucaaccugaugcccaucuga

SEQ ID NO: 175043 - RNA, 1410 nt, Artificial Sequence; identical to SEQ ID NO: 175040
  derived and/or modified CDS sequence (opt4) from neuraminidase__InfluenzaA__ABE15594

SEQ ID NO: 175044 - RNA, 1413 nt, Artificial Sequence
  derived and/or modified CDS sequence (opt4) from neuraminidase__InfluenzaA__ABE26994
augaaccccaaccagaagaucaucaccaucggcagcaucagcaucgccaucggcaucaucagccugauccugcagaucggcaacaucaucagcaucugggccagccacagcauccagaccggcagccagaaccacaccggcaucugcaaccagagaaucaucaccuacgagaacagcaccugggugaaccagaccuacgugaacaucaacaacaccaacgugguggccggcaaggacaagaccagcaugacccuggccggcaacagcagccugugccccaucagaggcugggccaucuacaccaaggacaacagcaucagaaucggcagcaagggcgacguguucgugaucagagagcccuucaucagcugcagccaccuggagugcagaaccuucuuccugacccagggcgcccugcugaacgacaagcacagcaacggcaccgugaaggacagaagccccuacagagcccugaugagcugcccccugggcgaggcccccagccccuacaacagcagauucgagagcguggccuggagcgccagcgccugccacgacggccugggcuggcugaccaucggcaucagcggccccgacaacggcgccguggccgugcugaaguacaacggcaucaucaccgagaccaucaagagcuggaagaagagaauccugagaacccaggagagcgagugcgugugcaugaacggcagcugcuucaccaucaugaccgacggccccagcaacggcgccgccagcuacagaaucuucaagaucgagaagggcagagugaccaagagcaucgagcuggacgcccccaacuaccacuacgaggagugcagcugcuaccccgacaccggcaccgugaugugcgugugcagagacaacuggcacagcagcaacagacccugggugagcuucaaccagaaccuggacuaccagaucggcuacaucugcagcggcguguucggcgacaaccccagacccaaggacggcgagggcagcugcaaccccgugaccguggacggcgccgacggcgugaagggcuucagcuacagauacggcaacggcguguggaucggcagaaccaagagcaacagacugagaaagggcuucgagaugaucugggaccccaacggcuggaccgacaccgacagcgacuucagcaugaagcaggacaucguggccaugaccgacuggagcggcuacagcggcagcuucgugcagcaccccgagcugaccggccuggacugcaugagacccugcuucuggguggagcuggugagaggccugcccagagagaacaccaccaucuggaccagcggcagcagcaucagcuucugcggcgugaacagcgacaccgccaacuggagcuggcccgacggcgccgagcugcccuucaccaucgacaaguga

SEQ ID NO: 175045 - RNA, 1350 nt, Artificial Sequence
  derived and/or modified CDS sequence (opt4) from neuraminidase__InfluenzaA__ABE97641
augaaccccaaccagaagaucaucaccaucggcagcaucugcauggugaucggcaucaucagccugaugcugcagaucggcaacaugaucagcaucugggugagccacagcauccagaccuggaaccagcaccaggccgagagcaucagcaacaccaacccccugaccgagaaggccguggccagcgugacccuggccggcaacagcagccugugccccaucagaggcugggccgugcacagcaaggacaacagcaucagaaucggcagcaagggcgacguguucgugaucagagagcccuucaucagcugcagccaccuggagugcagaaccuucuuccugacccagggcgcccugcugaacgacaagcacagcaacggcaccgugaaggacagaagcccccacagaacccugaugagcugccccgugggcgaggcccccagccccuacaacagcagauucgagagcguggccuggagcgccagcgccugccacgacggcaccagcuggcugaccaucggcaucagcggccccgacaacggcgccguggccgugcugaaguacaacggcaucaucaccgacaccaucaagagcuggagaaacaacauccugagaacccaggagagcgagugcgccugcgugaacggcagcugcuucaccgugaugaccgacggccccagcaacggccaggccagcuacaagaucuucaagauggagaagggcaagguggugaagagcguggagcuggacgcccccaacuaccacuacgaggagugcagcugcuaccccgacgccggcgagaucaccugcgugugcagagacaacuggcacggcagcaacagacccuggaucagcuucaaccagaaccuggaguaccagaucggcuacaucugcagcggcguguucggcgacaaccccagacccaacgacggcaccggcagcugcggccccaugagccccaacggcgccuacggcgugaagggcuucagcuucaaguacggcaacggcguguggaucggcagaaccaagagcaccaacagcagaagcggcuucgagaugaucugggaccccaacggcuggaucggcaccgacagcagcuucagcgugaagcaggacaucguggccaucaccgacuggagcggcuacagcggcagcuucgugcagcaccccgagcugaccggccuggacugcaucagacccugcuucuggguggagcugaucagaggcagacccaaggagagcaccaucuggaccagcggcagcagcaucagcuucugcggcgugaacagcgacaucgugagcuggagcuggcccgacggcgccgagcugcccuucaccaucgacaaguga

SEQ ID NO: 175046 - RNA, 1350 nt, Artificial Sequence
  derived and/or modified CDS sequence (opt4) from neuraminidase__InfluenzaA__ABE97642
augaaccccaaccagaagaucaucaccaucggcagcaucugcauggugaucggcauggugagccugaugcugcagaucggcaacaugaucagcaucuggcugagccacagcauccagaccggcaaccagcaccaggccgagagcaucagcaacaacaaccugcugaccgagaacgccguggccagcgugacccuggccggcaacagcagccugugccccaucagaggcugggccgugcacagcaaggacaacagcaucagaaucggcagcaagggcgacguguucgugaucagagagcccuucaucagcugcagccaccuggagugcagaaccuucuuccugacccagggcgcccugcugaacgacaagcacagcaacggcaccgugaaggacagaagcccccacagaacccugaugagcugccccgugggcgaggcccccagccccuacaacagcagauucgagagcguggccuggagcgccagcgccugccacgacggcaucagcuggcugaccaucggcaucagcggccccgacaacggcgccguggccgugcugaaguacaacggcaucaucaccgacaccaucaagagcuggagaaacaacauccugagaacccaggagagcgagugcgccugcgugaacggcagcugcuucaccgugaugaccgacggccccagcaacggccaggccagcuacaagaucuucaagauggagaagggcaagguggugaagagcguggagcuggacgcccccaacuaccacuacgaggagugcagcugcuaccccgacgccggcgagaucaccugcgugugcagagacaacuggcacggcagcaacagacccugggugagcuucaaccagaaccuggaguaccagaucggcuacaucugcagcggcguguucggcgacaaccccagacccaacgacggcaccggcagcugcggccccaugagccccaacggcgccuacggcgugaagggcuucagcuucaaguacggcaacggcguguggaucggcagaaccaagagcaccaacagcagaagcggcuucgagaugaucugggaccccaacggcuggaccggcaccgacagcagcuucagcgugaagcaggacaucguggccaucaccgacuggagcggcuacagcggcagcuucgugcagcaccccgagcugaccggccuggacugcaucagacccugcuucuggguggagcugaucagaggcagacccaaggagagcaccaucuggaccagcggcagcagcaucagcuucugcggcgugaacggcgacaccgugagcuggagcuggcccgacggcgccgagcugcccuucaucaucgacaaguga

SEQ ID NO: 175047 - RNA, 1350 nt, Artificial Sequence
  derived and/or modified CDS sequence (opt4) from neuraminidase__InfluenzaA__ABE97644
augaaccccaaccagaagaucaucaccaucggcagcaucugcauggugaucggcaucgugagccugaugcugcagaucggcaacaugaucagcaucugggugagccacagcauccagaccggcaaccagcaccaggccgagagcaucagcaacaccaacccccugaccgagaaggccguggccagcgugacccuggccggcaacagcagccugugccccaucagaggcugggccgugcacagcaaggacaacaacaucagaaucggcagcaagggcgacguguucgugaucagagagcccuucaucagcugcagccaccuggagugcagaaccuucuuccugacccagggcgcccugcugaacgacaagcacagcaacggcaccgugaaggacagaagcccccacagaacccugaugagcugccccgugggcgaggcccccagccccuacaacagcagauucgagagcguggccuggagcgccagcgccugccacgacggcaccagcuggcugaccaucggcaucagcggccccgacaacggcgccguggccgugcugaaguacaacggcaucaucaccgacaccaucaagagcuggagaaacaacauccugagaacccaggagagcgagugcgccugcgugaacggcagcugcuucaccgugaugaccgacggccccagcaacggccaggccagcuacaagaucuucaagauggagaagggcaagguggugaagagcguggagcuggacgcccccaacuaccacuacgaggagugcagcugcuaccccgacgccggcgagaucaccugcgugugcagagacaacuggcacggcagcaacagacccugggugagcuucaaccagaaccuggaguaccagaucggcuacaucugcagcggcguguucggcgacaaccccagacccaacgacggcaccggcagcugcggccccaugagccccaacggcgccuacggcgugaagggcuucagcuucaaguacggcaacggcguguggaucggcagaaccaagagcaccaacagcagaagcggcuucgagaugaucugggaccccaacggcuggaccggcaccgacagcagcuucagcgugaagcaggacaucguggcccugaccgacuggagcggcuacagcggcagcuucgugcagcaccccgagcugaccggccuggacugcaucagacccugcuucuggguggagcugaucagaggcagacccaaggagagcaccaucuggaccagcggcagcagcaucagcuucugcggcgugaacagcgacaccgugagcuggagcuggcccgacggcgccgagcugcccuucaccaucgacaaguga

SEQ ID NO: 175048 - RNA, 1350 nt, Artificial Sequence
  derived and/or modified CDS sequence (opt4) from neuraminidase__InfluenzaA__ABE97645
augaaccccaaccagaagaucaucaccaucggcagcaucugcauggugaucggcaccgugagccugaugcugcagaucggcaacaugaucagcaucugggugagccacagcauccagaccggcaaccagcaccaggccgagcccaccagcagcaccaacccccugaccgagaaggccguggccagcgugacccuggccggcaacagcagccugugccccaucagaggcugggccauccacagcaaggacaacagcaucagaaucggcagcaagggcgacguguucgugaucagagagcccuucaucagcugcagccaccuggagugcagaaccuucuuccugacccagggcgcccugcugaacgacaagcacagcaacggcaccgugaaggacagaagcccccacagaacccugaugagcugccccgugggcgaggcccccagccccuacaacagcagauucgagagcguggccuggagcgccagcgccugccacgacggcaccagcuggcugaccaucggcaucagcggccccgacaacggcgccguggccgugcugaaguacaacggcaucaucaccgacaccaucaagagcuggagaaacaacauccugagaacccaggagagcgagugcgccugcgugaacggcagcugcuucaccgugaugaccgacggccccagcaacggccaggccagcuacaagaucuucaagauggagaagggcaagguggugaagagcguggagcuggacgcccccaacuaccacuacgaggagugcagcugcuaccccgacgccggcgagaucaccugcgugugcagagacaacuggcacggcagcaacagacccugggugagcuucaaccagaaccuggaguaccagaucggcuacaucugcagcggcguguucggcgacaaccccagacccaacgacggcaccggcagcugcggccccaugagccccaacggcgccuacggcgugaagggcuucgccuucaaguacggcaacggcguguggaucggcagaaccaagagcaccaacagcagaagcggcuucgagaugaucugggaccccaacggcuggaccggccccgacagcagcuucagcgugaagcaggacaucguggccaucaccgacuggagcggcuacagcggcagcuucgugcagcaccccgagcugaccggccuggacugcaucagacccugcuucuggguggagcugaucagaggcagacccaaggagagcaccaucuggaccagcggcagcagcaucagcuucugcggcgugaacagcgacaccgugagcuggagcuggcccgacggcgccgagcugcccuucaccaucgacaaguga

SEQ ID NO: 175049 - RNA, 1350 nt, Artificial Sequence
  derived and/or modified CDS sequence (opt4) from neuraminidase__InfluenzaA__ABE97646
augaaccccaaccagaagaucaucaccaucggcagcaucugcauggugaucggcaucgugagccugaugcugcagaucggcaacaugaucagcaucugggugagccacagcauccagaccgagaaccagcaccaggccgagagcaucagcaacaccaacccccccaccgagaaggccguggccagcgugacccuggccggcaacagcagccugugccccaucagaggcugggccgugcacagcaaggacaacagcaucagaaucggcagcaagggcgacguguucgugaucagagagcccuucaucagcugcagccaccuggagugcagaaccuucuuccugacccagggcgcccugcugaacgacaagcacagcaacggcaccgugaaggacagaagcccccacagaacccugaugagcugccccgugggcgaggcccccagccccuacaacagcagauucgagagcguggccuggagcgccagcgccugccacgacggcaccagcuggcugaccaucggcaucagcggccccgacaacggcgccguggccgugcugaaguacaacggcaucaucaccgacaccaucaagagcuggagaaacaacacccugagaacccaggagagcgagugcgccugcgugaacggcagcugcuucaccgugaugaccgacggccccagcaacggccaggccagcuacaagaucuucaagauggagaagggcaagguggugaagagcguggagcuggacgcccccaacuaccacuacgaggagugcagcugcuaccccgacgccggcgagaucaccugcgugugcagagacaacuggcacggcagcaacagacccugggugagcuucaaccagaaccuggaguaccagaucggcuacaucugcagcggcguguucggcgacaaccccagacccaacgacggcaccggcagcugcggccccaugagccccaacggcgccuacggcgugaagggcuucagcuucaaguacggcaacggcguguggaucggcagaaccaagagcaccaacagcagaagcggcuucgagaugaucugggaccccaacggcuggaccggcaccgacagcagcuucagcgugaagcaggacaucgugagcaucaccgacuggagcggcuacagcggcagcuucgugcagcaccccgagcugaccggccuggacugcaucagacccugcuucuggguggagcugaucagaggcagacccaaggagagcaccaucuggaccagcggcagcagcaucagcuucugcggcgugaacagcgacaccgugagcuggagcuggcccgacggcgccgagcugcccuucaccaucgacaaguga

SEQ ID NO: 175050 - RNA, 1350 nt, Artificial Sequence
  derived and/or modified CDS sequence (opt4) from neuraminidase__InfluenzaA__ABE97647
augaaccccaaccagaagaucaucaccaucggcagcaucugcauggugaucggcaucgugagccugaugcugcagaucggcaacaugaucagcaucugggugagccacagcauccagaccggcaaccagcacagagccgagagcaucagcaacaccaacccccugaccgagaaggccguggccagcgugacccuggccggcaacagcagccugugccccaucagaggcugggccgugcacagcaaggacaacaacaucagaaucggcagcaagggcgacguguucgugaucagagagcccuucaucagcugcagccaccuggagugcagaaccuucuuccugacccagggcgcccugcugaacgacaagcacagcaacggcaccgugaaggacagaagcccccacagaacccugaugagcugccccgugggcgaggcccccagccccuacaacagcagauucgagagcguggccuggagcgccagcgccugccacgacggcaccagcuggcugaccaucggcaucagcggccccgacaacggcgccguggccgugcugaaguacaacggcaucaucaccgacaccaucaagagcuggagaaacaacauccugagaacccaggagagcgagugcgccugcgugaacggcagcugcuucaccgugaugaccgacggccccagcaacggccaggccagcuacaagaucuucaagauggagaagggcaagguggugaagagcguggagcuggacgcccccaacuaccacuacgaggagugcagcugcuaccccgacgccggcgagaucaccugcgugugcagagacaacuggcacggcagcaacagacccugggugagcuucaaccagaaccuggaguaccagaucggcuacaucugcagcggcguguucggcgacaaccccagacccaacgacggcaccggcagcugcggccccaugagccccaacggcgccuacggcgugaagggcuucagcuucaaguacggcaacggcguguggaucggcagaaccaagagcaccaacagcagaagcggcuucgagaugaucugggaccccaacggcuggaccggcaccgacagcagcuucagcgugaagcaggacaucguggccaucaccgacuggagcggcuacagcggcagcuucgugcagcaccccgagcugaccggccuggacugcaucagacccugcuucuggguggagcugaucagaggcagacccaaggagagcaccaucuggaccagcggcagcagcaucagcuucugcggcgugaacagcgacaccgugagcuggagcuggcccgacggcgccgagcugcccuucaccaucgacaaguga

SEQ ID NO: 175051 - RNA, 1350 nt, Artificial Sequence
  derived and/or modified CDS sequence (opt4) from neuraminidase__InfluenzaA__ABE97649
augaaccccaaccagaagaucaucaccaucggcagcaucugcauggugaucggcaucgugagccugaugcugcagaucggcaacaugaucagcaucugggugagccacagcauccagaccggcaaccagcaccaggccgagagcaucagcaacaccaacccccugaccgagaaggccguggccagcgugacccuggccggcaacagcagccugugccccaucagaggcugggccgugcacagcaaggacaacagcaucagaaucggcagcaagggcgacguguucgugaucagagagcccuucaucagcugcagccaccuggagugcagaaccuucuuccugacccagggcgcccugcugaacgacaagcacagcaacggcaccgugaaggacagaagcccccacagaacccugaugagcugccccgugggcgaggcccccagccccuacaacagcagauucgagagcguggccuggagcgccagcgccugccacgacggcaccagcuggcugaccaucggcaucagcggccccgacaacggcgccguggccgugcugaaguacaacggcaucaucaccgacaccaucaagagcuggagaaacaacauccugagaacccaggagagcgagugcgccugcgugaacggcagcugcuucaccgugaugaccgacggccccagcaacggccaggccagcuacaagaucuucaagauggagaagggcaagguggugaagagcguggagcuggacgcccccaacuaccacuacgaggagugcagcugcuaccccgacgccggcgagaucaccugcgugugcagagacaacuggcacggcagcaacagacccugggugagcuucaaccagaaccuggaguaccagaucggcuacaucugcagcggcguguucggcgacaaccccagacccaacgacggcaccggcagcugcggccccaugagccccaacggcgccuacggcgugaagggcuucagcuucaaguacggcaacggcguguggaucggcagaaccaagagcaccaacagcagaagcggcuucgagaugaucugggaccccaacggcuggaccggcaccgacagcagcuucagcgugaagcaggacaucguggccaucaccgacuggagcggcuacagcggcagcuucgugcagcaccccgagcugaccggccuggacugcaucagacccugcuucuggguggagcugaucagaggcagacccaaggagagcaccaucuggaccagcggcagcagcaucagcuucugcggcgugaacagcgacaccgugagcuggagcuggcccgacggcgccgagcugcccuucaccaucgacaaguga

SEQ ID NO: 175052 - RNA, 1350 nt, Artificial Sequence; identical to SEQ ID NO: 175051
  derived and/or modified CDS sequence (opt4) from neuraminidase__InfluenzaA__ABE97651

SEQ ID NO: 175053 - RNA, 1350 nt, Artificial Sequence; identical to SEQ ID NO: 175051
  derived and/or modified CDS sequence (opt4) from neuraminidase__InfluenzaA__ABE97653

SEQ ID NO: 175054 - RNA, 1350 nt, Artificial Sequence; identical to SEQ ID NO: 175051
  derived and/or modified CDS sequence (opt4) from neuraminidase__InfluenzaA__ABE97654

SEQ ID NO: 175055 - RNA, 1350 nt, Artificial Sequence
  derived and/or modified CDS sequence (opt4) from neuraminidase__InfluenzaA__ABE97655
augaaccccaaccagaagaucaucaccaucggcagcaucugcauggccaucggcaucgugagccugaugcugcagaucggcaacaugaucagcaucugggugagccacagcauccagaccggcaaccagcaccaggccgagagcaccagcaacaccaacccccugaccgagaaggccguggccagcgugacccuggccggcaacagcagccugugccccaucagaggcugggccauccacagcaaggacaacagcaucagaaucggcagcaagggcgacguguucgugaucagagagcccuucaucagcugcagccaccuggagugcagaaccuucuuccugacccagggcgcccugcugaacgacaagcacagcaacggcaccgugaaggacagaagcccccacagaacccugaugagcugccccgugggcgaggcccccagccccuacaacagcagauucgagagcguggccuggagcgccagcgccugccacgacggcaccagcuggcugaccaucggcaucagcggccccgacaacggcgccguggccgugcugaaguacaacggcaucaucaccgacaccaucaagagcuggagaaacaacauccugagaacccaggagagcgagugcgccugcgugaacggcagcugcuucaccgugaugaccgacggccccagcaacggccaggccagcuacaagaucuucaagauggagaagggcaagguggugaagagcguggagcuggacgcccccaacuaccacuacgaggagugcagcugcuaccccgacgccggcgagaucaccugcgugugcagagacaacuggcacggcagcaacagacccugggugagcuucaaccagaaccuggaguaccagaucggcuacaucugcagcggcguguucggcgacaaccccagacccaacgacggcaccggcagcugcggccccaugagccccaacggcgccuacggcgugaagggcuucgccuucaaguacggcaacggcguguggaucggcagaaccaagagcaccaacagcagaagcggcuucgagaugaucugggaccccaacggcuggaccggccccgacagcagcuucagcgugaagcaggacaucguggccaucaccgacuggagcggcuacagcggcagcuucgugcagcaccccgagcugaccggccuggacugcaucagacccugcuucuggguggagcugaucagaggcagacccaaggagagcaccaucuggaccagcggcagcagcaucagcuucugcggcgugaacagcgacaccgugagcuggagcuggcccgacggcgccgagcugcccuucaccaucgacaaguga

SEQ ID NO: 175056 - RNA, 1350 nt, Artificial Sequence
  derived and/or modified CDS sequence (opt4) from neuraminidase__InfluenzaA__ABE97657
augaaccccaaccagaagaucaucaccaucggcagcaucugcauggugaucggcaccgugagccuggugcugcagaucggcaacaugaucagcaucugggugagccacagcauccagaccggcaaccagcaccaggccgagagcaucagcaacaccaacccccugaccgagaaggccguggccagcgugacccuggccggcaacagcagccugugccccaucagaggcugggccgugcacagcaaggacaacagcaucagaaucggcagcaagggcgacguguucgugaucagagagcccuucaucagcugcagccaccuggagugcagaaccuucuuccugacccagggcgcccugcugaacgacaagcacagcaacggcaccgugaaggacagaagcccccacagaacccugaugagcugccccgugggcgaggcccccagccccuacaacagcagauucgagagcguggccuggagcgccagcgccugccacgacggcaccagcuggcugaccaucggcaucagcggccccgacaacggcgccguggccgugcugaaguacaacggcaucaucaccgacaccaucaagagcuggagagacaacauccugagaacccaggagagcgagugcgccugcgugaacggcagcugcuucaccgugaugaccgacggccccagcaacggccaggccagcuacaagaucuucaagauggagaagggcaagguggugaagagcguggagcuggacgcccccaacuaccacuacgaggagugcagcugcuaccccgacgccggcgagaucaccugcgugugcagagacaacuggcacggcagcaacagacccugggugagcuucaaccagaaccuggaguaccagaucggcuacaucugcagcggcguguucggcgacaaccccagacccaacgacggcaccggcagcugcggccccaugagcagcaacggcgccuacggcgugaagggcuucagcuucaaguacggcaacggcguguggaucggcagaaccaagagcaccaacagcagaagcggcuucgagaugaucugggaccccaacggcuggaccggcaccgacagcagcuucagcgugaagcaggacaucguggccaucaccgacuggagcggcuacagcggcagcuucgugcagcaccccgagcugaccggccuggacugcaucagacccugcuucuggguggagcugaucagaggcagacccaaggagagcaccaucuggaccagcggcagcagcaucagcuucugcggcgugaacagcgacaccgugagcuggagcuggcccgacggcgccgagcugcccuucaccaucgacaaguga

SEQ ID NO: 175057 - RNA, 1350 nt, Artificial Sequence
  derived and/or modified CDS sequence (opt4) from neuraminidase__InfluenzaA__ABE97658
augaaccccaaccagaagaucaucaccaucggcagcaucugcauggugaucggcaccaucagccugaugcugcagaucggcaacaugaucagcaucugggugagccacagcauccagaccggcaaccagcaccagaccgagagcaucagcaacaccaacccccugaccgagaaggccguggccagcgugacccuggccggcaacagcagccugugcagcaucagaggcugggccgugcacagcaaggacaacagcaucagaaucggcagcaagggcgacguguucgugaucagagagcccuucaucagcugcagccaccuggagugcagaaccuucuuccugacccagggcgcccugcugaacgacaagcacagcaacggcaccgugaaggacagaagcccccacagaacccugaugagcugccccgugggcgaggcccccagccccuacaacagcagauucgagagcguggccuggagcgccagcgccugccacgacggcaccagcuggcugaccaucggcaucagcggccccgacaacggcgccguggccgugcugaaguacaacggcaucaucaccgacaccaucaagagcuggagagacaacauccugagaacccaggagagcgagugcgccugcgugaacggcagcugcuucaccgugaugaccgacggccccagcaacggccaggccagcuacaagaucuucaagauggagaagggcaagguggugaagagcguggagcuggacgcccccaacuaccacuacgaggagugcagcugcuaccccgacgccggcgagaucaccugcgugugcagagacaacuggcacggcagcaacagacccugggugagcuucaaccagaaccuggaguaccagaucggcuacaucugcagcggcguguucggcgacaaccccagacccaacgacggcaccggcagcugcggccccaugagcagcaacggcgcccacggcgugaagggcuucagcuucaaguacggcaacggcguguggaucggcagaaccaagagcaccaacagcagaagcggcuucgagaugaucugggaccccaacggcuggaccggcaccgacagcagcuucagcgugaagcaggacaucguggccaucaccgacuggagcggcuacagcggcagcuucgugcagcaccccgagcugaccggccuggacugcaucagacccugcuucuggguggagcugaucagaggcagacccaaggagagcaccaucuggaccagcggcagcagcaucagcuucugcggcgugaacagcgacaccgugagcuggagcuggcccgacggcgccgagcugcccuucaccaucgacaaguga

SEQ ID NO: 175058 - RNA, 1350 nt, Artificial Sequence
  derived and/or modified CDS sequence (opt4) from neuraminidase__InfluenzaA__ABE97659
augaaccccaaccagaagaucaucaccaucggcagcaucugcauggugaucggcaucgugagccugaugcugcagaucggcaacaugaucagcaucugggugagccacagcauccagaccggcaaccagcaccaggccgagagcaucagcaacaccaacccccugaccgagaaggccguggccagcgugacccuggccggcaacagcagccugugccccaucagaggcugggccgugcacagcaaggacaacagcaucagaaucggcagcaagggcgacguguucgugaucagagagcccuucaucagcugcagccaccuggagugcagaaccuucuuccugacccagggcgcccugcugaacgacaagcacagcaacgagaccgugaaggacagaagcccccacagaacccugaugagcugccccgugggcgaggcccccagccccuacaacagcagauucgagagcguggccuggagcgccagcgccugccacgacggcaccagcuggcugaccaucggcaucagcggccccgacaacggcgccguggccgugcugaaguacaacggcaucaucaccgacaccaucaagagcuggagagacaacauccugagaacccaggagagcgagugcgccugcgugaacggcagcugcuucaccgugaugaccgacggccccagcaacggccaggccagcuacaagaucuucaagauggagaagggcaagguggugaagagcguggagcuggacgcccccaacuaccacuacgaggagugcagcugcuaccccgacgccggcgagaucaccugcgugugcagagacaacuggcacggcagcaacagacccugggugagcuucaaccagaaccuggaguaccagaucggcuacaucugcagcggcguguucggcgacaaccccagacccaacgacggcaccggcagcugcggccccaugagcagcaacggcgccuacggcgugaagggcuucagcuucaaguacggcaacggcguguggaucggcagaaccaagagcaccaacagcagaagcggcuucgagaugaucugggaccccaacggcuggaccggcaccgacagcagcuucagcgugaagcaggacaucguggccaucaccgacuggagcggcuacagcggcagcuucgugcagcaccccgagcugaccggccuggacugcaucagacccugcuucuggguggagcugaucagaggcagacccaaggagagcaccaucuggaccagcggcagcagcaucagcuucugcggcgugaacagcgacaccgugagcuggagcuggcccgacggcgccgagcugcccuucaccaucgacaaguga

SEQ ID NO: 175059 - RNA, 1350 nt, Artificial Sequence
  derived and/or modified CDS sequence (opt4) from neuraminidase__InfluenzaA__ABE97660
augaaccccaaccagaagaucaucaccaucggcagcaucugcauggugaucggcaccaucagccugaugcugcagaucggcaacaugaucagcaucugggugagccacagcauccagaccggcaaccagcaccaggccgagagcaucagcaacaccaacccccugaccgagaaggccguggccagcgugacccuggccggcaacagcagccugugccccaucagaggcugggccgugcacagcaaggacaacagcaucagaaucggcagcaagggcgacguguucgugaucagagagcccuucaucagcugcagccaccuggagugcagaaccuucuuccugacccagggcgcccugcugaacgacaagcacagcaacggcaccgugaaggacagaagcccccacagaacccugaugagcugccccgugggcgaggcccccagccccuacaacagcagauucgagagcguggccuggagcgccagcgccugccacgacggcaccagcuggcugaccaucggcaucagcggccccgacaacggcgccguggccgugcugaaguacaacggcaucaucaccgacaccaucaagagcuggagagacaacauccugagaacccaggagagcgagugcgccugcgugaacggcagcugcuucaccgugaugaccgacggccccagcaacggccaggccagcuacaagaucuucaagauggagaagggcaagguggugaagagcguggagcuggacgcccccaacuaccacuacgaggagugcagcugcuaccccgacgccggcgagaucaccugcgugugcagagacaacuggcacggcagcaacagacccugggugagcuucaaccagaaccuggaguaccagaucggcuacaucugcagcggcguguucggcgacaaccccagacccaacgacggcaccggcagcugcggccccaugagcagcaacggcgcccacggcgugaagggcuucagcuucaaguacggcaacggcguguggaucggcagaaccaagagcaccaacagcagaagcggcuucgagaugaucugggaccccaacggcuggaccggcaccgacagcagcuucagcgugaagcaggacaucguggccaucaccgacuggagcggcuacagcggcagcuucgugcagcaccccgagcugaccggccuggacugcaucagacccugcuucuggguggagcugaucagaggcagacccaaggagagcaccaucuggaccagcggcagcagcaucagcuucugcggcgugaacagcgacaccgugagcuggagcuggcccgacggcgccgagcugcccuucaccaucgacaaguga

SEQ ID NO: 175060 - RNA, 1350 nt, Artificial Sequence
  derived and/or modified CDS sequence (opt4) from neuraminidase__InfluenzaA__ABE97661
augaaccccaaccagaagaucaucaccaucggcagcaucugcauggugaucggcaccaucagccugaugcugcagaucggcaacaugaucagcaucugggugagccacagcauccagaccggcaaccagcaccagaccgagagcaucagcaacaccaacccccugaccgagaaggccguggccagcgugacccuggccggcaacagcagccugugccccaucagaggcugggccgugcacagcaaggacaacagcaucagaaucggcagcaagggcgacguguucgugaucagagagcccuucaucagcugcagccaccuggagugcagaaccuucuuccugacccagggcgcccugcugaacgacaagcacagcaacggcaccgugaaggacagaagcccccacagaacccugaugagcugccccgugggcgaggcccccagccccuacaacagcagauucgagagcguggccuggagcgccagcgccugccacgacggcaccagcuggcugaccaucggcaucagcggccccgacaacggcgccguggccgugcugaaguacaacggcaucaucaccgacaccaucaagagcuggagagacaacauccugagaacccaggagagcgagugcgccugcgugaacggcagcugcuucaccgugaugaccgacggccccagcaacggccaggccagcuacaagaucuucaagauggagaagggcaagguggugaagagcguggagcuggacgcccccaacuaccacuacgaggagugcagcugcuaccccgacgccggcgagaucaccugcgugugcagagacaacuggcacggcagcaacagacccugggugagcuucaaccagaaccuggaguaccagaucggcuacaucugcagcggcguguucggcgacaaccccagacccaacgacggcaccggcagcugcggccccaugagcagcaacggcgcccacggcgugaagggcuucagcuucaaguacggcaacggcguguggaucggcagaaccaagagcaccaacagcagaagcggcuucgagaugaucugggaccccaacggcuggaccggcaccgacagcagcuucagcgugaagcaggacaucguggccaccaccgacuggagcggcuacagcggcagcuucgugcagcaccccgagcugaccggccuggacugcaucagacccugcuucuggguggagcugaucagaggcagacccaaggagagcaccguguggaccagcggcagcagcaucagcuucugcggcgugaacagcgacaccgugagcuggagcuggcccgacggcgccgagcugcccuucaccaucgacaaguga

SEQ ID NO: 175061 - RNA, 1350 nt, Artificial Sequence
  derived and/or modified CDS sequence (opt4) from neuraminidase__InfluenzaA__ABE97662
augaaccccaaccagaagaucaucaccaucggcagcaucugcauggugaucggcaucgugagccugaugcugcagaucggcaacaugaucagcaucugggugagccacagcauccagaccggcaaccagcaccaggccgagagcaucagcaacaccaacccccugaccgagaaggccguggccagcgugacccuggccggcaacagcagccugugccccaucagaggcugggccgugcacagcaaggacaacagcaucagaaucggcagcaagggcgacguguucgugaucagagagcccuucaucagcugcagccaccuggagugcagaaccuucuuccugacccagggcgcccugcugaacgacaagcacagcaacggcaccgugaaggacagaagcccccacagaacccugaugagcugccccgugggcgaggcccccagccccuacaacagcagauucgagagcguggccuggagcgccagcgccugccacgacggcaccagcuggcugaccaucggcaucagcggccccgacaacggcgccguggccgugcugaaguacaacggcaucaucaccgacaccaucaagagcuggagaaacaacauccugagaacccaggagagcgagugcgccugcgugaacggcagcugcuucaccgugaugaccgacggccccagcaacggccaggccagcuacaagaucuucaagaugagaaagggcaagguggugaagagcguggagcuggacgcccccaacuaccacuacgaggagugcagcugcuaccccgacgccggcgagaucaccugcgugugcagagacaacuggcacggcagcaacagacccugggugagcuucaaccagaaccuggaguaccagaucggcuacaucugcagcggcguguucggcgacaaccccagacccaacgacggcaccggcagcugcggccccaugagccccaacggcgccuacggcgugaagggcuucagcuucaaguacggcaacggcguguggaucggcagaaccaagagcaccaacagcagaagcggcuucgagaugaucugggaccccaacggcuggaccggcaccgacagcagcuucagcgugaagcaggacaucguggccaucaccgacuggagcggcuacagcggcagcuucgugcagcaccccgagcugaccggccuggacugcaucagacccugcuucuggguggagcugaucagaggcagacccaaggagagcaccaucuggaccagcggcagcagcaucagcuucugcggcgugaacagcgacaccgugagcuggagcuggcccgacggcgccgagcugcccuucaccaucgacaaguga

SEQ ID NO: 175062 - RNA, 1350 nt, Artificial Sequence
  derived and/or modified CDS sequence (opt4) from neuraminidase__InfluenzaA__ABE97663
augaaccccaaccagaagaucaucaccaucggcagcaucugcauggugaccggcaucgugagccugaugcugcagaucggcaacaugaucagcaucugggugagccacagcauccacaccggcaaccagcaccaggccgagcccaucagcaacaccaacuuccugaccgagaaggccguggccagcgugaagcuggccggcaacagcagccugugccccaucaacggcugggccguguacagcaaggacaacagcaucagaaucggcagcaagggcgacguguucgugaucagagagcccuucaucagcugcagccaccuggagugcagaaccuucuuccugacccagggcgcccugcugaacgacaagcacagcaacggcaccgugaaggacagaagcccccacagaacccugaugagcugccccgugggcgaggcccccagccccuacaacagcagauucgagagcguggccuggagcgccagcgccugccacgacggcaccagcuggcugaccaucggcaucagcggccccgacaacggcgccguggccgugcugaaguacaacggcaucaucaccgacaccaucaagagcuggagaaacaacauccugagaacccaggagagcgagugcgccugcgugaacggcagcugcuucaccgugaugaccgacggccccagcaacggccaggccagccacaagaucuucaagauggagaagggcaagguggugaagagcguggagcuggacgcccccaacuaccacuacgaggagugcagcugcuaccccgacgccggcgagaucaccugcgugugcagagacaacuggcacggcagcaacagacccugggugagcuucaaccagaaccuggaguaccagaucggcuacaucugcagcggcguguucggcgacaaccccagacccaacgacggcaccggcagcugcggccccgugagcagcaacggcgccuacggcgugaagggcuucagcuucagauacggcaacggcguguggaucggcagaaccaagagcaccaacagcagaagcggcuucgagaugaucugggaccccaacggcuggaccgagaccgacagcagcuucagcgugaagcaggacaucguggccaucaccgacuggagcggcuacagcggcagcuucgugcagcaccccgagcugaccggccuggacugcaucagacccugcuucuggguggagcugaucagaggcagacccaaggagagcaccaucuggaccagcggcagcagcaucagcuucugcggcgugaacagcgacaccgugggcuggagcuggcccgacggcgccgagcugcccuucaccaucgacaaguga

SEQ ID NO: 175063 - RNA, 1350 nt, Artificial Sequence
  derived and/or modified CDS sequence (opt4) from neuraminidase__InfluenzaA__ABE97665
augaaccccaaccagaagaucaucaccaucggcagcaucugcauggugaccggcaucgugagccugaugcugcaggugggcaacaugaucagcaucugggugagccacagcauccacaccggcaaccagcaccaggccgagcccaucagcaacaccaacuuccugaccgagaaggccguggccagcgugaagcuggccggcaacagcagccugugccccaucaacggcugggccguguacagcaaggacaacagcaucagaaucggcagcaagggcgacguguucgugaucagagagcccuucaucagcugcagccaccuggagugcagaaccuucuuccugacccacggcgcccugcugaacgacaagcacagcaacggcaccgugaaggacagaagcccccacagaacccugaugagcugccccgugggcgaggcccccagccccuacaacagcagauucgagagcguggccuggagcgccagcgccugccacgacggcaccagcuggcugaccaucggcaucagcggccccgacaacggcgccguggccgugcugaaguacaacggcaucaucaccgacaccaucaagagcuggagaaacaacauccugagaacccaggagagcgagugcgccugcgugaacggcagcugcuucaccgugaugaccgacggccccagcaacggccaggccagccacaagaucuucaagauggagaagggcaagguggugaagagcguggagcuggacgcccccaacuaccacuacgaggagugcagcugcuaccccgacgccggcgagaucaccugcgugugcagagacaacuggcacggcagcaacagacccugggugagcuucaaccagaaccuggaguaccagaucggcuacaucugcagcggcguguucggcgacaaccccagacccaacgacggcaccggcagcugcggccccgugagcagcaacggcgccuacggcgugaagggcuucagcuucaaguacggcaacggcguguggaucggcagaaccaagagcaccaacagcagaagcggcuucgagaugaucugggaccccaacggcuggaccgagaccgacagcagcuucagcgugaagcaggacaucguggccaucaccgacuggagcggcuacagcggcagcuucgugcagcaccccgagcugaccggccuggacugcaucagacccugcuucuggguggagcugaucagaggcagacccaaggagagcaccaucuggaccagcggcagcagcaucagcuucugcggcgugaacagcgacaccgugggcuggagcuggcccgacggcgccgagcugcccuucaccaucgacaaguga

SEQ ID NO: 175064 - RNA, 1350 nt, Artificial Sequence
  derived and/or modified CDS sequence (opt4) from neuraminidase__InfluenzaA__ABE97666
augaaccccaaccagaagaucaucaccaucggcagcaucugcauggugaccggcaucgugagccugaugcugcagaucggcaacaugaucagcaucugggugagccacagcauccacaccggcaaccagcaccagagcgagcccaucagcaacaccaacuuccugaccgagaaggccguggccagcgugaagcuggccggcaacagcccccugugccccaucaacggcugggccguguacagcaaggacaacagcaucagaaucggcagcaagggcgacguguucgugaucagagagcccuucaucagcugcagccaccuggagugcagaaccuucuuccugacccagggcgcccugcugaacgacaagcacagcaacggcaccgugaaggacagaagcccccacagaacccugaugagcugccccgugggcgaggcccccagccccuacaacagcagauucgagagcguggccuggagcgccagcgccugccacgacggcaccagcuggcugaccaucggcaucagcggccccgacaacggcgccguggccgugcugaaguacaacggcaucaucaccgacaccaucaagagcuggagaaacaacauccugagaacccaggagagcgagugcgccugcgugaacggcagcugcuucaccgugaugaccgacggccccagcaacggccaggccagccacaagaucuucaagauggagaagggcaagguggugaagagcguggagcuggacgcccccaacuaccacuacgaggagugcagcugcuaccccgacgccggcgagaucaccugcgugugcagagacaacuggcacggcagcaacagacccugggugagcuucaaccagaaccuggaguaccagaucggcuacaucugcagcggcguguucggcgacagccccagacccaacgacggcaccggcagcugcggccccgugagcagcaacggcgccuacggcgugaagggcuucagcuucaaguacggcaacggcguguggaucggcagaaccaagagcaccaacagcagaagcggcuucgagaugaucugggaccccaacggcuggaccgagaccgacagcagcuucagcgugaagcaggacaucguggccaucaccgacuggagcggcuacagcggcagcuucgugcagcaccccgagcugaccggccuggacugcaucagacccugcuucuggguggagcugaucagaggcagacccaaggagagcaccaucuggaccagcggcagcagcaucagcuucugcggcgugaacagcgacaccgugggcuggagcuggcccgacggcgccgagcugcccuucaccaucgacaaguga

SEQ ID NO: 175065 - RNA, 1350 nt, Artificial Sequence
  derived and/or modified CDS sequence (opt4) from neuraminidase__InfluenzaA__ABE97667
augaaccccaaccagaagaucaucaccaucggcagcaucugcauggugaccggcaucgugagccugaugcugcagaucggcaacaugaucagcaucuggggcagccacagcauccacaccggcaaccagcaccagagcgagcccaucagcaacaccaacuuccugaccgagaaggccguggccagcgugaagcuggccggcaacagcagccugugccccaucaacggcugggccguguacagcaaggacaacagcaucagaaucggcagcaagggcgacguguucgugaucagagagcccuucaucagcugcagccaccuggagugcagaaccuucuuccugacccagggcgcccugcugaacgacaagcacagcaacggcaccgugaaggacagaagcccccacagaacccugaugagcugccccgugggcgaggcccccagccccuacaacagcagauucgagagcguggccuggagcgccagcgccugccacgacggcaccagcuggcugaccaucggcaucagcggccccgacaacggcgccguggccguggugaaguacaacggcaucaucaccgacaccaucaagagcuggagaaacaacauccugagaacccaggagagcgagugcgccugcgugaacggcagcugcuucaccgugaugaccgacggccccagcaacggccaggccagccacaagaucuucaagauggagaagggcaagguggugaagagcguggagcuggacgcccccaacuaccacuacgaggagugcagcugcuaccccgacgccggcaagaucaccugcgugugcagagacaacuggcacggcagcaacagacccugggugagcuucaaccagaaccuggaguaccagaucggcuacaucugcagcggcguguucggcgacaaccccagacccaacgacggcaccggcagcugcggccccgugagcagcaacggcgccuacggcgugaagggcuucagcuucaaguacggcaacggcguguggaucggcagaaccaagagcaccaacagcagaagcggcuucgagaugaucugggaccccaacggcuggaccgagaccgacagcagcuucagcgugaagcaggacaucguggccaucaccgacuggagcggcuacagcggcagcuucgugcagcaccccgagcugaccggccuggacugcaucagacccugcuucuggguggagcugaucagaggcagacccaaggagagcaccaucuggaccagcggcagcagcaucagcuucugcggcgugaacagcgacaucgugggcuggagcuggcccgacggcgccgagcugcccuucaccaucgacaaguga

SEQ ID NO: 175066 - RNA, 1350 nt, Artificial Sequence
  derived and/or modified CDS sequence (opt4) from neuraminidase__InfluenzaA__ABE97669
augaaccccaaccagaagaucaucaccaucggcagcaucugcauggugaccggcaucgugagccugaugcugcagaucggcaacaugaucagcaucugggugagccacagcauccacaccggcaaccagcaccagagcgagcccaucagcaacaccaacuuccugaccgagaaggccguggccagcgugaagcuggccggcaacagcagccugugccccaucaacggcugggccguguacagcaaggacaacagcaucagaaucggcagcaagggcgacguguucgugaucagagagcccuucaucagcugcagccaccuggagugcagaaccuucuuccugacccagggcgcccugcugaacgacaagcacagcaacggcaccgugaaggacagaagcccccacagaacccugaugagcugccccgugggcgaggcccccagccccuacaacagcagauucgagagcguggccuggagcgccagcgccugccacgacggcaccagcuggcugaccaucggcaucagcggccccgacaacggcgccguggccguggugaaguacaacggcaucaucaccgacaccaucaagagcuggagaaacaacauccugagaacccaggagagcgagugcgccugcgugaacggcagcugcuucaccgugaugaccgacggccccagcaacggccaggccagccacaagaucuucaagauggagaagggcaagguggugaagagcguggagcuggacgcccccaacuaccacuacgaggagugcagcugcuaccccgacgccggcgagaucaccugcgugugcagagacaacuggcacggcagcaacagacccugggugagcuucaaccagaaccuggaguaccagaucggcuacaucugcagcggcguguucggcgacaaccccagacccaacgacggcaccggcagcugcggccccgugagcagcaacggcgccuacggcgugaagggcuucagcuucaaguacggcaacggcguguggaucggcagaaccaagagcaccaacagcagaagcggcuucgagaugaucugggaccccaacggcuggaccgagaccgacagcagcuucagcgugaagcaggacaucguggccaucaccgacuggagcggcuacagcggcagcuucgugcagcaccccgagcugaccggccuggacugcaucagacccugcuucuggguggagcugaucagaggcagacccaaggagagcaccaucuggaccagcggcagcagcaucagcuucugcggcgugaacagcgacaccgugggcuggagcuggcccgacggcgccgagcugcccuucaccaucgacaaguga

SEQ ID NO: 175067 - RNA, 1350 nt, Artificial Sequence
  derived and/or modified CDS sequence (opt4) from neuraminidase__InfluenzaA__ABE97670
augaaccccaaccagaagaucaucaccaucggcagcaucugcauggugaccggcaucgugagccugaugcugcagaucggcaacaugaucagcaucugggugagccacagcauccacaccggcaaccagcaccagagcgagcccaucagcaacaccaacuuccugaccgagaaggccguggccagcgugaagcuggccggcaacagcagccugugccccaucaacggcugggccguguacagcaaggacaacagcaucagaaucggcagcaagggcgacguguucgugaucagagagcccuucaucagcugcagccaccuggagugcagaaccuucuuccugacccagggcgcccugcugaacgacaagcacagcaacggcaccgugaaggacagaagcccccacagaacccugaugagcugccccgugggcgaggcccccagccccuacaacagcagauucgagagcguggccuggagcgccagcgccugccacgacggcaccagcuggcugaccaucggcaucagcggccccgacaacggcgccguggccguggugaaguacaacggcaucaucaccgacaccaucaagagcuggagaaacaacauccugagaacccaggagagcgagugcgccugcgugaacggcagcugcuucaccgugaugaccgacggccccagcaacggccaggccagccacaagaucuucaagauggagaagggcaagguggugaagagcguggagcuggacacccccaacuaccacuacgaggagugcagcugcuaccccgacgccggcgagaucaccugcgugugcagagacaacuggcacggcagcaacagacccugggugagcuucaaccagaaccuggaguaccagaucggcuacaucugcagcggcguguucggcgacaaccccagacccaacgacggcaccggcagcugcggccccgugagcagcaacggcgccuacggcgugaagggcuucagcuucaaguacggcaacggcguguggaucggcagaaccaagagcaccaacagcagaagcggcuucgagaugaucugggaccccaacggcuggaccgagaccgacagcagcuucagcgugaagcaggacaucguggccaucaccgacuggagcggcuacagcggcagcuucgugcagcaccccgagcugaccggccuggacugcaucagacccugcuucuggguggagcugaucagaggcagacccaaggagagcaccaucuggaccagcggcagcagcaucagcuucugcggcgugaacagcgacaccgugggcuggagcuggcccgacggcgccgagcugcccuucaccaucgacaaguga

SEQ ID NO: 175068 - RNA, 1350 nt, Artificial Sequence
  derived and/or modified CDS sequence (opt4) from neuraminidase__InfluenzaA__ABE97671
augaaccccaaccagaagaucaucaccaucggcagcaucugcauggugaccggcaucgugagccugaugcugcagaucggcaacaugaucagcaucugggugagccacagcauccacaccggcaaccagcaccaggccgagcccaucagcaacaccaacuuccugaccgagaaggccguggccagcgugaagcuggccggcaacagcagccugugccccaucaacggcugggccguguacagcaaggacaacagcaucagaaucggcagcaagggcgacguguucgugaucagagagcccuucaucagcugcagccaccuggagugcagaaccuucuuccugacccagggcgcccugcugaacgacaagcacagcaacggcaccgugaaggacagaagcccccacagaacccugaugagcugccccgugggcgaggcccccagccccuacaacagcagauucgagagcguggccuggagcgccagcgccugccacgacggcaccagcuggcugaccaucggcaucagcggccccgacaacggcgccguggccgugcugaaguacaacggcaucaucaccgacaccaucaagagcuggagaaacaacauccugagaacccaggagagcgagugcgccugcgugaacggcagcugcuucaccgugaugaccgacggccccagcaacggccaggccagccacaagaucuucaagauggagaagggcaagguggugaagagcguggagcuggacgcccccaacuaccacuacgaggagugcagcugcuaccccgacgccggcgagaucaccugcgugugcagagacaacuggcacggcagcaacagacccugggugagcuucaaccagaaccuggaguaccagaucggcuacaucugcagcggcguguucggcgacaaccccagacccaacgacggcaccggcagcugcggccccgugagcagcaacggcgccuacggcgugaagggcuucagcuucaaguacggcaacggcguguggaucggcagaaccaagagcaccaacagcagaagcggcuucgagaugaucugggaccccaacggcuggaccgagaccgacagcagcuucagcgugaagcaggacaucguggccaucaccgacuggagcggcuacagcggcagcuucgugcagcaccccgagcugaccggccuggacugcaucagacccugcuucuggguggagcugaucagaggcagacccaaggagagcaccaucuggaccagcggcagcagcaucagcuucugcggcgugaacagcgacaccgugggcuggagcuggcccgacggcgccgagcugcccuucaccaucgacaaguga

SEQ ID NO: 175069 - RNA, 1350 nt, Artificial Sequence
  derived and/or modified CDS sequence (opt4) from neuraminidase__InfluenzaA__ABE97672
augaaccccaaccagaagaucaucaccaucggcagcaucugcauggugaccggcaucgugagccugaugcugcagaucggcaacaugaucagcaucugggugagccacagcauccacaccggcaaccagcaccaggccgagcccaucagcaacaccaacuuccugaccgagaaggcccuggccagcgugaagcuggccggcaacagcagccugugccccaucaacggcugggccguguacagcaaggacaacagcaucagaaucggcagcaagggcgacguguucgugaucagagagcccuucaucagcugcagccaccuggagugcagaaccuucuuccugacccagggcgcccugcugaacgacaagcacagcaacggcaccgugaaggacagaagcccccacagaacccugaugagcugccccgugggcgaggcccccagccccuacaacagcagauucgagagcguggccuggagcgccagcgccugccacgacggcaccagcuggcugaccaucggcaucagcggccccgacaacggcgccguggccgugcugaaguacaacggcaucaucaccgacaccaucaagagcuggagaaacaacauccugagaacccaggagagcgagugcgccugcgugaacggcagcugcuucaccgugaugaccgacggccccagcaacggccaggccagccacaagaucuucaagauggagaagggcaagguggugaagagcguggagcuggacgcccccaacuaccacuacgaggagugcagcugcuaccccgacgccggcgagaucaccugcgugugcagagacaacuggcacggcagcaacagacccugggugagcuucaaccagaaccuggaguaccagaucggcuacaucugcagcggcguguucggcgacaaccccagacccaacgacggcaccggcagcugcggccccgugagcagcaacggcgccuacggcgugaagggcuucagcuucaaguacggcaacggcguguggaucggcagaaccaagagcaccaacagcagaagcggcuucgagaugaucugggaccccaacggcuggaccgagaccgacagcagcuucagcgugaagcaggacaucguggccaucaccgacuggagcggcuacagcggcagcuucgugcagcaccccgagcugaccggccuggacugcaucagacccugcuucuggguggagcugaucagaggcagacccaaggagagcaccaucuggaccagcggcagcagcaucagcuucugcggcgugaacagcgacaccgugggcuggagcuggcccgacggcgccgagcugcccuucaccaucgacaaguga

SEQ ID NO: 175070 - RNA, 1350 nt, Artificial Sequence
  derived and/or modified CDS sequence (opt4) from neuraminidase__InfluenzaA__ABE97675
augaaccccaaccagaagaucaucaccaucggcagcaucugcauggugaccggcaucgugagccugaugcugcaggugggcaacaugaucagcaucugggugagccacagcauccacaccggcaaccagcaccaggccgagcccaucagcaacaccaacuuccugaucgagaaggccguggccagcgugaagcuggccggcaacagcagccugugccccaucaacggcugggccguguacagcaaggacaacagcaucagaaucggcagcaagggcgacguguucgugaucagagagcccuucaucagcugcagccaccuggagugcagaaccuucuuccugacccagggcgcccugcugaacgacaagcacagcaacggcaccgugaaggacagaagcccccacagaacccugaugagcugccccgugggcgaggcccccagccccuacaacagcagauucgagagcguggccuggagcgccagcgccugccacgacggcaccagcuggcugaccaucggcaucagcggccccgacaacggcgccguggccgugcugaaguacaacggcaucaucaccgacaccaucaagagcuggagaaacaacauccugagaacccaggagagcgagugcgccugcgugaacggcagcugcuucaccgugaugaccgacggccccagcaacggccaggccagccacaagaucuucaagaucgagaagggcaagguggugaagagcguggagcuggacgcccccaacuaccacuacgaggagugcagcugcuaccccgacgccggcgagaucaccugcgugugcagagacaacuggcacggcagcaacagacccugggugagcuucaaccagaaccuggaguaccagaucggcuacaucugcagcggcguguucggcgacaaccccagacccaacgacggcaccggcagcugcggccccgugagcagcaacggcgccuacggcgugaagggcuucagcuucaaguacggcaacggcguguggaucggcagaaccaagagcaccaacagcagaagcggcuucgagaugaucugggaccccaacggcuggagcgagaccgacagcagcuucagcgugaagcaggacaucguggccaucaccgacuggagcggcuacagcggcagcuucgugcagcaccccgagcugaccggccuggacugcaucagacccugcuucuggguggagcugaucagaggcagacccaaggagagcaccaucuggaccagcggcagcagcaucagcuucugcggcgugaacagcgacaccgugggcuggagcuggcccgacggcgccgagcugcccuucaccaucgacaaguga

SEQ ID NO: 175071 - RNA, 1350 nt, Artificial Sequence
  derived and/or modified CDS sequence (opt4) from neuraminidase__InfluenzaA__ABE97676
augaaccccaaccagaagaucaucaccaucggcagcaucugcauggugaccggcaucgugagccugaugcugcagaucggcaacaugaucagcaucugggugagccacagcauccacaccggcaaccagcaccaggccgagcccaucagcaacaccaacuuccugaccgagaaggccguggccagcgugaagcuggccggcaacagcagccugugccccaucaacggcugggccguguacagcaaggacaacagcaucagaaucggcagcaagggcgacguguucgugaucagagagcccuucaucagcugcagccaccuggagugcagaaccuucuuccugacccagggcgcccugcugaacgacaagcacagcaacggcaccgugaaggacagaagcccccacagaacccugaugagcugccccgugggcgaggcccccagccccuacaacagcagauucgagagcguggccuggagcgccagcgccugccacgacggcaccagcuggcugaccaucggcaucagcggccccgacaacggcgccguggccgugcugaaguacaacggcaucaucaccgacaccaucaagagcuggagaaacaacauccugagaacccaggagagcgagugcgccugcgugaacggcagcugcuucaccgugaugaccgacggccccagcaacggccaggccagccacaagaucuucaagauggagaagggcaagguggugaagagcguggagcuggacgcccccaacuaccacuacgaggagugcagcugcuaccccgacgccggcgagaucaccugcgugugcagagacaacuggcacggcagcaacagacccugggugagcuucaaccagaaccuggaguaccagaucggcuacaucugcagcggcguguucggcgacaaccccagacccaacgacggcaccggcagcugcggccccgugagcagcaacggcgccuacggcgugaagggcuucagcuucaaguacggcaacggcguguggaucggcagaaccaagagcaccaacagcagaagcggcuucgagaugaucugggaccccaacggcuggaccgagaccgacagcagcuucagcgugaagcaggacaucguggccaucaacgacuggagcggcuacagcggcagcuucgugcagcaccccgagcugaccggccuggacugcaucagacccugcuucuggguggagcugaucagaggcagacccaaggagagcaccaucuggaccagcggcagcagcaucagcuucugcggcgugaacagcgacaccgugggcuggagcuggcccgacggcgccgagcugcccuucaccaucgacaaguga

SEQ ID NO: 175072 - RNA, 1350 nt, Artificial Sequence
  derived and/or modified CDS sequence (opt4) from neuraminidase__InfluenzaA__ABE97677
augaaccccaaccagaagaucaucaccaucggcagcaucugcauggugaccggcaucgugagccugaugcugcagaucggcaacaucaucagcaucugggugagacacagcauccacaccggcaaccagcaccagagcgagcccaucagcaacaccaacuuccugaccgagaaggccguggccagcgugaagcuggccggcaacagcagccugugccccaucaacggcugggccguguacagcaaggacaacagcaucagaaucggcagcaagggcgacguguucgugaucagagagcccuucaucagcugcagccaccuggagugcagaaccuucuuccugacccagggcgcccugcugaacgacaagcacagcaacggcaccgugaaggacagaagcccccacagaacccugaugagcugccccgugggcgaggcccccagccccuacaacagcagauucgagagcguggccuggagcgccagcgccugccacgacggcaccagcuggcugaccaucggcaucagcggccccgacaacggcgccguggccguggugaaguacaacggcaucaucaccgacaccaucaagagcuggagaaacaacauccugagaacccaggagagcgagugcgccugcgugaacggcagcugcuucaccgugaugaccgacggccccagcaacggccaggccagccacaagaucuucaagauggagaagggcaagguggugaagagcguggagcuggacgcccccaacuaccacuacgaggagugcagcugcuaccccgacgccggcgagaucaccugcgugugcagagacaacuggcacggcagcaacagacccugggugagcuucaaccagaaccuggaguaccagaucggcuacaucugcagcggcguguucggcgacaaccccagacccaacgacggcaccggcagcugcggccccgugagcagcaacggcgccuacggcgugaagggcuucagcuucaaguacggcaacggcguguggaucggcagaaccaagagcaccaacagcagaagcggcuucgagaugaucugggaccccaacggcuggaccgagaccgacagcagcuucagcgugaagcaggacaucguggccaucaccgacuggagcggcuacagcggcagcuucgugcagcaccccgagcugaccggccuggacugcaucagacccugcuucuggguggagcugaucagaggcagacccaaggagagcaccaucuggaccagcggcagcagcaucagcuucugcggcgugaacagcgacaccgugggcuggagcuggcccgacggcgccgagcugcccuucaccaucgacaaguga

SEQ ID NO: 175073 - RNA, 1350 nt, Artificial Sequence
  derived and/or modified CDS sequence (opt4) from neuraminidase__InfluenzaA__ABE97679
augaaccccaaccagaagaucaucaccaucggcagcaucugcauggugaccggcaucgugagccugaugcugcagaucggcaacaugaucagcaucugggugagacacagcauccacaccggcaaccagcaccagagcgagcccaucagcaacaccaacuuccugaccgagaaggccguggccagcgugaagcuggccggcaacagcagccugugccccaucaacggcugggccguguacagcaaggacaacagcaucagaaucggcagcaagggcgacguguucgugaucagagagcccuucaucagcugcagccaccuggagugcagaaccuucuuccugacccagggcgcccugcugaacgacaagcacagcaacggcaccgugaaggacagaagcccccacagaacccugaugagcugccccgugggcgaggcccccagccccuacaacagcagauucgagagcguggccuggagcgccagcgccugccacgacggcaccagcuggcugaccaucggcaucagcggccccgacaacggcgccguggccguggugaaguacaacggcaucaucaccgacaccaucaagagcuggagaaacaacauccugagaacccaggagagcgagugcgccugcgugaacggcagcugcuucaccgugaugaccgacggccccagcaacggccaggccagccacaagaucuucaagauggagaagggcaagguggugaagagcguggagcuggacgcccccaacuaccacuacgaggagugcagcugcuaccccgacgccggcgagaucaccugcgugugcagagacaacuggcacggcagcaacagacccugggugagcuucaaccagaaccuggaguaccagaucggcuacaucugcagcggcguguucggcgacaaccccagacccaacgacggcaccggcagcugcggccccgugagcagcaacggcgccuacggcgugaagggcuucagcuucaaguacggcaacggcguguggaucggcagaaccaagagcaccaacagcagaagcggcuucgagaugaucugggaccccaacggcuggaccgagaccgacagcagcuucagcgugaagcaggacaucguggccaucaccgacuggagcggcuacagcggcagcuucgugcagcaccccgagcugaccggccuggacugcaucagacccugcuucuggguggagcugaucagaggcagacccaaggagagcaccaucuggaccagcggcagcagcaucagcuucugcggcgugaacagcgacaccgugggcuggagcuggcccgacggcgccgagcugcccuucaccaucgacaaguga

SEQ ID NO: 175074 - RNA, 1350 nt, Artificial Sequence; identical to SEQ ID NO: 175066
  derived and/or modified CDS sequence (opt4) from neuraminidase__InfluenzaA__ABE97680

SEQ ID NO: 175075 - RNA, 1350 nt, Artificial Sequence; identical to SEQ ID NO: 175066
  derived and/or modified CDS sequence (opt4) from neuraminidase__InfluenzaA__ABE97681

SEQ ID NO: 175076 - RNA, 1350 nt, Artificial Sequence; identical to SEQ ID NO: 175066
  derived and/or modified CDS sequence (opt4) from neuraminidase__InfluenzaA__ABE97682

SEQ ID NO: 175077 - RNA, 1350 nt, Artificial Sequence
  derived and/or modified CDS sequence (opt4) from neuraminidase__InfluenzaA__ABE97684
augaaccccaaccagaagaucaucaccaucggcagcaucugcauggugaccggcaucgugagccugaugcugcagaucggcaacaugaucagcaucugggugagccacagcauccacaccggcaaccagcaccaggccgagcccaucagcaacaccaacuuccugaccgagaaggccguggccagcgugaagcuggccggcaacagcagccugugccccaucaacggcugggccguguacagcaaggacaacagcaucagaaucggcagcaagggcgacguguucgugaucagagagcccuucaucagcugcagccaccuggagugcagaaccuucuuccugacccagggcgcccugcugaacgacaagcacagcaacggcaccgugaaggacagaagcccccacagaacccugaugagcugccccgugggcgaggcccccagccccuacaacagcagauucgagagcguggccuggagcgccagcgccugccacgacggcaccagcuggcugaccaucggcaucagcggccccgacaacggcgccguggccgugcugaaguacaacggcaucaucaccgacaccaucaagagcuggagaaacaacauccugagaacccaggagagcgagugcgccugcgugaacggcagcugcuucaccgugaugaccgacggccccagcaacggccaggccagccacaagaucuucaagauggagaagggcaagguggugaagagcguggagcuggacgcccccaacuaccacuacgaggagugcagcugcuaccccgacgccggcgagaucaccugcgugugcagagacaacuggcacggcagcaacagacccugggugagcuucaaccagaaccuggaguaccagaucggcuacaucugcagcggcguguucggcgacaaccccagacccaacgacggcaccggcagcugcggccccgugagcagcaacggcgccuacggcgugaagggcuucagcuucaaguacggcaacggcguguggaucggcagaaccaagagcaccaacagcagaagcggcuucgagaugaucugggaccccaacggcuggaccgagaccgacagcagcuucagcgugaagcaggacaucguggccaucaccgacuggagcggcuacagcggcagcuucgugcagcaccccgagcugaccggccuggacugcaucagacccugcuucuggguggagcugaucagaggcagacccaaggagagcaccaucuggaccagcggcagcagcaucagcuucugcggcgugaacagcggcaccgugggcuggagcuggcccgacggcgccgagcugcccuucaccaucgacaaguga

SEQ ID NO: 175078 - RNA, 1350 nt, Artificial Sequence
  derived and/or modified CDS sequence (opt4) from neuraminidase__InfluenzaA__ABE97685
augaaccccaaccagaagaucaucaccaucggcagcaucugcauggugaccggcaucgugagccugaugcugcagaucggcaacaugaucagcaucugggugagccacagcauccacaccggcaaccagcaccaggccgagcccaucagcaacaccaacuuccugaccgagaaggccguggccagcgugaagcuggccggcaacagcagccugugccccaucaacggcugggccguguacagcaaggacaacagcaucagaaucggcagcaagggcgacguguucgugaucagagagcccuucaucagcugcagccaccuggagugcagaaccuucuuccugacccagggcgcccugcugaacgacaagcacagcaacggcaccgugaaggacagaagcccccacagaacccugaugagcugccccgugggcgaggcccccagccccuacaacagcagauucgagagcguggccuggagcgccagcgccugccacgacggcaccagcuggcugaccaucggcaucagcggccccgacaacggcgccguggccgugcugaaguacaacggcaucaucaccgacaccaucaagagcuggagaaacaacauccugagaacccaggagagcgagugcgccugcgugaacggcagcugcuucaccgugaugaccgacggccccagcaacggccaggccagccacaagaucuucaagauggagaagggcaagguggugaagagcguggagcuggacgcccccaacuaccacuacgaggagugcagcugcuaccccgacgccggcgagaucaccugcgugugcagagacaacuggcacggcagcaacagacccugggugagcuucaaccagaaccuggaguaccagaucggcuacaucugcagcggcguguucggcgacaaccccagacccaacgacggcaccggcagcugcggccccgugagcagcaacggcgccuacggcgugaagggcuucagcuucaaguacggcaacggcguguggaucggcagaaccaagagcaccaacagcagaagcggcuucgagaugaucugggaccccaacggcuggaccgagaccgacagcagcuucagcgugaagcaggacaucguggccaucaccgacuggagcggcuacagcggcagcuucgugcagcaccccgagcugaccggccuggacugcaucagacccugcuucuggguggagcugaucagaggcagacccaaggagagcaccaucuggaccagcggcagcagcaucagcuucugcggcgugaacagcgacaccggcggcuggagcuggcccgacggcgccgagcugcccuucaccaucgacaaguga

SEQ ID NO: 175079 - RNA, 1350 nt, Artificial Sequence; identical to SEQ ID NO: 175068
  derived and/or modified CDS sequence (opt4) from neuraminidase__InfluenzaA__ABE97686

SEQ ID NO: 175080 - RNA, 1350 nt, Artificial Sequence
  derived and/or modified CDS sequence (opt4) from neuraminidase__InfluenzaA__ABE97687
augaaccccaaccagaagaucaucaccaucggcagcaucugcauggugaccggcaucgugagccugaugcugcaggugggcaacaugaucagcaucugggugagccacagcauccacaccggcaaccagcaccaggccgagcccaucagcaacaccaacuuccugaccgagaaggccguggccagcgugaagcuggccggcaacagcagccugugccccaucaacggcugggccguguacagcaaggacaacagcaucagaaucggcagcaagggcgacguguucgugaucagagagcccuucaucagcugcagccaccuggagugcagaaccuucuuccugacccagggcgcccugcugaacgacaagcacagcaacggcaccgugaaggacagaagcccccacagaacccugaugagcugccccgugggcgaggcccccagccccuacaacagcagauucgagagcguggccuggagcgccagcgccugccacgacggcaccagcuggcugaccaucggcaucagcggccccgacaacggcgccguggccgugcugaaguacaacggcaucaucaccgacaccaucaagagcuggagaaacaacauccugagaacccaggagagcgagugcgccugcgugaacggcagcugcuucaccgugaugaccgacggccccagcaacggccaggccagccacaagaucuucaagauggagaagggcaagguggugaagagcguggagcuggacgcccccaacuaccacuacgaggagugcagcugcuaccccgacgccggcgagaucaccugcgugugcagagacaacuggcacggcagcaacagacccugggugagcuucaaccagaaccuggaguaccagaucggcuacaucugcagcggcguguucggcgacaaccccagacccaacgacggcaccggcagcugcggccccgugagcagcaacggcgccuacggcgugaagggcuucagcuucaaguacggcaacggcguguggaucggcagaaccaagagcaccaacagcagaagcggcuucgagaugaucugggaccccaacggcuggaccgagaccgacagcagcuucagcgugaagcaggacaucguggccaucaccgacuggagcggcuacagcggcagcuucgugcagcaccccgagcugaccggccuggacugcaucagacccugcuucuggguggagcugaucagaggcagacccaaggagagcaccaucuggaccagcggcagcagcaucagcuucugcggcgugaacagcgacaccgugggcuggagcuggcccgacggcgccgagcugcccuucaccaucgacaaguga

SEQ ID NO: 175081 - RNA, 1350 nt, Artificial Sequence
  derived and/or modified CDS sequence (opt4) from neuraminidase__InfluenzaA__ABE97688
augaaccccaaccagaagaucaucaccaucggcagcaucugcauggugaccggcaucgugagccugaugcugcaggugggcaacaugaucagcaucugggugagccacagcauccacaccggcaaccagcaccaggccgagcccaucagcaacaccaacuuccugaccgagaaggccguggccagcgugaagcuggccggcaacagcagccugugccccaucaacggcugggccguguacagcaaggacaacagcaucagaaucggcagcaagggcgacguguucgugaucagagagcccuucaucagcugcagccaccuggagugcagaaccuucuuccugacccagggcgcccugcugaacgacaagcacagcaacggcaccgugaaggacagaagcccccacagaacccugaugagcugccccgugggcgaggcccccagccccuacaacagcagauucgagagcguggccuggagcgccagcgccugccacgacggcaccagcuggcugaccaucggcaucagcggccccgacaacggcgccguggccgugcugaaguacaacggcaucaucaccgacaccaucaagagcuggagaaacaacauccugagaacccaggagagcgagugcgccugcgugaacggcagcugcuucaccgugaugaccgacggccccagcaacggccaggccagccacaagaucuucaagauggagaagggcaaggugaucaagagcguggagcuggacgcccccaacuaccacuacgaggagugcagcugcuaccccgacgccggcgagaucaccugcgugugcagagacaacuggcacggcagcaacagacccugggugagcuucaaccagaaccuggaguaccagaucggcuacaucugcagcggcguguucggcgacaaccccagacccaacgacggcaccggcagcugcggccccgugagcagcaacggcgccuacggcgugaagggcuucagcuucaaguacggcaacggcgugugggugggcagaaccaagagcaccaacagcagaagcggcuucgagaugaucugggaccccaacggcuggaccgagaccgacagcagcuucagcgugaagcaggacaucguggccaucaccgacuggagcggcuacagcggcagcuucgugcagcaccccgagcugaccggccuggacugcaucagacccugcuucuggguggagcugaucagaggcagacccaaggagagcaccaucuggaccagcggcagcagcaucagcuucugcggcgugaacagcgacaccgugggcuggagcuggcccgacggcgccgagcugcccuucaucaucgacaaguga

SEQ ID NO: 175082 - RNA, 1350 nt, Artificial Sequence
  derived and/or modified CDS sequence (opt4) from neuraminidase__InfluenzaA__ABE97690
augaaccccaaccagaagaucaucaccaucggcagcaucugcauggugaccggcaucgugagccugaugcugcaggugggcaacaugaucagcaucugggugagccacagcauccacaccggcaaccagcaccaggccgagcccaucagcaacaccaacuuccugaccgagaaggccguggccagcgugaagcuggccggcaacagcagccugugccccaucaacggcugggccguguacagcaaggacaacagcaucagaaucggcagcaagggcgacguguucgugaucagagagcccuucaucagcugcagccaccuggagugcagaaccuucuuccugacccagggcgcccugcugaacgacaagcacagcaacggcaccgugaaggacagaagcccccacagaagccugaugagcugccccgugggcgaggcccccagccccuacaacagcagauucgagagcguggccuggagcgccagcgccugccacgacggcaccagcuggcugaccaucggcaucagcggccccgacaacggcgccguggccgugcugaaguacaacggcaucaucaccgacaccaucaagagcuggagaaacaacauccugagaacccaggagagcgagugcgccugcgugaacggcagcugcuucaccgugaugaccgacggccccagcaacggccaggccagccacaagaucuucaagaugaagaagggcaagguggugaagagcguggagcuggacgcccccaacuaccacuacgaggagugcagcugcuaccccgacgccggcgagaucaccugcgugugcagagacaacuggcacggcagcaacagacccugggugagcuucaaccagaaccuggaguaccagaucggcuacaucugcagcggcguguucggcgacaaccccagacccaacgacggcaccggcagcugcggccccgugagcagcaacggcgccuacggcgugaagggcuucagcuucaaguacggcaacggcguguggaucggcagaaccaagagcaccaacagcagaagcggcuucgagaugaucugggaccccaacggcuggaccgagaccgacagcagcuucagcgugaagcaggacaucguggccaucaccgacuggagcggcuacagcggcagcuucgugcagcaccccgagcugaccggccuggacugcaucagacccugcuucuggguggagcugaucagaggcagacccaaggagagcaccaucuggaccagcggcagcagcaucagcuucugcggcgugaacagcgacaccgugggcuggagcuggcccgacggcgccgagcugcccuucaccaucgacaaguga

SEQ ID NO: 175083 - RNA, 1350 nt, Artificial Sequence
  derived and/or modified CDS sequence (opt4) from neuraminidase__InfluenzaA__ABE97691
augaaccccaaccagaagaucaucaccaucggcagcaucugcauggugaccggcaucgugagccugaugcugcaggugggcaacaugaucagcaucugggugagccacagcauccacaccggcaaccagcaccaggccgagcccaucagcaacaccaacuuccugaccgagaaggccguggccagcgugaagcuggccggcaacagcagccugugccccaucaacggcugggccguguacagcaaggacaacagcaucagaaucggcagcaagggcgacguguucgugaagagagagcccugcaucagcugcagccaccugaagugcagaaccuucuuccugacccagggcgcccugcugaacgacaagcacagcaacggcaccgugaaggacagaagcccccacagaacccugaugagcugccccgugggcgaggcccccagccccuacaacagcagauucgagagcguggccuggagcgccagcgccugccacgacggcaccagcuggcugaccaucggcaucagcggccccgacaacggcgccguggccgugcugaaguacaacggcaucaucaccgacaccaucaagagcuggagaaacaacauccugagaacccaggagagcgagugcgccugcgugaacggcagcugcuucaccgugaugaccgacggccccagcaacggccaggccagccacaagaucuucaagauggagaagggcaagguggugaagagcguggagcuggacgcccccaacuaccacuacgaggagugcagcugcuaccccgacgccggcgagaucaccugcgugugcagagacaacuggcacggcagcaacagacccugggugagcuucaaccagaaccuggaguaccagaucggcuacaucugcagcggcguguucggcgacaaccccagacccaacgacggcaccggcagcugcggccccgugagcagcaacggcgccuacggcgugaagggcuucagcuucaaguacggcaacggcguguggaucggcagaaccaagagcaccaacagcagaagcggcuucgagaugaucugggaccccaacggcuggaccgagaccgacagcagcuucagcgugaagcaggacaucguggccaucaccgacuggagcggcuacagcggcagcuucgugcagcaccccgagcugaccggccuggacugcaucagacccugcuucuggguggagcugaucagaggcagacccaaggagagcaccaucuggaccagcggcagcagcaucagcuucugcggcgugaacagcgacaccgugggcuggagcuggcccgacggcgccgagcugcccuucaccaucgacaaguga

SEQ ID NO: 175084 - RNA, 1350 nt, Artificial Sequence
  derived and/or modified CDS sequence (opt4) from neuraminidase__InfluenzaA__ABE97694
augaaccccaaccagaagaucaugaccaucggcagcaucugcauggugaccggcaucgugagccugaugcugcaggugggcaacaugaucagcaucugggugagccacagcauccacaccggcaaccagcaccaggccgagcccaucagcaacaccaacuuccugaccgagaaggccguggacagcgugaagcuggccggcaacagcagccugugccccaucaacggcugggccguguacagcaaggacaacagcaucagaaucggcagcaagggcgacguguucgugaucagagagcccagcgugagcugcagccaccuggagugcagaaccuucuuccugacccagggcgcccugcugaacgacaagcacagcaacggcaccgugaaggacagaagcccccacagaacccugaugagcugccccgugggcgaggcccccagccccuacaacagcagauucgagagcguggccuggagcgccagcgccugccacgacggcaccagcuggcugaccaucggcaucagcggccccgacaacggcgccguggccgugcugaaguacaacggcaucaucaccgacaccaucaagagcuggagaaacaacauccugagaacccaggagagcgagugcgccugcgugaacggcagcugcuucaccgugaugaccgacggccccagcaacggccaggccagccacaagaucuucaagauggagaagggcaagguggugaagagcguggagcuggacgcccccaacuaccacuacgaggagugcagcugcuaccccgacgccggcgagaucaccugcgugugcagagacaacuggcacggcagcaacagacccugggugagcuucaaccagaaccuggaguaccagaucggcuacaucugcagcggcguguucggcgacaaccccagacccaacgacggcaccggcagcugcggccccgugagcagcaacggcgccuacggcgugaagggcuucagcuucaaguacggcaacggcguguggaucggcagaaccaagagcaccaacagcagaagcggcuucgagaugaucugggaccccaacggcuggaccgagaccgacagcagcuucagcgugaagcaggacgugguggccaucaccgacuggagcggcuacagcggcagcuucgugcagcaccccgagcugaccggccuggacugcaucagacccugcuucuggguggagcugaucagaggcagacccaaggagagcaccaucuggaccagcggcagcagcaucagcuucugcggcgugaacagcgacaccgugggcuggagcuggcccgacggcgccgagcugcccuucaccaucgacaaguga

SEQ ID NO: 175085 - RNA, 1350 nt, Artificial Sequence
  derived and/or modified CDS sequence (opt4) from neuraminidase__InfluenzaA__ABE97696
augaaccccaaccagaagaucaucaccaucggcagcaucugcauggugaccggcaucgugagccugaugcugcaggugggcaacaugaucagcaucugggugagccacagcauccacaccggcaaccagcaccaggccgagcccaucagcaacaccaacuuccugaccgagaaggccguggccagcgugaagcuggccggcaacagcagccugugccccaucaacggcugggccguguacagcaaggacaacagcaucagaaucggcagcaagggcgacguguucgugaucagagagcccuucaucagcugcagccaccuggagugcagaaccuucuuccugacccagggcgcccugcugaacgacaagcacagcaacggcagcgugaaggacagaagcccccacagaacccugaugagcugcagcgugggcgaggcccccagccccuacaacagcagauucgagagcguggccuggagcgccagcgccugccacgacggcaccagcuggcugaccaucggcaucagcggccccgacaacggcgccguggccgugcugaaguacaacggcaucaucaccgacaccaucaagagcuggagaaacaacauccugagaacccaggagagcgagugcgccugcgugaacggcagcugcuucaccgugaugaccgacggccccagcaacggccaggccagccacaagaucuucaagauggagaagggcaagguggugaagagcguggagcuggacgcccccaacuaccacuacgaggagugcagcugcuaccccgacgccggcgagaucaccugcgugugcagagacaacuggcacggcagcaacagacccugggugagcuucaaccagaaccuggaguaccagaucggcuacaucugcagcggcguguucggcgacaaccccagacccaacgacggcaccggcagcugcggccccgugagcagcaacggcgccuacggcgugaagggcuucagcuucaaguacggcaacggcguguggaucggcagaaccaagagcaccaacagcagaagcggcuucgagaugaucugggaccccaacggcuggaccgagaccgacagcagcuucagcgugaagcaggacaucguggccaucaccgacuggagcggcuacagcggcagcuucgugcagcaccccgagcugaccggccuggacugcaucagacccugcuucuggguggagcugaucagaggcagacccaaggagagcaccaucuggaccagcggcagcagcaucagcuucugcggcgugaacagcgacaccgugggcuggagcuggcccgacggcgccgagcugcccuucaccaucgacaaguga

SEQ ID NO: 175086 - RNA, 1350 nt, Artificial Sequence
  derived and/or modified CDS sequence (opt4) from neuraminidase__InfluenzaA__ABE97697
augaaccccaaccagaagaucaucaccaucggcagcaucugcauggugaccggcaucgugagccugaugcugcaggugggcaacaugaucagcaucugggugagccacagcauccacaccggcaaccagcaccaggccgagcccaucagcaacaccaacuuccugaacgagaaggccguggccagcgugaagcuggccggcaacagcagccugugccccaucaacggcugggccguguacagcaaggacaacagcaucagaaucggcagcaagggcgacguguucgugaucagagagcccuucaucagcugcagccaccuggagugcagaaccuucuuccugacccagggcgcccugcugaacgacaagcacagcaacggcaccgugaaggacagaagcccccacagaacccugaugagcugccccgugggcgaggcccccagccccuacaacagcagauucgagagcguggccuggagcgccagcgccugccacgacggcaccagcuggcugaccaucggcaucagcggccccgacaacggcgccguggccgugcugaaguacaacggcaucaucaccgacaccaucaagagcuggagaaacaacauccugagaacccaggagagcgagugcgccugcgugaacggcagcugcuucaccgugaugaccgacggccccagcaacggccaggccagccacaagaucuucaagauggagaagggcaagguggugaagagcguggagcuggacgcccccaacuaccacuacgaggagugcagcugcuaccccgacgccggcgagaucaccugcgugugcagagacaacuggcacggcagcaacagacccugggugagcuucaaccagaaccuggaguaccagaucggcuacaucugcagcggcguguucggcgacaaccccagacccaacgacgagaccggcagcugcggccccgugagcagcaacggcgccuacggcgugaagggcuucagcuucaaguacggcaacggcguguggaucggcagaaccaagagcaccaacagcagaagcggcuucgagaugaucugggaccccaacggcuggaccgagaccgacagcagcuucagcgugaagcaggacaucguggccaucaccgacuggagcggcuacagcggcagcuucgugcagcaccccgagcugaccggccuggacugcaucagacccugcuucuggguggagcugaucagaggcagacccaaggagagcaccaucuggaccagcggcagcagcaucagcuucugcggcgugaacagcgacaccgugggcuggagcuggcccgacggcgccgagcugcccuucaccaucgacaaguga

SEQ ID NO: 175087 - RNA, 1350 nt, Artificial Sequence
  derived and/or modified CDS sequence (opt4) from neuraminidase__InfluenzaA__ABE97702
augaaccccaaccagaagaucaucaccaucggcagcaucugcauggugaccggcaucgugagccugaugcugcaggugggcaacaugaucagcaucugggugagccacagcauccacaccggcaaccagcaccaggccgagcccaucagcaacaccaacuuccugaccgagaaggccguggccagcgugaagcuggccggcaacagcagccugugccccaucaacggcugggccguguacagcaaggacaacagcaucagaaucggcagcaagggcgacguguucgugaucagagagcccuucaucagcugcagccaccuggagugcagaaccuucuuccugacccagggcgcccugcugaacgacaagcacagcaacggcaccgugaaggacagaagcccccacagaacccugaugagcugccccgugggcgaggcccccagccccuacaacagcagauucgagagcguggccuggagcgccagcgccugccacgacggcaccagcuggcugaccaucggcaucagcggccccgacaacggcgccguggccgugcugaaguacaacggcaucaucaccgacaccaucaagagcuggagaaacaacauccugagaacccaggagagcgagugcgccugcgugaacggcagcugcuucaccgugaugaccgacggccccagcaacggccaggccagccacaagaucuucaagauggagaagggcaagguggugaagagcguggagcuggacgcccccuacuaccacuacgaggagugcagcugcuaccccgacgccggcgagaucaccugcgugugcagagacaacuggcacggcagcaacagacccugggugagcuucaaccagaaccuggaguaccagaucggcuacaucugcagcggcguguucggcgacaaccccagacccaacgacggcaccggcagcugcggccccgugagcagcaacggcgccuacggcgugaagggcuucagcuucaaguacggcaacggcguguggaucggcagaaccaagagcaccaacagcagaagcggcuucgagaugaucugggaccccaacggcuggaccgagaccgacagcagcuucagcgugaagcaggacaucgugagcaucaccgacuggagcggcuacagcggcagcuucgugcagcaccccgagcugaccggccuggacugcaucagacccugcuucuggguggagcugaucagaggcagacccaaggagagcaccaucuggaccagcggcagcagcaucagcuucugcggcgugaacagcgacaccgugggcuggagcuggcccgacggcgccgagcugcccuucaccaccgacaaguga

SEQ ID NO: 175088 - RNA, 1350 nt, Artificial Sequence; identical to SEQ ID NO: 175080
  derived and/or modified CDS sequence (opt4) from neuraminidase__InfluenzaA__ABE97703

SEQ ID NO: 175089 - RNA, 1350 nt, Artificial Sequence; identical to SEQ ID NO: 175080
  derived and/or modified CDS sequence (opt4) from neuraminidase__InfluenzaA__ABE97705

SEQ ID NO: 175090 - RNA, 1350 nt, Artificial Sequence
  derived and/or modified CDS sequence (opt4) from neuraminidase__InfluenzaA__ABE97706
augaaccccaaccagaagaucaucaccaucggcagcaucugcauggugaccggcaucgugagccugaugcugcaggugggcaacaugaucagccugugggugagccacagcauccacaccggcaaccagcaccaggccgagcccaucagcaacaccaacuuccugaccgagagagccguggccagcgugaagcuggccggcaacagcagccugugccccaucaacggcugggccguguacagcaaggacaacagcaucagaaucggcagcaagggcgacguguucgugaucagagagcccuucaucagcugcagccaccuggagugcagaaccuucuuccugacccagggcgcccugcugaacgacaagcacagcaacggcaccgugaaggacagaagcccccacagaacccugaugagcugccccgugggcgaggcccccagccccuacaacagcagauucgagagcguggccuggagcgccagcgccugccacgacggcaccagcuggcugaccaucggcaucagcggccccgacaacggcgccguggccgugcugaaguacaacggcaucaucaccgacaccaucaagagcuggagaaacaacauccugagaacccaggagagcgagugcgccugcgugaacggcagcugcuucaccgugaugaccgacggccccagcaacggccaggccagccacaagaucuucaagauggagaagggcaagguggugaagagcguggagcuggacgcccccaacuaccacuacgaggagugcagcugcuaccccgacgccggcgagaucaccugcgugugcagagacaacuggcacggcagcaacagacccugggugagcuucaaccagaaccuggaguaccagaucggcuacaucugcagcggcguguucggcgacaaccccagacccaacgacggcaccggcagcugcggccccgugagcagcaacggcgccuacggcgugaagggcuucagcuucaaguacggcaacggcguguggaucggcagaaccaagagcaccagcagcagaagcggcuucgagaugaucugggaccccaacggcuggaccgagaccgacagcagcuucagcgugaagcaggacaucguggccaucaccgacuggagcggcuacagcggcagcuucgugcagcaccccgagcugaccggccuggacugcaucagacccugcuucuggguggagcugaucagaggcagacccaaggagagcaccaucugggccagcggcagcagcaucagcuucugcggcgugaacagcgacaccgugggcuggagcuggcccgacggcgccgagcugcccuucaccaucgacaaguga

SEQ ID NO: 175091 - RNA, 1350 nt, Artificial Sequence
  derived and/or modified CDS sequence (opt4) from neuraminidase__InfluenzaA__ABE97707
augaaccccaaccagaagaucaucaccaucggcagcaucugcauggugaccggcaucgugagccugaugcugcaggugggcaacaugaucagcaucugggugagccacagcauccacaccggcaaccagcaccaggccgagcccaucagcaacaccaacuuccugaccgagaaggccguggccagcgugaagcuggccggcaacagcagccugugccccaucaagggcugggccguguacagcaaggacaacagcaucagaaucggcagcaagggcgacguguucgugaucagagagcccuucaucagcugcagccaccuggagugcagaaccuucuuccugacccagggcgcccugcugaacgacaagcacagcaacggcaccgugaaggacagaagcccccacagaacccugaugagcugccccgugggcgaggcccccagccccuacaacagcagauucgagagcguggccuggagcgccagcgccugccacgacggcaccagcuggcugaccaucggcaucagcggccccgacaacggcgccguggccgugcugaaguacaacggcaucaucaccgacaccaucaagagcuggagaaacaacauccugagaacccaggagagcgagugcgccugcgugaacggcagcugcuucaccgugaugaccgacggccccagcaacggccaggccagccacaagaucuucaagauggagaagggcaagguggugaagagcguggagcuggacgcccccaacuaccacuacgaggagugcagcugcuaccccgacgccggcgagaucaccugcgugugcagagacaacuggcacggcagcaacagacccugggugagcuucaaccagaaccuggaguaccagaucggcuacaucugcagcggcguguucggcgacaaccccagacccaacgacggcaccggcagcugcggccccgugagcagcaacggcgccuacggcgugaagggcuucagcuucaaguacggcaacggcguguggaucggcagaaccaagagcaccaacagcagaagcggcuucgagaugaucugggaccccaacggcuggaccgagaccgacagcagcuucagcgugaagcaggacaucguggccaucaccgacuggagcggcuacagcggcagcuucgugcagcaccccgagcugaccggccuggacugcaucagacccugcuucuggguggagcugaucagaggcagacccaaggagagcaccaucuggaccagcggcagcagcaucagcuucugcggcgugaacagcgacaccgugggcuggagcuggcccgacggcgccgagcugcccuucaccaucgacaaguga

SEQ ID NO: 175092 - RNA, 1350 nt, Artificial Sequence
  derived and/or modified CDS sequence (opt4) from neuraminidase__InfluenzaA__ABE97708
augaaccccaaccagaagaucaucaccaucggcagcaucugcauggugaccggcaucgugagccugaugcugcaggugggcaacaugaucagcaucugggugagccacagcauccacaccggcaaccagcaccaggccgagcccaucagcaacaccaacuuccugaccgagaaggccguggccagcgugaagcuggccggcaacagcagccugugccccaucaacggcugggccguguacagcaaggacaacagcaucagaaucggcagcaagggcgacguguucgugaucagagagcccuucaucagcugcagccaccuggagugcagaaccuucuuccugacccacggcgcccugcugaacgacaagcacagcaacggcaccgugaaggacagaagcccccacagaacccugaugagcugccccgugggcgaggcccccagccccuacaacagcagauucgagagcguggccuggagcgccagcgccugccacgacggcaccagcuggcugaccaucggcaucagcggccccgacaacggcgccguggccgugcugaaguacaacggcaucaucaccgacaccaucaagagcuggagaaacaacauccugagaacccaggagagcgagugcgccugcgugaacggcagcugcuucaccgugaugaccgacggccccagcaacggccaggccagccacaagaucuucaagaugaagaagggcaagguggugaagagcguggagcuggacgcccccaacuaccacuacgaggagugcagcugcuaccccgacgccggcgagaucaccugcgugugcagagacaacuggcacggcagcaacagacccugggugagcuucaaccagaaccuggaguaccagaucggcuacaucugcagcggcguguucggcgacaaccccagacccaacgacggcaccggcagcugcggccccgugagcagcaacggcgccuacggcgugaagggcuucagcuucaaguacggcaacggcguguggaucggcagaaccaagagcaccaacagcagaagcggcuucgagaugaucugggaccccaacggcuggaccgagaccgacagcagcuucagcgugaagcaggacaucguggccaucaccgacuggagcggcuacagcggcagcuucgugcagcaccccgagcugaccggccuggacugcaucagacccugcuucuggguggagcugaucagaggcagacccaaggagagcaccaucuggaccagcggcagcagcaucagcuucugcggcgugaacagcgacaccgugggcuggagcuggcccgacggcgccgagcugcccuucaccaucgacaaguga

SEQ ID NO: 175093 - RNA, 1350 nt, Artificial Sequence
  derived and/or modified CDS sequence (opt4) from neuraminidase__InfluenzaA__ABE97710
augaaccccaaccagaagaucaucaccaucggcagcaucugcauggugaccggcaucgugagccugaugcugcaggugggcaacaugaucagcaucugggugagccacagcauccacaccggcaaccagcaccaggccgagcccaucagcaacaccaacuuccugaccgagaaggccguggccagcgugaagcuggccggcaacagcagccugugccccaucaacggcugggccguguacagcaaggacaacagcaucagaaucggcagcaagggcgacguguucgugaucagagagcccuucaucagcugcagccaccuggagugcagaaccuucuuccugacccagggcgcccugcugaacgacaagcacagcaacggcaccgugaaggacagaagcccccacagaacccugaugagcugccccgugggcgaggcccccagccccuacaacagcagauucgagagcguggccuggagcgccagcgccugccacgacggcaccagcuggcugaccaucggcaucagcggccccgacaacggcgccguggccgugcugaaguacaacggcaucaucaccgacaccaucaagagcuggagaaacaacauccugagaacccaggagagcgagugcgccugcgugaacggcagcugcuucaccgugaugaccgacggccccagcaacggccaggccagccacaagaucuucaagauggagaagggcaagguggugaagagcguggagcugaacgcccccaacuaccacuacgaggagugcagcugcuaccccgacgccggcgagaucaccugcgugugcagagacaacuggcacggcagcaacagacccugggugagcuucaaccagaaccuggaguaccagaucggcuacaucugcagcggcguguucggcgacaaccccagacccaacgacggcaccggcagcugcggccccgugagcagcaacggcgccuacggcgugaagggcuucagcuucaaguacggcaacggcguguggaucggcagaaccaagagcaccaacagcagaagcggcuucgagaugaucugggaccccaacggcuggaccgagaccgacagcagcuucagccugaagcaggacaucguggccaucaccgacuggagcggcuacagcggcagcuucgugcagcaccccgagcugaccggccuggacugcaucagacccugcuucuggguggagcugaucagaggcagacccaaggagagcaccaucuggaccagcggcagcagcaucagcuucugcggcgugaacagcgacaccgugggcuggagcuggcccgacggcgccgagcugcccuucaccaucgacaaguga

SEQ ID NO: 175094 - RNA, 1350 nt, Artificial Sequence
  derived and/or modified CDS sequence (opt4) from neuraminidase__InfluenzaA__ABE97711
augaaccccaaccagaagaucaucaccaucggcagcaucugcauggugaccggcaucgugagccugaugcugcaggugggcaacaugaucagcaucugggugagccacagcauccacaccggcaaccagcaccaggccgagcccaucagcaacaccaacuuccugaccgagaaggccguggccagcgugaagcuggccggcaacagcagccugugccccaucaacggcugggccguguacagcaaggacaacagcaucagaaucggcagcaagggcgacguguucgugaucagagagcccuucaucagcugcagccaccuggagugcagaaccuucuuccugacccagggcgcccugcugaacgacaagcacagcaacggcaccgugaaggacagaagcccccacagaacccugaugagcugccccgugggcgaggcccccagccccuacaacagcagauucgagagcguggccuggagcgccagcgccugccacgacggcaccagcuggcugaccaucggcaucagcggccccgacaacggcgccguggccgugcugaaguacaacggcaucaucaccgacaccaucaagagcuggagaaacaacauccugagaacccaggagagcgagugcgccugcgugaacggcagcugcuucaccgugaugaccgacggccccagcgacggccaggccagccacaagaucuucaagauggagaagggcaagguggugaagagcguggagcuggacgcccccaacuaccacuacgaggagugcagcugcuaccccgacgccggcgagaucaccugcgugugcagagacaacuggcacggcagcaacagacccugggugagcuucaaccagaaccuggaguaccagaucggcuacaucugcagcggcguguucggcgacaaccccagacccaacgacggcaccggcagcugcggccccgugagcagcaacggcgccuacggcgugaagggcuucagcuucaaguacggcaacggcguguggaucggcagaaccaagagcaccaacagcagaagcggcuucgagauggugugggaccccaacggcuggaccgagaccgacagcagcuucagcgugaagcaggacaucguggccaucaccgacuggagcggcuacagcggcagcuucgugcagcaccccgagcugaccggccuggacugcaucagacccugcuucuggguggagcugaucagaggcagacccaaggagagcaccaucuggaccagcggcagcagcaucagcuucugcggcgugaacagcgacaccgugggcuggagcuggcccgacggcgccgagcugcccuucaccaucgacaaguga

SEQ ID NO: 175095 - RNA, 1350 nt, Artificial Sequence; identical to SEQ ID NO: 175080
  derived and/or modified CDS sequence (opt4) from neuraminidase__InfluenzaA__ABE97712

SEQ ID NO: 175096 - RNA, 1350 nt, Artificial Sequence; identical to SEQ ID NO: 175080
  derived and/or modified CDS sequence (opt4) from neuraminidase__InfluenzaA__ABE97713

SEQ ID NO: 175097 - RNA, 1350 nt, Artificial Sequence; identical to SEQ ID NO: 175080
  derived and/or modified CDS sequence (opt4) from neuraminidase__InfluenzaA__ABE97715

SEQ ID NO: 175098 - RNA, 1350 nt, Artificial Sequence
  derived and/or modified CDS sequence (opt4) from neuraminidase__InfluenzaA__ABE97717
augaaccccaaccagaagaucaucaccaucggcagcaucugcauggugaccggcaucgugaaccugaugcugcaggugggcaacaugaucagcaucugggugagccacagcauccacaccggcaaccagcaccaggccgagcccaucagcaacaccaacuuccugaccgagaaggccguggccagcgugaagcuggccggcaacagcagccugugccccaucaacggcugggccguguacagcaaggacaacagcaucagaaucggcagcaagggcgacguguucgugaucagagagcccuucaucagcugcagccaccuggagugcagaaccuucuuccugacccagggcgcccugcugaacgacaagcacagcaacggcaccgugaaggacagaagcccccacagaacccugaugagcugccccgugggcgaggcccccagccccuacaacagcagauucgagagcguggccuggagcgccagcgccugccacgacggcaccagcuggcugaccaucggcaucagcggccccgacaacggcgccguggccgugcugaaguacaacggcaucaucaccgacaccaucaagagcuggagaaacaacauccugagaacccaggagagcgagugcgccugcgugaacggcagcugcuucaccgugaugaccgacggccccagcaacggccaggccagccacaagaucuucaagauggagaagggcaagguggugaagagcguggagcuggacgcccccaacuaccacuacgaggagugcagcugcuaccccgacgccggcgagaucaccugcgugugcagagacaacuggcacggcagcaacagacccugggugagcuucaaccagaaccuggaguaccagaucggcuacaucugcagcggcguguucggcgacaaccccagacccaacgacggcaccggcagcugcggccccgugcccagcaacggcgccuacggcgugaagggcuucagcuucaaguacggcaacggcguguggaucggcagaaccaagagcaccaacagcagaagcggcuucgagaugaucugggaccccaacggcuggaccgagaccgacagcagcuucagcgugaagcaggacaucguggccaucaccgacuggagcggcuacagcggcagcuucgugcagcaccccgagcugaccggccuggacugcaucagacccugcuucuggguggagcugaucagaggcagacccaaggagagcaccaucuggaccagcggcagcagcaucagcuucugcggcgugaacagcgacaccgugggcuggagcuggcccgacggcgccgagcugcccuucaccaucgacaaguga

SEQ ID NO: 175099 - RNA, 1350 nt, Artificial Sequence
  derived and/or modified CDS sequence (opt4) from neuraminidase__InfluenzaA__ABE97718
augaaccccaaccagaagaucaucaccaucggcagcaucugcauggugaccggcaucgugagccugaugcugcaggugggcaacaugaucagcaucugggugagccacagcauccacaccggcaaccagcaccaggccgagcccaucagcaacaccaacuuccugaccgagaaggccguggccagcgugaagcuggccggcaacagcagccugugccccaucaacggcugggccguguacagcaaggacaacagcaucagaaucggcagcaagggcgacguguucgugaucagagagcccuucaucagcugcagccaccuggagugcagaaccuucuuccugacccagggcgcccugcugaacgacaagcacagcaacggcaccgugaaggacagaagcccccacagaacccugaugagcugccccgugggcgaggcccccagccccuacaacagcagauucgagagcguggccuggagcgccagcgccugccacgacggcaccagcuggcugaccaucggcaucagcggccccgacaacggcgccguggccgugcugaaguacaacggcaucaucaccgacaccaucaagagcuggagaaacaacauccugagaacccaggagagcgagugcgccugcgugaacggcagcugcuucaccgugaugaccgacggccccagcaacggccaggccagccacaagaucuucaagauggagaagggcaagguggugaagagcguggagcuggacgcccccaacuaccacuacgaggagugcagcugcuaccccgacgccggcgagaucaccugcgugugcagagacaacuggcacggcagcaacagacccugggugagcuucaaccagaaccuggaguaccagaucggcuacaucugcagcggcguguucggcgacaaccccagacccaacgacggcaccggcagcugcggccccgugagcagcaacggcgccuacggcgugaagggcuucagcuucaaguacggcaacggcguguggaucggcagaaccaagagcaccaacagcagaagcggcuucgagaugaucugggaccccaacggcuggaccgagaccgacagcagcuucagcgugaagcaggacaucguggccaucaccgacuggagcggcuacagcggcagcuucgugcagcaccccgagcugaccggccuggacugcaucagacccugcuucuggguggagcugaucagaggcagacccaaggagagcaccaucuggaccagcggcagcagcaucagcuucugcggcguggacagcgacaccgugggcuggagcuggcccgacggcgccgagcugcccuucaccaucgacaaguga

SEQ ID NO: 175100 - RNA, 1350 nt, Artificial Sequence
  derived and/or modified CDS sequence (opt4) from neuraminidase__InfluenzaA__ABE97719
augaaccccaaccagaagaucaucaccaucggcagcaucugcauggugaccggcaucgugagccugaugcugcaggugggcaacaugaucagcaucugggugagccacagcauccacaccggcaaccagcaccaggccgagcccaucagcaacaccaacuuccugaccgagaaggccguggccagcgugaagcuggccggcaacagcagccugugccccaucaacggcugggccguguacagcaaggacaacagcaucagaaucggcagcaagggcgacguguucgugaucagagagcccuucaucagcugcagccaccuggagugcagaaccuucuuccugacccagggcgcccugcugaacgacaagcacagcaacggcaccgugaaggacagaagcccccacagaacccugaugagcugccccgugggcgaggcccccagccccuacaacagcagauucgagagcguggccuggagcgccagcgccugccacgacggcaccagcuggcugaccaucggcaucagcggccccgacaacggcgccguggccgugcugaaguacaacggcaucaucaccgacaccaucaagagcuggagaaacaacauccugagaacccaggagagcgagugcgccugcgugaacggcagcugcuucaccgugaugaccgacggccccagcaacggccaggccagccacaagaucuucaagaugaagaagggcaagguggugaagagcguggagcuggacgcccccaacuaccacuacgaggagugcagcugcuaccccgacgccggcgagaucaccugcgugugcagagacaacuggcacggcagcaacagacccugggugagcuucaaccagaaccuggaguaccagaucggcuacaucugcagcggcguguucggcgacaaccccagacccaacgacggcaccggcagcugcggccccgugagcagcaacggcgccuacggcgugaagggcuucagcuucaaguacggcaacggcguguggaucggcagaaccaagagcaccaacagcagaagcggcuucgagaugaucugggaccccaacggcuggaccgagaccgacagcagcuucagcgugaagcaggacaucguggccaucaccgacuggagcggcuacagcggcagcuucgugcagcaccccgagcugaccggccuggacugcaucagacccugcuucuggguggagcugaucagaggcagacccaaggagagcaccaucuggaccagcggcagcagcaucagcuucugcggcgugaacagcgacaccgugggcuggagcuggcccgacggcgccgagcugcccuucaccaucgacaaguga

SEQ ID NO: 175101 - RNA, 1350 nt, Artificial Sequence
  derived and/or modified CDS sequence (opt4) from neuraminidase__InfluenzaA__ABE97720
augaaccccaaccagaagaucaucaccaucggcagcaucugcauggugaccggcaucgugagccugaugcugcaggugggcaacaugaucagcaucugggugagccacagcauccacaccggcaaccagcaccaggccgagcccaucagcaacgccaacuuccugaccgagaaggccguggccagcgugaagcuggccggcaacagcagccugugccccaucaacggcugggccguguacagcaaggacaacagcaucagaaucggcagcaagggcgacguguucgugaucagagagcccuucaucagcugcagccaccuggagugcagaaccuucuuccugacccagggcgcccugcugaacgacaagcacagcaacggcaccgugaaggacagaagcccccacagaacccugaugagcugccccgugggcgaggcccccagccccuacaacagcagauucgagagcguggccuggagcgccagcgccugccacgacggcaccagcuggcugaccaucggcaucagcggccccgacaacggcgccguggccgugcugaaguacaacggcaucaucaccgacaccaucaagagcuggagaaacaacauccugagaacccaggagagcgagugcgccugcgugaacggcagcugcuucaccgugaugaccgacggccccagcaacggccaggccagccacaagaucuucaagauggagaagggcaagguggugaagagcguggagcuggacgcccccaacuaccacuacgaggagugcagcugcuaccccgacgccggcgagaucaccugcgugugcagagacaacuggcacggcagcaacagacccugggugagcuucaaccagaaccuggaguaccagaucggcuacaucugcagcggcguguucggcgacacccccagacccaacgacggcaccggcagcugcggccccgugagcagcaacggcgccuacggcgugaagggcuucagcuucaaguacggcaacggcguguggaucggcagaaccaagagcaccaacagcagaagcggcuucgagaugaucugggaccccaacggcuggaccgagaccgacagcagcuucagcgugaagcaggacaucguggccaucaccgacuggagcggcuacagcggcagcuucgugcagcaccccgagcugaccggccuggacugcaucagacccugcuucuggguggagcugaucagaggcagacccaaggagagcaccaucuggaccagcggcagcagcaucagcuucugcggcgugaacagcgacaccgugggcuggagcuggcccgacggcgccgagcugcccuucaccaucgacaaguga

SEQ ID NO: 175102 - RNA, 1410 nt, Artificial Sequence; identical to SEQ ID NO: 174873
  derived and/or modified CDS sequence (opt4) from neuraminidase__InfluenzaA__ABF47553

SEQ ID NO: 175103 - RNA, 1413 nt, Artificial Sequence; identical to SEQ ID NO: 174456
  derived and/or modified CDS sequence (opt4) from neuraminidase__InfluenzaA__ABF47564

SEQ ID NO: 175104 - RNA, 1413 nt, Artificial Sequence
  derived and/or modified CDS sequence (opt4) from neuraminidase__InfluenzaA__ABF47575
augaaccccaaccagaagaucaucaccaucggcagcaucagcaucgccaucggcaucaucagccugaugcugcagaucggcaacaucaucagcaucugggccagccacagcauccagaccggcagccagaaccacaccggcgugugcaaccagagaaucaucaccuacgagaacagcaccugggugaaccacaccuacgugaacaucaacaacaccaacgugaucgccggcaaggacaagaccagcguggcccuggccggcaacagcagccugugcagcaucagcggcugggccaucuacaccaaggacaacagcaucagaaucggcagcaagggcgacguguucgugaucagagagcccuucaucagcugcagccacuucgagugcagaaccuucuuccugacccagggcgcccugcugaacgacaagcacagcaacggcaccgugaaggacagaagccccuacagagcccugaugagcugcccccugggcgaggcccccagccccuacaacagcaaguucgagagcguggccuggagcgccagcgccugccacgacggcaugggcuggcugaccaucggcaucagcggccccgacaacggcgccguggccgugcugaaguacaacggcaucaucaccgagaccaucaagagcuggaagaagcagauccugagaacccaggagagcgagugcgugugcgugaacggcagcugcuucaccaucaugaccgacggccccagcaacggcgccgccagcuacaagaucuucaagaucgagaagggcaaggugaccaagagcaucgagcugaacgcccccaacuuccacuacgaggagugcagcugcuaccccgacaccggcaccgugaugugcgugugcagagacaacuggcacggcagcaacagacccugggugagcuucaaccagaaccuggacuaccagaucggcuacaucugcagcggcguguucggcgacaaccccagacccaaggacggcgagggcagcugcaaccccgugaccguggacggcgccaacggcgugaagggcuucagcuacaaguacggcaacggcguguggaucggcagaaccaagagcaacagacugagaaagggcuucgagaugaucugggaccccaacggcuggaccgacaccgacagcgacuucagcgugaagcaggacgugguggccaucaccgacuggagcggcuacagcggcagcuucgugcagcaccccgagcugaccggccuggacugcaucagacccugcuucuggguggagcuggugagaggccugcccaaggagaacaccaccaucuggaccagcggcagcagcaucagcuucugcggcgugaacagcgacaccgccaacuggagcuggcccgacggcgccgagcugcccuucaccaucgacaaguga

SEQ ID NO: 175105 - RNA, 1413 nt, Artificial Sequence; identical to SEQ ID NO: 174456
  derived and/or modified CDS sequence (opt4) from neuraminidase__InfluenzaA__ABF47586

SEQ ID NO: 175106 - RNA, 1410 nt, Artificial Sequence; identical to SEQ ID NO: 174186
  derived and/or modified CDS sequence (opt4) from neuraminidase__InfluenzaA__ABF47597

SEQ ID NO: 175107 - RNA, 1413 nt, Artificial Sequence; identical to SEQ ID NO: 175028
  derived and/or modified CDS sequence (opt4) from neuraminidase__InfluenzaA__ABF47608

SEQ ID NO: 175108 - RNA, 1410 nt, Artificial Sequence
  derived and/or modified CDS sequence (opt4) from neuraminidase__InfluenzaA__ABF47619
augaaccccaaccagaagaucaucaccaucggcagcgugagccugaccaucgccaccaucugcuuccugaugcagaucgccauccuggugaccaccgugacccugcacuucaagcaguacgagugcaacagcccccccaacaaccaggugaugcugugcgagcccaccaucaucgagagaaacaucaccgagaucguguaccugaccaacaccaccaucgagaaggagaucugccccaagcuggccgaguacagaaacuggagcaagccccagugcaagaucaccggcuucgcccccuucagcaaggacaacagcaucagacugagcgccggcggcgacaucugggugaccagagagcccuacgugagcugcgaccccggcaagugcuaccaguucgcccugggccagggcaccacccugaacaacagacacagcaacgacaccgugcacgacagaacccccuacagaacccugcugaugaacgagcugggcgugcccuuccaccugggcaccaagcaggugugcaucgccuggagcagcagcagcugccacgacggcaaggccuggcugcacgugugcgugaccggccacgacgagaacgccaccgccagcuucaucuacgacggcagacugguggacagcaucggcagcuggagcaagaacauccugagaacccaggagagcgagugcgugugcaucaacggcaccugcaccguggugaugaccgacggcagcgccagcggcagagccgacaccaagauccuguucaucgaggagggcaagaucgugcacaucagcccccugagcggcagcgcccagcacguggaggagugcagcugcuaccccagauaccccggcgugagaugcgugugcagagacaacuggaagggcagcaacagacccaucguggacaucaacgugaaggacuacagcaucgugagcagcuacgugugcagcggccuggugggcgacacccccagaaagaacgacagcgccagcagcagccacugccugaaccccaacaacgaggagggcggccacggcgugaagggcugggccuucgacgacggcaacgacguguggaugggcagaaccaucagcgagaagcugagaagcggcuacgagaccuucaaggugaucggcggcuggagcaagcccaacagcaagcugcagaucaacagacaggugaucguggacagaggcaacagaagcggcuacagcggcaucuucagcguggagggcaagagcugcaucaacagaugcuucuacguggagcugaucagaggcagaaagcaggagaccgaggugugguggaccagcaacagcaucgugguguucugcggcaccagcggcaccuacggcaccggcagcuggcccgacggcgccgacaucaaccugaugcccaucuga

SEQ ID NO: 175109 - RNA, 1413 nt, Artificial Sequence
  derived and/or modified CDS sequence (opt4) from neuraminidase__InfluenzaA__ABF47630
augaaccccaaccagaagaucaucaccaucggcagcaucagcaucgccaucggcaucaucagccugauccugcagaucggcaacaucaucagcaucugggccagccacagcauccagaccggcagccagaaccacaccggcaucugcaaccagagaaucaucaccuacgagaacagcaccugggugaaccagaccuacgugaacaucaacaacaccaacgugguggccggcaaggacaagaccagcauggcccuggccggcaacagcagccugugccccaucagaggcugggccaucuacaccaaggacaacagcaucagaaucggcagcaagggcgacguguucgugaucagagagcccuucaucagcugcagccaccuggagugcagaaccuucuuccugacccagggcgcccugcugaacgacaagcacagcaacggcaccgugaaggacagaagccccuacagagcccugaugagcugcccccugggcgaggcccccagccccuacaacagcagauucgagagcguggccuggagcgccagcgccugccacgacggccugggcuggcugaccaucggcaucagcggccccgacaacggcgccguggccgugcugaaguacaacggcaucaucaccgagaccaucaagagcuggaagaagagaauccugagaacccaggagagcgagugcgugugcaugaacggcagcugcuucaccaucaugaccgacggccccagcaacggcgccgccagcuacagaaucuucaagaucgagaagggcagagugaccaagagcaucgagcuggacgcccccaacuaccacuacgaggagugcagcugcuaccccgacaccggcaccgugaugugcgugugcagagacaacuggcacggcagcaacagacccugggugagcuucaaccagaaccuggacuaccagaucggcuacaucugcagcggcguguucggcgacaaccccagacccaaggacggcgagggcagcugcaaccccgugaccguggacggcgccgacggcgugaagggcuucagcuacagauacggcaacggcguguggaucggcagaaccaagagcaacagacugagaaagggcuucgagaugaucugggaccccaacggcuggaccgacaccgacagcgacuucagcaugaagcaggacaucguggccaugaccgacuggagcggcuacagcggcagcuucgugcagcaccccgagcugaccggccuggacugcaugagacccugcuucuggguggagcuggugagaggccugcccagagagaacaccaccaucuggaccagcggcagcagcaucagcuucugcggcgugaacagcgacaccgccaacuggagcuggcccgacggcgccgagcugcccuucaccaucgacaaguga

SEQ ID NO: 175110 - RNA, 1413 nt, Artificial Sequence
  derived and/or modified CDS sequence (opt4) from neuraminidase__InfluenzaA__ABF47652
augaaccccaaccagaagaucaucaccaucggcagcaucagcaucgccaucggcaucaucagccugauccugcagaucggcaacaucaucagcaucugggccagccacagcauccagaccggcagccagaaccacaccggcaucugcaaccagagaaucaucaccuacgagaacagcaccugggugaaccagaccuacgugaacaucaacaacaccaacgugguggccggcaaggacaagaccagcaugacccuggccggcaacagcagccugugccccaucagaggcugggccaucuacaccaaggacaacagcaucagaaucggcagcaagggcgacguguucgugaucagagagcccuucaucagcugcagccaccuggagugcagaaccuucuuccugacccagggcgcccugcugaacgacaagcacagcaacggcaccgugaaggacagaagccccuacagagcccugaugagcugcccccugggcgaggcccccagccccuacaacagcagauucgagagcguggccuggagcgccagcgccugccacgacggccugggcuggcugaccaucggcaucagcggccccgacaacggcgccguggccgugcugaaguacaacggcaucaucaccgagaccaucaagagcuggaagaagagaauccugagaacccaggagagcgagugcgugugcaugaacggcagcugcuucaccaucaugaccgacggccccagcaacggcgccgccagcuacagaaucuucaagaucgagaagggcagagugaccaagagcaucgagcuggacgcccccaacuaccacuacgaggagugcagcugcuaccccaacaccggcaccgugaugugcgugugcagagacaacuggcacggcagcaacagacccugggugagcuucaaccagaaccuggacuaccagaucggcuacaucugcagcggcguguucggcgacaaccccagacccaaggacggcgagggcagcugcaaccccgugaccguggacggcgccgacggcgugaagggcuucagcuacagauacggcaacggcguguggaucggcagaaccaagagcaacagacugagaaagggcuucgagaugaucugggaccccaacggcuggaccgacaccgacagcgacuucagcaugaagcaggacaucguggccaugaccgacuggagcggcuacagcggcagcuucgugcagcaccccgagcugaccggccuggacugcaugagacccugcuucuggguggagcuggugagaggccugcccagagagaacaccaccaucuggaccagcggcagcagcaucagcuucugcggcgugaacagcgacaccgccaacuggagcuggcccgacggcgccgagcugcccuucaccaucgacaaguga

SEQ ID NO: 175111 - RNA, 1413 nt, Artificial Sequence; identical to SEQ ID NO: 175028
  derived and/or modified CDS sequence (opt4) from neuraminidase__InfluenzaA__ABF47663

SEQ ID NO: 175112 - RNA, 1413 nt, Artificial Sequence
  derived and/or modified CDS sequence (opt4) from neuraminidase__InfluenzaA__ABF47674
augaaccccaaccagaagaucaucaccaucggcagcaucagcaucgccaucggcaucaucagccugaugcugcagaucggcaacaucaucagcaucugggccagccacagcauccagaccggcagccagaaccacaccggcgugugcauccagagaaucaucaccuacgagaacagcaccugggugaaccacaccuacgugaacaucaacaacaccaacgugaucgccggcaaggacaagaccagcgugacccuggccggcaacagcagccugugcagcaucagcggcugggccaucuacaccaaggacaacagcaucagaaucggcagcaagggcgacguguucgugaucagagagcccuucaucagcugcagccaccuggagugcagaaccuucuuccugacccagggcgcccugcugaacgacaagcacagcaacggcaccgugaaggacagaagccccuacagagcccugaugagcugcccccugggcgaggcccccagccccuacaacagcaaguucgagagcguggccuggagcgccagcgccugccacgacggcaugggcuggcugaccaucggcaucagcggccccgacaacggcgccguggccgugcugaaguacaacggcaucaucaccgagaccaucaagagcuggaagaagcagauccugagaacccaggagagcgagugcgugugcgugaacggcagcugcuucaccaucaugaccgacggccccagcaacggcgccgccagcuacaagaucuucaagaucgagaagggcaaggugaccaagagcaucgagcugaacgcccccaacuuccacuacgaggagugcagcugcuaccccgacaccggcaccgugaugugcgugugcagagacaacuggcacggcagcaacagacccugggugagcuucaaccagaaccuggacuaccagaucggcuacaucugcagcggcguguucggcgacaaccccagacccaaggacggcgagggcagcugcaaccccgugaccguggacggcgccaacggcgugaagggcuucagcuacaaguacggcaacggcguguggaucggcagaaccaagagcaacagacugagaaagggcuucgagaugaucugggaccccaacggcuggaccgacaccgacagcgacuucagcgugaagcaggacgugguggccaucaccgacuggagcggcuacagcggcagcuucgugcagcaccccgagcugaccggccuggacugcaucagacccugcuucuggguggagcuggugagaggccugcccaaggagaacaccaccaucuggaccagcggcagcagcaucagcuucugcggcgugaacagcgacaccgccaacuggagcuggcccgacggcgccgagcugcccuucaccaucgacaaguga

SEQ ID NO: 175113 - RNA, 1413 nt, Artificial Sequence; identical to SEQ ID NO: 175011
  derived and/or modified CDS sequence (opt4) from neuraminidase__InfluenzaA__ABF47696

SEQ ID NO: 175114 - RNA, 1413 nt, Artificial Sequence
  derived and/or modified CDS sequence (opt4) from neuraminidase__InfluenzaA__ABF47707
augaaccccaaccagaagaucaucaccaucggcagcaucugcauggccaucggcaucaucagccugauccugcagaucggcaacaucaucagcaucugggugagccacagcauccagaccggcagccagaaccacaccggcaucugcaaccagagaaucaucaccuacgagaacagcaccugggugaaccagaccuacgugaacaucagcaacaccaacgugguggccggcaagggcaccaccagcaugacccuggccggcaacagcagccugugccccaucagaggcugggccaucuacagcaaggacaacagcaucagaaucggcagcaagggcgacguguucgugaucagagagcccuucaucagcugcagccaccuggagugcagaaccuucuuccugacccagggcgcccugcugaacgacaagcacagcaacggcaccgugaaggacagaagccccuacagagcccugaugagcugccccaucggcgaggcccccagccccuacaacagcagauucgagagcguggccuggagcgccagcgccugccacgacggcaugggcuggcugaccaucggcaucagcggccccgacgacggcgccguggccgugcugaaguacaacggcaucaucaccgagaccaucaagagcuggagaaagcagauccugagaacccaggagagcgagugcgugugcgugaacggcagcugcuucaccaucaugaccgacggccccagcgacggccccgccagcuacagaaucuucaagaucgagaagggcaagaucaccaagagcaucgagcuggacgcccccaacagccacuacgaggagugcagcugcuaccccgacaccggcaccgugaugugcgugugcagagacaacuggcacggcagcaacagacccugggugagcuucaaccagaaccuggacuaccagaucggcuacaucugcagcggcguguucggcgacaaccccagacccaaggacggcaagggcagcugcgaccccgugaacguggacggcgccgacggcgugaagggcuucagcuacagauacggcaacggcguguggaucggcagaaccaagagcaacagcagcagaaagggcuucgagaugaucugggaccccaacggcuggaccgacaccgacagcaacuuccuggugaagcaggacgugguggccaugaccgacuggagcggcuacagcggcagcuucgugcagcaccccgagcugaccggccuggacugcaugagacccugcuucuggguggagcugaucagaggcagacccagagagaagaccaccaucuggaccagcggcagcagcaucagcuucugcggcgugaacagcgacaccgugaacuggagcuggcccgacggcgccgagcugcccuucaccaucgacaaguga

SEQ ID NO: 175115 - RNA, 1413 nt, Artificial Sequence; identical to SEQ ID NO: 175011
  derived and/or modified CDS sequence (opt4) from neuraminidase__InfluenzaA__ABF47718

SEQ ID NO: 175116 - RNA, 1413 nt, Artificial Sequence; identical to SEQ ID NO: 175011
  derived and/or modified CDS sequence (opt4) from neuraminidase__InfluenzaA__ABF47729

SEQ ID NO: 175117 - RNA, 1413 nt, Artificial Sequence; identical to SEQ ID NO: 175011
  derived and/or modified CDS sequence (opt4) from neuraminidase__InfluenzaA__ABF47740

SEQ ID NO: 175118 - RNA, 1413 nt, Artificial Sequence
  derived and/or modified CDS sequence (opt4) from neuraminidase__InfluenzaA__ABF47751
augaaccccaaccagaagaucaucaccaucggcagcaucugcauggccaucggcaucaucagccugauccugcagaucggcaacaucaucagcaucugggugagccacagcauccagaccggcagccagaaccacaccggcaucugcaaccagagaaucaucaccuacgagaacagcaccugggugaaccagaccuacgugaacaucaacaacaccaacgugguggccggcaaggacaccaccagcgugacccuggccggcaacagcagccugugccccaucagaggcugggccaucuacagcaaggacaacagcaucagaaucggcagcaagggcgacguguucgugaucagagagcccuucaucagcugcagccaccuggagugcagaaccuucuuccugacccagggcgcccugcugaacgacaagcacagcaacggcaccgugaaggacagaagccccuacagagcccugaugagcugccccaucggcgaggcccccagccccuacaacagcagauucgagagcguggccuggagcgccagcgccugccacgacggcaugggcuggcugaccaucggcaucagcggccccgacgacggcgccguggccgugcugaaguacaacggcaucaucaccgagaccaucaagagcuggagaaagagaauccugagaacccaggagagcgagugcgugugcgugaacggcagcugcuucaccaucaugaccgacggccccagcaacggccccgccagcuacagaaucuucaagaucgagaagggcaagaucaccaagagcaucgagcuggacgcccccaacagccacuacgaggagugcagcugcuaccccgacaccggcaccgugaugugcgugugcagagacaacuggcacggcagcaacagacccugggugagcuucaaccagaaccuggacuaccagaucggcuacaucugcagcggcguguucggcgacaaccccagacccaaggacggcaagggcagcugcgaccccgugaccguggacggcgccgacggcgugaagggcuucagcuacagauacggcaacggcguguggaucggcagaaccaagagcaacagcagcagaaagggcuucgagaugaucugggaccccaacggcuggaccgacaccgacagcaacuuccuggugaagcaggacgugguggccaugaccgacuggagcggcuacagcggcagcuucgugcagcaccccgagcugaccggccuggacugcaugagacccugcuucuggguggagcugaucagaggcagacccagagagaagaccaccaucuggaccagcggcagcagcaucagcuucugcggcgugaacagcgacaccgccaacuggagcuggcccgacggcgccgagcugcccuucaccaucgacaaguga

SEQ ID NO: 175119 - RNA, 1413 nt, Artificial Sequence
  derived and/or modified CDS sequence (opt4) from neuraminidase__InfluenzaA__ABF47773
augaaccccaaccagaagaucaucaccaucggcagcaucugcaugaccaucggcaucaucagccugauccugcagaucggcaacaucaucagcaucugggugagccacagcauccagaccggcagccagaaccacaccggcaucugcaaccagagaaucaucaccuacgagaacagcaccugggugaaccagaccuacgugaacaucaacaacaccaacgugguggccggcaaggacaccaccagcgugacccuggccggcaacagcagccugugccccaucagaggcugggccaucuacagcaaggacaacagcaucagaaucggcagcaagggcgacguguucgugaucagagagcccuucaucagcugcagccaccuggagugcagaaccuucuuccugacccagggcgcccugcugaacgacaagcacagcaacggcaccgugaaggacagaagccccuacagagcccugaugagcugccccaucggcgaggcccccagccccuacaacagcagauucgagagcguggccuggagcgccagcgccugccacgacggcaugggcuggcugaccaucggcaucagcggccccgacgacggcgccguggccgugcugaaguacaacggcaucaucaccgagaccaucaagagcuggagaaagagaauccugagaacccaggagagcgagugcgugugcgugaacggcagcugcuucaccaucaugaccgacggccccagcaacggccccgccagcuacagaaucuucaagaucgagaagggcaagaucaccaagagcaucgagcuggacgcccccaacagccacuacgaggagugcagcugcuaccccgacaccggcaccgugaugugcgugugcagagacaacuggcacggcagcaacagacccugggugagcuucaaccagaaccuggacuaccagaucggcuacaucugcagcggcguguucggcgacaaccccagacccaaggacggcaagggcagcugcgaccccgugaccguggacggcgccgacggcgugaagggcuucagcuacagauacggcaacggcguguggaucggcagaaccaagagcaacagcagcagaaagggcuucgagaugaucugggaccccaacggcuggaccgacaccgacagcaacuuccuggugaagcaggacgugguggccaugaccgacuggagcggcuacagcggcagcuucgugcagcaccccgagcugaccggccuggacugcaugagacccugcuucuggguggagcugaucagaggcagacccagagagaagaccaccaucuggaccagcggcagcagcaucagcuucugcggcgugaacagcgacaccgccaacuggagcuggcccgacggcgccgagcugcccuucaccaucgacaaguga

SEQ ID NO: 175120 - RNA, 1413 nt, Artificial Sequence; identical to SEQ ID NO: 175119
  derived and/or modified CDS sequence (opt4) from neuraminidase__InfluenzaA__ABF47784

SEQ ID NO: 175121 - RNA, 1413 nt, Artificial Sequence; identical to SEQ ID NO: 175119
  derived and/or modified CDS sequence (opt4) from neuraminidase__InfluenzaA__ABF47795

SEQ ID NO: 175122 - RNA, 1413 nt, Artificial Sequence; identical to SEQ ID NO: 175119
  derived and/or modified CDS sequence (opt4) from neuraminidase__InfluenzaA__ABF47806

SEQ ID NO: 175123 - RNA, 1413 nt, Artificial Sequence; identical to SEQ ID NO: 175119
  derived and/or modified CDS sequence (opt4) from neuraminidase__InfluenzaA__ABF47817

SEQ ID NO: 175124 - RNA, 1413 nt, Artificial Sequence; identical to SEQ ID NO: 175119
  derived and/or modified CDS sequence (opt4) from neuraminidase__InfluenzaA__ABF47839

SEQ ID NO: 175125 - RNA, 1413 nt, Artificial Sequence; identical to SEQ ID NO: 175119
  derived and/or modified CDS sequence (opt4) from neuraminidase__InfluenzaA__ABF47850

SEQ ID NO: 175126 - RNA, 1413 nt, Artificial Sequence; identical to SEQ ID NO: 174888
  derived and/or modified CDS sequence (opt4) from neuraminidase__InfluenzaA__ABF47872

SEQ ID NO: 175127 - RNA, 1413 nt, Artificial Sequence; identical to SEQ ID NO: 174888
  derived and/or modified CDS sequence (opt4) from neuraminidase__InfluenzaA__ABF47883

SEQ ID NO: 175128 - RNA, 1413 nt, Artificial Sequence; identical to SEQ ID NO: 174888
  derived and/or modified CDS sequence (opt4) from neuraminidase__InfluenzaA__ABF47894

SEQ ID NO: 175129 - RNA, 1410 nt, Artificial Sequence; identical to SEQ ID NO: 174904
  derived and/or modified CDS sequence (opt4) from neuraminidase__InfluenzaA__ABF47905

SEQ ID NO: 175130 - RNA, 1362 nt, Artificial Sequence
  derived and/or modified CDS sequence (opt4) from neuraminidase__InfluenzaA__ABF47958
augaaccccaaccagaagaucaucaccaucggcagcaucugcaugguggugggcaucaucagccugauccugcagaucggcaacaucaucagcaucuggaucagccacagcauccagaccggcaaccagaaccacaccggcaucugcaaccagggcagcaucaccuacaaggugguggccggccaggacagcaccagcgugauccugaccggcaacagcagccugugccccaucagaggcugggccauccacagcaaggacaacggcaucagaaucggcagcaagggcgacguguucgugaucagagagcccuucaucagcugcagccaccuggagugcagaaccuucuuccugacccagggcgcccugcugaacgacaagcacagcagaggcaccuucaaggacagaagccccuacagagcccugaugagcugccccgugggcgaggcccccagccccuacaacagcagauucgagagcguggccuggagcgccagcgccugccacgacggcaugggcuggcugaccaucggcaucagcggccccgacgacggcgccguggccgugcugaaguacaacggcaucaucaccgagaccaucaagagcuggagaaagaacauccugagaacccaggagagcgagugcaccugcgugaacggcagcugcuucaccaucaugaccgacggccccagcgacggccuggccagcuacaagaucuucaagaucgagaagggcaaggugaccaagagcaucgagcugaacgcccccaacagccacuacgaggagugcagcugcuaccccgacaccggcaaggugaugugcgugugcagagacaacuggcacggcagcaacagacccugggugagcuucgaccagaaccuggacuacaagaucggcuacaucugcagcggcguguucggcgacaaccccagacccaaggacggcaccggcagcugcggccccgugagcgccgacggcgccaacggcgugaagggcuucagcuacaaguacggcaacggcguguggaucggcagaaccaagagcgacagcagcagacacggcuucgagaugaucugggaccccaacggcuggaccgagaccgacagcagauucagcaugagacaggacgugguggccaugaccgacagaagcggcuacagcggcagcuucgugcagcaccccgagcugaccggccuggacugcaugagacccugcuucuggguggagcugaucagaggccugcccgaggaggacgccaucuggaccagcggcagcaucaucagcuucugcggcgugaacagcgacaccguggacuggagcuggcccgacggcgccgagcugcccuucaccaucgacaaguga

SEQ ID NO: 175131 - RNA, 1350 nt, Artificial Sequence
  derived and/or modified CDS sequence (opt4) from neuraminidase__InfluenzaA__ABF56651
augaaccccaaccagaagaucaucaccaucggcagcaucugcauggugaccggcaucgugagccugaugcugcaggugggcaacaugaucagcaucugggugagccacagcauccacaccggcagccagcaccaggccgagcccaucagcaacaccaacuuccugaccgagaaggccguggccagcgugaagcuggccggcaacagcagccugugccccaucaacggcugggccguguacagcaaggacaacagcaucagaaucggcagcaagggcgacguguucgugaucagagagcccuucaucagcugcagccaccuggagugcagaaccuucuuccugacccagggcgcccugcugaacgacaagcacagcaacggcaccgugaaggacagaagcccccacagaacccugaugagcugccccgugggcgaggcccccagccccuacaacagcagauucgagagcguggccuggagcgccagcgccugccacgacggcaccagcuggcugaccaucggcaucagcggccccgacaacggcgccguggccgugcugaaguacaacggcaucaucaccgacaccaucaagagcuggagaaacaacauccugagaacccaggagagcgagugcgccugcgugaacggcagcugcuucaccgugaugaccgacggccccagcaacggccaggccagccacaagaucuucaagauggagaagggcaagguggugaagagcguggagcuggacgcccccaacuaccacuacgaggagugcagcugcuaccccgacgccggcgagaucaccugcgugugcagagacaacuggcacggcagcaacagacccugggugagcuucaaccagaaccuggaguaccagaucggcuacaucugcagcggcguguucggcgacaaccccagacccaacgacggcaccggcagcugcggccccgugagcagcaacggcgccuacggcgugaagggcuucagcuucaaguacggcaacggcguguggaucggcagaaccaagagcaccaacagcagaagcggcuucgagaugaucugggaccccaacggcuggaccgagaccgacagcagcuucagcgugaagcaggacaucguggccaucaccgacuggagcggcuacagcggcagcuucgugcagcaccccgagcugaccggccuggacugcaucagacccugcuucuggguggagcugaucagaggcagacccaaggagagcaccaucuggaccagcggcagcagcaucagcuucugcggcgugaacagcgacaccgugggcuggagcuggcccgacggcgccgagcugcccuucaccaucgacaaguga

SEQ ID NO: 175132 - RNA, 1410 nt, Artificial Sequence; identical to SEQ ID NO: 174887
  derived and/or modified CDS sequence (opt4) from neuraminidase__InfluenzaA__ABF82654

SEQ ID NO: 175133 - RNA, 1413 nt, Artificial Sequence; identical to SEQ ID NO: 174456
  derived and/or modified CDS sequence (opt4) from neuraminidase__InfluenzaA__ABF82665

SEQ ID NO: 175134 - RNA, 1413 nt, Artificial Sequence; identical to SEQ ID NO: 174456
  derived and/or modified CDS sequence (opt4) from neuraminidase__InfluenzaA__ABF82676

SEQ ID NO: 175135 - RNA, 1413 nt, Artificial Sequence
  derived and/or modified CDS sequence (opt4) from neuraminidase__InfluenzaA__ABF82687
augaaccccaaccagaagaucaucaccaucggcagcaucagcaucgccaucggcaucaucagccugaugcugcagaucggcaacaucaucagcaucugggccagccacagcauccagaccggcagccagaaccacaccggcgugugcaaccagagaaucaucaccuacgagaacagcaccugggugaaccacaccuacgugaacaucaacaacaccaacgugaucgccggcaaggacaagaccagcgugacccuggccggcaacagcagccugugcagcaucagcggcugggccaucuacaccaaggacaacagcaucagaaucggcagcaagggcgacguguucgugaucagagagcccuucaucagcugcagccaccuggagugcagaaccuucuuccugacccagggcgcccugcugaacgacaagcacagcaacggcaccgugaaggacagaagccccuacagagcccugaugagcugcccccugggcgaggcccccagccccuacaacagcaaguucgagagcguggccuggagcgccagcgccugccacgacggcaugggcuggcugaccaucggcaucagcggccccgacaacggcgccguggccgugcugaaguacaacggcaucaucaccgagaccaucaagagcuggaagaagcagauccugagaacccaggagagcgagugcgugugcgugaacggcagcugcuucaccaucaugaccgacggccccagcaacggcgccgccagcuacaagaucuucaagaucgagaagggcaagaccaccaagagcaucgagcugaacgcccccaacuuccacuacgaggagugcagcugcuaccccgacaccggcaccgugaugugcgugugcagagacaacuggcacggcagcaacagacccugggugagcuucaaccagaaccuggacuaccagaucggcuacaucugcagcggcguguucggcgacaaccccagacccaaggacggcgagggcagcugcaaccccgugaccguggacggcgccaacggcgugaagggcuucagcuacaaguacggcaacggcguguggaucggcagaaccaagagcaacagacugagaaagggcuucgagaugaucugggaccccaacggcuggaccgacaccgacagcgacuucagcgugaagcaggacgugguggccaucaccgacuggagcggcuacagcggcagcuucgugcagcaccccgagcugaccggccugaacugcaucagacccugcuucuggguggagcuggugagaggccugcccaaggagaacaccaccaucuggaccagcggcagcagcaucagcuucugcggcgugaacagcgacaccgccaacuggagcuggcccgacggcgccgagcugcccuucaccaucgacaaguga

SEQ ID NO: 175136 - RNA, 1410 nt, Artificial Sequence
  derived and/or modified CDS sequence (opt4) from neuraminidase__InfluenzaA__ABF82698
augaaccccaaccagaagaucaucaccaucggcagcgugagccugaccaucaccaccaucugcuuccugaugcagaucgccauccuggugaucaccgugacccugcacuucaagcagugcgagugcaacagcccccccaacaaccaggugaugcugugcgagcccaccaucaucgagagaaacaucaccgagaucguguaccugaccaacaccaccaucgagaaggagaucugccccaagcuggccgaguacagaaacuggagcaagccccagugcaagaucaccggcuucgcccccuucagcaaggacaacagcaucagacugagcgccggcggcgacaucugggugaccagagagcccuacgugagcugcgaccccggcaagugcuaccaguucgcccugggccagggcaccacccugaacaacagacacagcaacgacaccgugcacgacagaacccccuacagaacccugcugaugaacgagcugggcgugcccuuccaccugggcaccaagcaggugugcaucgccuggagcagcagcagcugccacgacggcaaggccuggcugcacgugugcgugaccggccacaacgagaacgccaccgccagcuucaucuacgacggcagacugguggacagcaucggcagcuggagcaagaacauccugagaacccaggagagcgagugcgugugcaucaacggcaccugcaccguggugaugaccgacggcagcgccagcggcagagccgacaccaagauccuguucaucgaggagggcaagaucgugcacaucagcccccugagcggcagcgcccagcacguggaggagugcagcugcuaccccagauaccccggcgugagaugcgugugcagagacaacuggaagggcagcaacagacccaucguggacaucaacgugaaggacuacagcaucgugagcagcuacgugugcagcggccuggugggcgacacccccagaaagaacgacagcagcagcagcagcuacugccuggaccccaacaacgaggagggcggccacggcgugaagggcugggccuucgacgacggcaacgacguguggaugggcagaaccaucagcgagaagcugagaagcggcuacgagaccuucaaggugaucggcggcuggagcaagcccaacagcaagcugcagaucaacagacaggugaucguggacaagggcaacagaagcggcuacagcggcaucuucagcguggagggcaagagcugcaccaacagaugcuucuacguggagcugaucagaggcagaaagcaggagaccgaggugugguggaccagcaacagcaucgugguguucugcggcaccagcggcaccuacggcaccggcagcuggcccgacggcgccgacaucaaccugaugcccaucuga

SEQ ID NO: 175137 - RNA, 1410 nt, Artificial Sequence; identical to SEQ ID NO: 174186
  derived and/or modified CDS sequence (opt4) from neuraminidase__InfluenzaA__ABF82709

SEQ ID NO: 175138 - RNA, 1413 nt, Artificial Sequence; identical to SEQ ID NO: 174475
  derived and/or modified CDS sequence (opt4) from neuraminidase__InfluenzaA__ABF82822

SEQ ID NO: 175139 - RNA, 1413 nt, Artificial Sequence; identical to SEQ ID NO: 174456
  derived and/or modified CDS sequence (opt4) from neuraminidase__InfluenzaA__ABF82833

SEQ ID NO: 175140 - RNA, 1413 nt, Artificial Sequence; identical to SEQ ID NO: 174456
  derived and/or modified CDS sequence (opt4) from neuraminidase__InfluenzaA__ABF82844

SEQ ID NO: 175141 - RNA, 1413 nt, Artificial Sequence
  derived and/or modified CDS sequence (opt4) from neuraminidase__InfluenzaA__ABF82855
augaaccccaaccagaagaucaucaccaucggcagcaucagcaucgccaucggcaucaucagccugaugcugcagaucggcaacaucaucagcaucugggccagccacagcauccagaucggcagccagaaccacaccggcgugugcaaccagagaaucaucaccuacgagaacagcaccugggugaaccacaccuacgugaacaucaacaacaccaacgugaucgccggcaaggacaagaccagcgugacccuggccggcaacagcagccugugcagcaucagcggcugggccaucuacaccaaggacaacagcaucagaaucggcagcaagggcgacguguucgugaucagagagcccuucaucagcugcagccaccuggagugcagaaccuucuuccugacccagggcgcccugcugaacgacaagcacagcaacggcaccgugaaggacagaagccccuacagagcccugaugagcugcccccugggcgaggcccccagccccuacaacagcaaguucgagagcguggccuggagcgccagcgccugccacgacggcaugggcuggcugaccaucggcaucagcggccccgacaacggcgccguggccgugcugaaguacaacggcaucaucaccgagaccaucaagagcuggaagaagcagauccugagaacccaggagagcgagugcgugugcgugaacggcagcugcuucaccaucaugaccgacggccccagcaacggcgccgccagcuacaagaucuucaagaucgagaagggcaaggugaccaagagcaucgagcugaacgcccccaacuuccacuacgaggagugcagcugcuaccccgacaccggcaccgugaugugcgugugcagagacaacuggcacggcagcaacagacccugggugagcuucaaccagaaccuggacuaccagaucggcuacaucugcagcggcguguucggcgacaaccccagacccaaggacggcgagggcagcugcaaccccgugaccguggacggcgccaacggcgugaagggcuucagcuacaaguacggcaacggcguguggaucggcagaaccaagagcaacagacugagaaagggcuucgagaugaucugggaccccaacggcuggaccgacaccgacagcgacuucagcgugaagcaggacgugguggccaucaccgacuggagcggcuacagcggcagcuucgugcagcaccccgagcugaccggccuggacugcaucagacccugcuucuggguggagcuggugagaggccugcccaaggagaacaccaccaucuggaccagcggcagcagcaucagcuucugcggcgugaacagcgacaccgccaacuggagcuggcccgacggcgccgagcugcccuucaccaucgacaaguga

SEQ ID NO: 175142 - RNA, 1413 nt, Artificial Sequence; identical to SEQ ID NO: 174456
  derived and/or modified CDS sequence (opt4) from neuraminidase__InfluenzaA__ABF82866

SEQ ID NO: 175143 - RNA, 1413 nt, Artificial Sequence; identical to SEQ ID NO: 174990
  derived and/or modified CDS sequence (opt4) from neuraminidase__InfluenzaA__ABF82888

SEQ ID NO: 175144 - RNA, 1413 nt, Artificial Sequence; identical to SEQ ID NO: 174456
  derived and/or modified CDS sequence (opt4) from neuraminidase__InfluenzaA__ABF82910

SEQ ID NO: 175145 - RNA, 1413 nt, Artificial Sequence; identical to SEQ ID NO: 174456
  derived and/or modified CDS sequence (opt4) from neuraminidase__InfluenzaA__ABF82921

SEQ ID NO: 175146 - RNA, 1413 nt, Artificial Sequence; identical to SEQ ID NO: 174456
  derived and/or modified CDS sequence (opt4) from neuraminidase__InfluenzaA__ABF82932

SEQ ID NO: 175147 - RNA, 1413 nt, Artificial Sequence; identical to SEQ ID NO: 174456
  derived and/or modified CDS sequence (opt4) from neuraminidase__InfluenzaA__ABF82943

SEQ ID NO: 175148 - RNA, 1350 nt, Artificial Sequence
  derived and/or modified CDS sequence (opt4) from neuraminidase__InfluenzaA__ABG20474
augaaccccaaccagaagaucaucaccaucggcagcaucugcauggugaucggcaucgugagccugaugcugcagaucggcaacaugaucagcaucugggugagccacagcauccagaccggcaaccagagacaggccgagcccaucagcaacaccaaguuccugaccgagaaggccguggccagcgugacccuggccggcaacagcagccugugccccaucagcggcugggccguguacagcaaggacaacagcaucagaaucggcagcagaggcgacguguucgugaucagagagcccuucaucagcugcagccaccuggagugcagaaccuucuuccugacccagggcgcccugcugaacgacaagcacagcaacggcaccgugaaggacagaagccccuacagaacccugaugagcugccccgugggcgaggcccccagccccuacaacagcagauucgagagcguggccuggagcgccagcgccugccacgacggcaccagcuggcugaccaucggcaucagcggccccgacaacggcgccguggccgugcugaaguacaacggcaucaucaccgacaccaucaagagcuggagaaacaacgugcugagaacccaggagagcgagugcgccugcgugaacggcagcugcuucaccgugaugaccgacggccccagcaacggccaggccagcuacaagaucuucaagauggagaagggcaagguggugaagagcguggagcuggacgcccccaacuaccacuacgaggagugcagcugcuaccccgacgccggcgagaucaccugcgugugcagagacaacuggcacggcagcaacagacccugggugagcuucaaccagaaccuggaguaccagaucggcuacaucugcagcggcguguucggcgacaaccccagacccaacgacggcaccggcagcugcggccccgugagccccaacggcgccuacggcgugaagggcuucagcuucaaguacggcaacggcguguggaucggcagaaccaagagcaccaacagcagaagcggcuucgagaugaucugggaccccaacggcuggaccggcaccgacagcaacuucagcgugaagcaggacaucguggccaucaccgacuggagcggcuacagcggcagcuucgugcagcaccccgagcugaccggccuggacugcaucagacccugcuucuggguggagcugaucagaggcagacccaaggagagcaccaucuggaccagcggcagcagcaucuucuucugcggcgugaacagcgacaccgugagcuggagcuggcccgacggcgccgagcugcccuucaccaucgacaaguga

SEQ ID NO: 175149 - RNA, 1410 nt, Artificial Sequence; identical to SEQ ID NO: 174186
  derived and/or modified CDS sequence (opt4) from neuraminidase__InfluenzaA__ABG26761

SEQ ID NO: 175150 - RNA, 1410 nt, Artificial Sequence
  derived and/or modified CDS sequence (opt4) from neuraminidase__InfluenzaA__ABG26772
augaaccccaaccagaagaucaucaccaucggcagcgugagccugaccaucgccaccaucugcuuccugaugcagaucgccauccuggugaccaccgugacccugcacuucaagcaguacgagugcaacagcccccccaacaaccaggugaugcugugcgagcccaccaucaucgagagaaacaucaccgagaucguguaccugaccaacaccaccaucgagaaggagaucugccccaagcuggccgaguacagaaacuggagcaagccccagugcaagaucaccggcuucgcccccuucagcaaggacaacagcaucagacugagcgccggcggcgacaucugggugaccagagagcccuacgugagcugcgaccccgacaagugcuaccaguucgcccugggccagggcaccacccugaacaacagacacagcaacgacaccgugcacgacagaacccccuacagaacccugcugaugaacgagcugggcgugcccuuccaccugggcaccaagcaggugugcaucgccuggagcagcagcagcugccacgacggcaaggccuggcugcacgugugcgugaccggccacgacgagaacgccaccgccagcuucaucuacgacggcagacugguggacagcaucggcagcuggagcaagaagauccugagaacccaggagagcgagugcgugugcaucaacggcaccugcaccguggugaugaccgacggcagcgccagcggcagagccgacaccaagauccuguucaucaaggagggcaagaucgugcacaucagcccccugagcggcagcgcccagcacguggaggagugcagcugcuaccccagauaccccggcgugagaugcgugugcagagacaacuggaagggcagcaacagacccaucguggacaucaacgugaaggacuacagcaucgugagcagcuacgugugcagcggccuggugggcgacacccccagaaagaacgacagcagcagcagcagccacugccugaaccccaacaacgaggagggcggccacggcgugaagggcugggccuucgacgacggcaacgacguguggaugggcagaaccaucagcgagaagcugagaagcggcuacgagaccuucaaggugaucgagggcuggagcaagcccaacagcaagcugcagaucaacagacaggugaucguggacagaggcaacagaagcggcuacagcggcaucuucagcguggagggcaagagcugcaucaacagaugcuucuacguggagcugaucagaggcagaaagcaggagaccgaggugugguggaccagcaacagcaucgugguguucugcggcaccagcggcaccuacggcaccggcagcuggcccgacggcgccgacaucaaccugaugcccaucuga

SEQ ID NO: 175151 - RNA, 1413 nt, Artificial Sequence
  derived and/or modified CDS sequence (opt4) from neuraminidase__InfluenzaA__ABG26783
augaaccccaaccagaagaucaucaccaucggcagcaucagcaucgccaucggcaucaucagccugauccugcagaucggcaacaucaucagcaucugggccagccacagcauccagaccggcagccagaaccacaccggcaucugcaaccagagaaucaucaccuacgagaacagcaccugggugaaccagaccuacgugaacaucaacaacaccaacgugguggccggcaaggacaagaccagcaugacccuggccggcaacagcagccugugccccaucagaggcugggccaucuacaccaaggacaacagcaucagaaucggcagcaagggcgacguguucgugaucagagagcccuucaucagcugcagccaccuggagugcagaaccuucuuccugacccagggcgcccugcugaacgacaagcacagcaacggcaccgugaaggacagaagccccuacagagcccugaugagcugcccccugggcgaggcccccagccccuacaacagcagauucgagagcguggccuggagcgccagcgccugccacgacggccugggcuggcugaccaucggcaucagcggccccgacaacggcgccguggccgugcugaaguacaacggcaucaucaccgagaccaucaagagcuggaagaagagaauccugagaacccaggagagcgagugcgugugcaugaacggcagcugcuucaccaucaugaccgacggccccagcaacggcgccgccagcuacagaaucuucaagaucgagaagggcagagugaccaagagcaucgagcuggacgcccccaacuaccacuacgaggagugcagcugcuaccccaacaccggcaccgugaugugcgugugcagagacaacuggcacggcagcaacagacccugggugagcuucaaccagaaccuggacuaccagaucggcuacaucugcagcggcguguucggcgacaaccccagacccaaggacggcgagggcagcugcaaccccgugaccguggacggcgccgacggcgugaagggcuucagcuacagauacggcaacggcguguggaucggcagaaccaagagcaacagacugagaaagggcuucgagaugaucugggaccccaacggcuggaccgacaccgacagcgacuucagcaugaagcaggacaucguggccaugaccgacuggagcggcuacagcggcagcuucgugcagcaccccgagcugaccggccuggacugcaucagacccugcuucuggguggagcuggugagaggccugcccagagagaacaccaccaucuggaccagcggcagcagcaucagcuucugcggcgugaacagcgacaccgccaacuggagcuggcccgacggcgccgagcugcccuucaccaucgacaaguga

SEQ ID NO: 175152 - RNA, 1413 nt, Artificial Sequence; identical to SEQ ID NO: 175028
  derived and/or modified CDS sequence (opt4) from neuraminidase__InfluenzaA__ABG26794

SEQ ID NO: 175153 - RNA, 1410 nt, Artificial Sequence
  derived and/or modified CDS sequence (opt4) from neuraminidase__InfluenzaA__ABG26805
augaaccccaaccagaagaucaucaccaucggcagcgugagccugaccaucgccaccaucugcuuccugacccagaucgccauccuggugaccaccgugacccugcacuucaagcaguacgagugcagcagcccccccaacaaccaggugaugcccugcgagcccaucaucaucgagagaaacaucaccgagaucguguaccugaccaacaccaccaucgagaaggagaucugccccaagcugguggaguacagaaacuggagcaagccccagugcaagaucaccggcuucgcccccuucagcaaggacaacagcaucagacugagcgccggcggcgacaucugggugaccagagagcccuacgugagcugcgaccccggcaagugcuaccaguucgcccugggccagggcaccacccugaacaacaagcacagcaacgacaccauccacgacagaacccccuacagaacccugcugaugaacgagcugggcgugcccuuccaccugggcaccaagcaggugugcaucgccuggagcagcagcagcugccacgacggcaaggccuggcugcacgugugcaucaccggccacgacaagaacgccaccgccagcuucaucuacgacggcagacugguggacagcaucggcagcuggagcaagaacauccugagaacccaggagagcgagugcgugugcaucaacggcaccugcaccguggugaugaccgacggcagcgccagcgagagagccgacaccaagauccuguucaucgaggagggcaagaucgugcacaucagcccccugagcggcagcgcccagcacguggaggagugcagcugcuaccccagauaccccggcgugagaugcgugugcagagacaacuggaagggcagcaacagacccaucguggacaucaacgugaaggacuacagcaucgugagcagcuacgugugcagcggccuggugggcgacacccccagaaagaacgacagaagcagcagcagcuacugcagaaaccccaacaacgagaagggcaaccacggcgugaagggcugggccuucgacgacggcaacgacguguggaugggcagaaccaucggcgaggagcugagaagcggcuacgagaccuucaaggugaucggcggcuggagcacccccaacagcaagcugcagaucaacagacagaucaucguggacagcggcaacagaagcggcuacagcggcaucuucagcguggagggcaagagcugcaucaacagaugcuucuacguggagcugaucagaggcagagagcaggagaccagagugugguggaccagcaacagcaucgugguguucugcggcaccagcggcaccuacggcaccggcagcuggcccgacggcgccgacaucaaccugaugcccaucuga

SEQ ID NO: 175154 - RNA, 1413 nt, Artificial Sequence; identical to SEQ ID NO: 175011
  derived and/or modified CDS sequence (opt4) from neuraminidase__InfluenzaA__ABG26816

SEQ ID NO: 175155 - RNA, 1413 nt, Artificial Sequence; identical to SEQ ID NO: 175119
  derived and/or modified CDS sequence (opt4) from neuraminidase__InfluenzaA__ABG26827

SEQ ID NO: 175156 - RNA, 1413 nt, Artificial Sequence; identical to SEQ ID NO: 175119
  derived and/or modified CDS sequence (opt4) from neuraminidase__InfluenzaA__ABG26838

SEQ ID NO: 175157 - RNA, 1410 nt, Artificial Sequence
  derived and/or modified CDS sequence (opt4) from neuraminidase__InfluenzaA__ABG26860
augaaccccaaccagaagaucaucaccaucggcagcgugagccugaccaucgccaccaucugcuuccugaugcagaucgccauccuggugaccaccgugacccugcacuucaagcaguacgagugcaacagcccccccaacaaccaggugaugcugugcgagcccaccaucaucgagagaaacaucaccgagaucguguaccugaccaacaccaccaucgagaaggagaucugccccaagcuggccgaguacagaaacuggagcaagccccagugcaagaucaccggcuucgcccccuucagcaaggacaacagcaucagacugagcgccggcggcgacaucugggugaccagagagcccuacgugagcugcgaccccggcaagugcuaccaguucgcccugggccagggcaccacccugaacaacagacacagcaacgacaccgugcacgacagaacccccuacagaacccugcugaugaacgagcugggcgugcccuuccaccugggcaccaagcaggugugcaucgccuggagcagcagcagcugccacgacggcaaggccuggcugcacgugugcgugaccggccacgacgagaacgccaccgccagcuucaucuacgacggcagacugguggacagcaucggcagcuggagcaagaacauccugagaacccaggagagcgagugcgugugcaucaacggcaccugcaccguggugaugaccgacggcagcgccagcgacagagccgacaccaagauccuguucaucgaggagggcaagaucgugcacaucagcccccugagcggcagcgcccagcacguggaggagugcagcugcuaccccagauaccccggcgugagaugcgugugcagagacaacuggaagggcagcaacagacccaucaucgacaucaacgugaaggacuacagcaucgugagcagcuacgugugcagcggccuggugggcgacacccccagaaagaacgacagcagcagcagcagcuacugcuggaaccccaacaacgagaagggcggccacggcgugaagggcugggccuucgacgacggcaacgacguguggaugggcagaaccaucagcgaggagagcagaagcggcuacgagaccuucaaggugaucggcggcuggagcaagcccaacagcaagcugcagaucaacagacaggugaucguggacagaggcaacagaagcggcuacagcggcaucuucagcguggagggcaagagcugcaucaacagaugcuucuacguggagcugaucagaggcagaaagcaggagaccgaggugugguggaccagcaacagcaucgugguguucugcggcaccagcggcaccuacggcaccggcagcuggcccgacggcgccgacaucaaccugaugcccaucuga

SEQ ID NO: 175158 - RNA, 1410 nt, Artificial Sequence
  derived and/or modified CDS sequence (opt4) from neuraminidase__InfluenzaA__ABG26871
augaaccccaaccagaagaucaucaccaucggcagcgugagccugaccaucgccaccaucugcuuccugaugcagaucgccauccuggugaccaccgugacccugcacuucaagcaguacgagugcaacagcccccccuacaaccagaucaugcugugcgagcccaccaucaucgagagaaacaucaccgagaucguguaccugaccaacaccaccaucgagaaggagaucugccccaagcuggccgaguacagaaacuggagcaagccccagugcaagaucaccggcuucgcccccuucagcaaggacaacagcaucagacugagcgccggcggcgacaucugggugaccagagagcccuacgugagcugcgaccccggcaagugcuaccaguucgcccugggccagggcaccacccugaacaacagacacagcaacgacaccgugcacgacagaacccccuacagaacccugcugaugaacgagcugggcgugcccuuccaccugggcaccaagcaggugugcaucgccuggagcagcagcagcugccacgacggcaaggccuggcugcacgugugcgugaccggccacgacgagaacgccaccgccagcuucaucuacgacggcagacugguggacagcaucggcagcuggagcaagaacauccugagaacccaggagagcgagugcgugugcaucaacggcaccugcaccguggugaugaccgacggcagcgccagcgacagagccgacaccaagauccuguucaucgaggagggcaagaucgugcacaucagcccccugagcggcagcgcccagcacguggaggagugcagcugcuaccccagauaccccggcgugagaugcgugugcagagacaacuggaagggcagcaacagacccaucguggacaucaacgugaaggacuacagcaucgugagcagcuacgugugcagcggccuggugggcgacacccccagaaagaacgacagcagcagcagcagcuacugcuggaaccccaacaacgagaagggcggccacggcgugaagggcugggccuucgacgacggcaacgacguguggaugggcagaaccaucagcgaggagagcagaagcggcuacgagaccuucaaggugaucggcggcuggagcaagcccaacagcaagcugcagaucaacagacaggugaucguggacagaggcaacagaagcggcuacagcggcaucuucagcguggagggcaagagcugcaucaacagaugcuucuacguggagcugaucagaggcagaaagcaggagaccgaggugugguggaccagcaacagcaucgugguguucugcggcaccagcggcaccuacggcaccggcagcuggcccgacggcgccgacaucaaccugaugcccaucuga

SEQ ID NO: 175159 - RNA, 1410 nt, Artificial Sequence
  derived and/or modified CDS sequence (opt4) from neuraminidase__InfluenzaA__ABG26893
augaaccccaaccagaagaucaucaccaucggcagcaucagccugaccaucgccaccaucugcuuccugaugcagaucgccauccuggugaccaccgugacccugcacuucaagcaguacgagugcaacagcccccccaacaaccaggugaugcugugcgagcccaccaucaucgagagaaacaucaccgagaucguguaccugaccaacaccaccaucgagaaggagaucugccccaagcuggccgaguacagaaacuggagcaagccccagugcaagaucaccggcuucgcccccuucagcaaggacaacagcaucagacugagcgccggcggcgacaucugggugaccagagagcccuacgugagcugcgaccccggcaagugcuaccaguucgcccugggccagggcaccacccugaacaacagacacagcaacgacaccgugcacgacagaacccccuacagaacccugcugaugaacgagcugggcgugcccuuccaccugggcaccaagcaggugugcaucgccuggagcagcagcagcugccacgacggcaaggccuggcugcacgugugcgugaccggccacgacgagaacgccaccgccagcuucaucuacgacggcagacugguggacagcaucggcagcuggagcaagaacauccugagaacccaggagagcgagugcgugugcaucaacggcaccugcaccguggugaugaccgacggcagcgccagcgacagagccgacaccaagauccuguucaucgaggagggcaagaucgugcacaucagcccccugagcggcagcgcccagcacguggaggagugcagcugcuaccccagauaccccggcgugagaugcgugugcagagacaacuggaagggcagcaacagacccaucguggacaucaacgugaaggacuacagcaucgugagcagcuacgugugcagcggccuggugggcgacacccccagaaagaacgacagcagcagcagcagcuacugcuggaaccccaacaacgagaagggcggccacggcgugaagggcugggccuucgacgacggcaacgacguguggaugggcagaaccaucagcgaggagagcagaagcggcuacgagaccuucaaggugaucggcggcuggagcaagcccaacagcaagcugcagaucaacagacaggugaucguggacagaggcaacagaagcggcuacagcggcaucuucagcguggagggcaagagcugcaucaacagaugcuucuacguggagcugaucagaggcagaaagcaggagaccgaggugugguggaccagcaacagcaucgugguguucugcggcaccagcggcaccuacggcaccggcagcuggcccgacggcgccgacaucaaccugaugcccaucuga

SEQ ID NO: 175160 - RNA, 1410 nt, Artificial Sequence
  derived and/or modified CDS sequence (opt4) from neuraminidase__InfluenzaA__ABG26915
augaaccccaaccagaagaucaucaccaucggcagcgugagccugaccaucgccaccaucugcuuccugaugcagaucgccauccuggugaccaccgugacccugcacuucaagcaguacgagugcaacagcccccccaacaaccaggugaugcugugcgagcccaccaucaucgagagaaacaucaccgagaucguguaccugaccaacaccaccaucgagaaggagaucugccccaagcuggccgaguacagaaacuggagcaagccccagugcaagaucaccggcuucgcccccuucagcaaggacaacagcaucagacugagcgccggcggcgacaucugggugaccagagagcccuacgugagcugcgaccccggcaagugcuaccaguucgcccugggccagggcaccacccugaacaacagacacagcaacgacaccgugcacgacagaacccccuacagaacccugcugaugaacgagcugggcgugcccuuccaccugggcaccaagcaggugugcaucgccuggagcagcagcagcugccacgacggcaaggccuggcugcacgugugcgugaccggccacgacgagaacgccaccgccagcuucaucuacgacggcagacugguggacagcaucagcagcuggagcaagaacauccugagaacccaggagagcgagugcgugugcaucaacggcaccugcaccguggugaugaccgacggcagcgccagcgagagagccgacaccaagauccuguucaucgaggagggcaagaucgugcacaucagcccccugagcggcagcgcccagcacguggaggagugcagcugcuaccccagauaccccggcgugagaugcgugugcagagacaacuggaagggcagcaacagacccaucguggacaucaacgugaaggacuacagcaucgugagcagcuacgugugcagcggccuggugggcgacacccccagaaagaacgacagcagcagcagcagcuacugccugaaccccaacaacgaggagggcggccacggcgugaagggcugggccuucgacgacggcaacgacguguggaugggcagaaccaucagcgagaagcugagaagcggcuacgagaccuucaaggugaucggcggcuggagcaagcccaacagcaagcugcagaucaacagacaggugaucguggacagaggcaacagaagcggcuacagcggcaucuucagcguggagggcaagagcugcgugaacagaugcuucuacguggagcugaucagaggcagaaagcaggagaccgaggugugguggaccagcaacagcaucgugguguucugcggcaccagcggcaccuacggcaccggcagcuggcccgacggcgccgacaucaaccugaugcccaucuga

SEQ ID NO: 175161 - RNA, 1410 nt, Artificial Sequence
  derived and/or modified CDS sequence (opt4) from neuraminidase__InfluenzaA__ABG26937
augaaccccaaccagaagaucaucaccaucggcagcgugagccugaccaucgccaccaucugcuuccugaugcagaucgccauccuggugaccaccgugacccugcacuucaagcaguacgagugcaacagcccccccagcaaccaggugaugcugugcgagcccaccaucaucgagagaaacaucaccgagaucguguaccugaccaacaccaccaucgagaaggagaucugccccaagcuggccgaguacagaaacuggagcaagccccagugcaagaucaccggcuucgcccccuucagcaaggacaacagcaucagacugagcgccggcggcgacaucugggugaccagagagcccuacgugagcugcgaccccggcaagugcuaccaguucgcccugggccagggcaccacccugaacaacagacacagcaacgacaccgugcacgacagaacccccuacagaacccugcugaugaacgagcugggcgugcccuuccaccugggcaccaagcaggugugcaucgccuggagcagcagcagcugccacgacggcaaggccuggcugcacgugugcgugaccggccacgacgagaacgccaccgccagcuucaucuacgacggcagacugguggacagcaucggcagcuggagcaagaacauccugagaacccaggagagcgagugcgugugcaucaacggcaccugcaccguggugaugaccgacggcagcgccagcgagagagccgacaccaagauccuguucaucgaggagggcaagaucgugcacaucagcccccugagcggcagcgcccagcacguggaggagugcagcugcuaccccagauaccccggcgugagaugcgugugcagagacaacuggaagggcagcaacagacccaucguggacaucaacgugaaggacuacagcaucgugagcagcuacgugugcagcggccuggugggcgacacccccagaaagaacgacagcagcagcagcagcuacugcagaaaccccaacaacgagaagggcagccacggcgugaagggcugggccuucgacgacggcaacgacguguggaugggcagaaccaucagcgaggagcugagaagcggcuacgagaccuucaaggugaucggcggcuggagcaagcccaacagcaagcugcagaucaacagacaggugaucguggacagaggcaacagaagcggcuacagcggcaucuucagcguggagggcaagagcugcaucaacagaugcuucuacguggagcugaucagaggcagaaagcaggagaccgaggugugguggaccagcaacagcaucgugguguucugcggcaccagcggcaccuacggcaccggcagcuggcccgacggcgccgacaucaaccugaugcccaucuga

SEQ ID NO: 175162 - RNA, 1413 nt, Artificial Sequence; identical to SEQ ID NO: 174456
  derived and/or modified CDS sequence (opt4) from neuraminidase__InfluenzaA__ABG26948

SEQ ID NO: 175163 - RNA, 1410 nt, Artificial Sequence; identical to SEQ ID NO: 174226
  derived and/or modified CDS sequence (opt4) from neuraminidase__InfluenzaA__ABG26959

SEQ ID NO: 175164 - RNA, 1413 nt, Artificial Sequence
  derived and/or modified CDS sequence (opt4) from neuraminidase__InfluenzaA__ABG37123
augaaccccaaccagaagaucaucaccaucggcagcaucagcaucaccaucggcaucaucagccugaugcugcagaucggcaacaucaucagcaucugggccagccacagcauccagaccggcagccagaaccacaccggcgugugcaaccagagaaucaucaccuacgagaacagcaccugggugaaccacaccuacgugaacaucaacaacaccaacgugaucgccggcaaggacaagaccagcgugacccuggccggcaacagcagccugugcagcaucagcggcugggccaucuacaccaaggacaacagcaucagaaucggcagcaagggcgacguguucgugaucagagagcccuucaucagcugcagccaccuggagugcagaaccuucuuccugacccagggcgcccugcugaacgacaagcacagcaacggcaccgugaaggacagaagccccuacagagcccugaugagcugcccccugggcgaggcccccagccccuacaacagcaaguucgagagcguggccuggagcgccagcgccugccacgacggcaugggcuggcugaccaucggcaucagcggccccgacaacggcgccguggccgugcugaaguacaacggcaucaucaccgagaccaucaagagcuggaagaagcagauccugagaacccaggagagcgagugcgugugcgugaacggcagcugcuucaccaucaugaccgacggccccagcaacggcgccgccagcuacaagaucuucaagaucgagaagggcaaggugaccaagagcaucgagcugaacgcccccaacuuccacuacgaggagugcagcugcuaccccgacaccggcaccgugaugugcgugugcagagacaacuggcacggcagcaacagacccugggugagcuucaaccagaaccuggacuaccagaucggcuacaucugcagcggcguguucggcgacaaccccagacccaaggacggcgagggcagcugcaaccccgugaccguggacggcgccaacggcgugaagggcuucagcuacaaguacggcaacggcguguggaucggcagaaccaagagcaacagacugagaaagggcuucgagaugaucugggaccccaacggcuggaccgacaccgacagcgacuucagcgugaagcaggacgugguggccaucaccgacuggagcggcuacagcggcagcuucgugcagcaccccgagcugaccggccuggacugcaucagacccugcuucuggguggagcuggugagaggccugcccaaggagaacaccaccaucuggaccagcggcagcagcaucagcuucugcggcgugaacagcgacaccgccaacuggagcuggcccgacggcgccgagcugcccuucaccaucgacaaguga

SEQ ID NO: 175165 - RNA, 1410 nt, Artificial Sequence
  derived and/or modified CDS sequence (opt4) from neuraminidase__InfluenzaA__ABG37134
augaaccccaaccagaagaucaucaccaucggcagcgugagccugaccaucgccaccaucugcuuccugaugcagaucgccauccuggugaccaccgugacccugcacuucaagcaguacgagugcaacagcccccccaacaaccaggugaugcugugcgagcccaccaucaucgagagaaacaucaccgagaucguguaccugaccaacaccaccaucgagaaggagaucugccccaagcuggccgaguacagaaacuggagcaagccccagugcaagaucaccggcuucgcccccuucagcaaggacaacagcaucagacugagcgccggcggcgacaucugggugaccagagagcccuacgugagcugcgaccccgacaagugcuaccaguucgcccugggccagggcaccacccugaacaacagacacagcaacgacaccgugcacgacagaacccccuacagaacccugcugaugaacgagcugggcgugcccuuccaccugggcaccaagcaggugugcaucgccuggagcagcagcagcugccacgacggcaaggccuggcugcacgugugcgugaccggccacgacgagaacgccaccgccagcuucaucuacgacggcagacugguggacagcaucggcagcuggagcaagaagauccugagaacccaggagagcgagugcgugugcaucaacggcaccugcaccguggugaugaccgacggcagcgccagcggcagagccgacaccaagauccuguucaucgaggagggcaagaucgugcacaucagccagcugcugggcagcgcccagcacguggaggagugcagcugcuaccccagauaccccggcgugagaugcgugugcagagacaacuggaagggcagcaacagacccaucguggacaucaacgugaaggacuacagcaucgugagcagcuacgugugcagcggccuggugggcgacacccccagaaagaacgacagcagcagcagcagccacugccugaaccccaacaacgaggagggcggccacggcgugaagggcugggccuucgacgacggcaacgacguguggaugggcagaaccaucagcgagaagcugagaagcggcuacgagaccuucaaggugaucgagggcuggagcaagcccaacagcaagcugcagaucaacagacaggugaucguggacagaggcaacagaagcggcuacagcggcaucuucagcguggagggcaagagcugcaucaacagaugcuucuacguggagcugaucagaggcagaaagcaggagaccgaggugugguggaccagcaacagcaucgugguguucugcggcaccagcggcaccuacggcaccggcagcuggcccgacggcgccgacaucaaccugaugcccaucuga

SEQ ID NO: 175166 - RNA, 1410 nt, Artificial Sequence; identical to SEQ ID NO: 174186
  derived and/or modified CDS sequence (opt4) from neuraminidase__InfluenzaA__ABG37145

SEQ ID NO: 175167 - RNA, 1410 nt, Artificial Sequence
  derived and/or modified CDS sequence (opt4) from neuraminidase__InfluenzaA__ABG37156
augaaccccaaccagaagaucaucaccaucggcagcgugagccugaccaucgccaccaucugcuuccugaugcagaucgccauccuggugaccaccgugacccugcacuucaagcaguacgagugcaacagcccccccaacaaccaggugaugcugugcgagcccaccaucaucgagagaaacaucaccgagaucguguaccugaccaacaccaccaucgagaaggagaucugccccaagcuggccgaguacagaaacuggagcaagccccagugcaagaucaccggcuucgcccccuucagcaaggacaacagcaucagacugagcgccggcggcgacaucugggugaccagagagcccuacgugagcugcgaccccggcaagugcuaccaguucgcccugggccagggcaccacccugaacaacagacacagcaacgacaccgugcacgacagaacccccuacagaacccugcugaugaacgagcugggcgugcccuuccaccugggcaccaagcaggugugcaucgccuggagcagcagcagcugccacgacggcaaggccuggcugcacgugugcgugaccggccacgacgagaacgccaccgccagcuucaucuacgacggcagacugguggacagcaucggcagcuggagcaagaacauccugagaacccaggagagcgagugcgugugcaucaacggcaccugcaccguggugaugaccgacggcagcgccagcggcagagccgacaccaagauccuguucaucgaggagggcaagaucgugcacaucagcccccugagcggcagcgcccagcacguggaggagugcagcugcuaccccagauaccccggcgugagaugcgugugcagagacaacuggaagggcagcaacagacccaucguggacaucaacgugaaggacuacagcaucgugagcaacuacgugugcagcggccuggugggcgacacccccagaaagaacgacagcagcagcagcagccacugccugaaccccaacaacgaggagggcggccacggcgugaagggcugggccuucgacgacggcaacgacguguggaugggcagaaccaucagcgagaagcugagaagcggcuacgagaccuucaaggugaucggcggcuggagcaagcccaacagcaagcugcagaucaacagacaggugaucguggacagaggcaacagaagcggcuacagcggcaucuucagcguggagggcaagagcugcaucaacagaugcuucuacguggagcugaucagaggcagaaagcaggagaccgaggugugguggaccagcaacagcaucgugguguucugcggcaccagcggcaccuacggcaccggcagcuggcccgacggcgccgacaucaaccugaugcccaucuga

SEQ ID NO: 175168 - RNA, 1410 nt, Artificial Sequence
  derived and/or modified CDS sequence (opt4) from neuraminidase__InfluenzaA__ABG37167
augaaccccaaccagaagaucaucaccaucggcagcgugagccugaccaucgccaccaucugcuuccugaugcagaucgccauccuggugaccaccgugacccugcacuucaagcaguacgagugcaacagcccccccaacaaccaggugaugcugugcgagcccaccaucaucgagagaaacaucaccgagaucguguaccugaccaacaccaccaucgagaaggagaucugccccaagcuggccgaguacagaaacuggagcaagccccagugcaagaucaccggcuucgcccccuucagcaaggacaacagcaucagacugagcgccggcggcgacaucugggugaccagagagcccuacgugagcugcgaccccgacaagugcuaccaguucgcccugggccagggcaccacccugaacaacagacacagcaacgacaccgugcacgacagaacccccuacagaacccugcugaugaacgagcugggcgugcccuuccaccugggcaccaagcaggugugcaucgccuggagcagcagcagcugccacgacggcaaggccuggcugcacgugugcgugaccggccacgacgagaacgccaccgccagcuucaucuacgacggcagacugguggacagcaucagcagcuggagcaagaacauccugagaacccaggagagcgagugcgugugcaucaacggcaccugcaccguggugaugaccgacggcagcgccagcggcagagccgacaccaagauccuguucaucgaggagggcaagaucgugcacaucagcccccugagcggcagcgcccagcacguggaggagugcagcugcuaccccagauaccccggcgugagaugcgugugcagagacaacuggaagggcagcaacagacccaucguggacaucaacgugaaggacuacagcaucgugagcagcuacgugugcagcggccuggugggcgacacccccagaaagaacgacagcagcagcagcagcuacugccugaaccccaacaacgaggagggcggccacggcgugaagggcugggccuucgacgacggcaacgacguguggaugggcagaaccaucagcgagaagcugagaagcggcuacgagaccuucaaggugaucggcggcuggagcaagcccaacagcaagcugcagaucaacagacaggugaucguggacagaggcaacagaagcggcuacagcggcaucuucagcguggagggcaagagcugcgugaacagaugcuucuacguggagcugaucagaggcagaaagcaggagaccgaggugugguggaccagcaacagcaucgugguguucugcggcaccagcggcaccuacggcaccggcagcuggcccgacggcgccgacaucaaccugaugcccaucuga

SEQ ID NO: 175169 - RNA, 1410 nt, Artificial Sequence
  derived and/or modified CDS sequence (opt4) from neuraminidase__InfluenzaA__ABG37189
augaaccccaaccagaagaucaucaccaucggcagcgugagccugaccaucgccaccaucugcuuccugaugcagaucgccauccuggugaccaccgugacccugcacuucaagcaguacgagugcaacagcccccccaacaaccaggugcugcugugcgagcccaccaucaucgagagaaacaucaccgagaucguguaccugaccaacaccaccaucgagaaggagaucugccccaagcuggccgaguacagaaacuggagcaagccccagugcaagaucaccggcuucgcccccuucagcaaggacaacagcaucagacugagcgccggcggcgacaucugggugaccagagagcccuacgugagcugcgaccccggcaagugcuaccaguucgcccugggccagggcaccacccugaacaacagacacagcaacgacaccgugcacgacagaacccccuacagaacccugcugaugaacgagcugggcgugcccuuccaccugggcaccaagcaggugugcaucgccuggagcagcagcagcugccacgacggcaaggccuggcugcacgugugcgugaccggccacgacgagaacgccaccgccagcuucaucuacgacggcagacugguggacagcaucggcagcuggagcaagaacauccugagaacccaggagagcgagugcgugugcaucaacggcaccugcaccguggugaugaccgacggcagcgccagcggcagagccgacaccaagauccuguucaucgaggagggcaagaucgugcacaucagcagccugagcggcagcgcccagcacguggaggagugcagcugcuaccccagauaccccggcgugagaugcgugugcagagacaacuggaagggcagcaacagacccaucguggacaucaacgugaaggacuacagcaucgugagcagcuacgugugcagcggccuggugggcgacacccccagaaagaacgacagcagcagcagcagccacugccugaaccccaacaacgaggagggcggccacggcgugaagggcugggccuucgacgacggcaacgacguguggaugggcagaaccaucagcgagaagcugagaagcggcuacgagaccuucaaggugaucggcggcuggagcaagcccaacagcaagcugcagaucaacagacaggugaucguggacagaggcaacagaagcggcuacagcggcaucuucagcguggagggcaagagcugcaucaacagaugcuucuacguggagcugaucagaggcagaaagcaggagaccgaggugugguggaccagcaacagcaucgugguguucugcggcaccagcggcaccuacggcaccggcagcuggcccgacggcgccgacaucaaccugaugcccaucuga

SEQ ID NO: 175170 - RNA, 1410 nt, Artificial Sequence
  derived and/or modified CDS sequence (opt4) from neuraminidase__InfluenzaA__ABG37200
augaaccccaaccagaagaucaucaccaucggcagcgugagccugaccaucgccaccaucugcuuccugaugcagaucgccauccuggugaccaccgugacccugcacuucaagcaguacgagugcaacagcccccccaacaaccaggugaugcugugcgagcccaccaucaucgagagaaacaucaccgagaucguguaccugaccaacaccaccaucgagaaggagaucugccccaagcuggccgaguacagaaacuggagcaagccccagugcaagaucaccggcuucgcccccuucagcaaggacaacagcaucagacugagcgccggcggcgacaucugggugaccagagagcccuacgugagcugcgacagcggcaagugcuaccaguucgcccugggccagggcaccacccugaacaacagacacagcaacgacaccgugcacgacagaacccccuacagaacccugcugaugaacgagcugggcgugcccuuccaccugggcaccaagcaggugugcaucgccuggagcagcagcagcugccacgacggcaaggccuggcugcacgugugcgugaccggccacgacgagaacgccaccgccagcuucaucuacgacggcagacugguggacagcaucggcagcuggagcaagaacauccugagaacccaggagagcgagugcgugugcaucaacggcaccugcaccguggugaugaccgacggcagcgccagcggcagagccgacaccaagauccuguucaucgaggagggcaagaucgugcacaucagcacccugagcggcagcgcccagcacguggaggagugcagcugcuaccccagauaccccggcgugagaugcgugugcagagacaacuggaagggcagcaacagacccaucguggacaucaacgugaaggacuacagcaucgugagcagcuacgugugcagcggccuggugggcgacacccccagaaagaacgacagcagcagcagcagccacugccugaaccccaacaacgaggagggcggccacggcgugaagggcugggccuucgacgacggcaacgacguguggaugggcagaaccaucagcgagaagcugagaagcggcuacgagaccuucaaggugaucggcggcuggagcaagcccaacagcaagcugcagaucaacagacaggugaucguggacagaggcaacagaagcggcuacagcggcaucuucagcguggagggcaagagcugcaucaacagaugcuucuacguggagcugaucagaggcagaaagcaggagaccgaggugugguggaccagcaacagcaucgugguguucugcggcaccagcggcaccuacggcaccggcagcuggcccgacggcgccgacaucaaccugaugcccaucuga

SEQ ID NO: 175171 - RNA, 1410 nt, Artificial Sequence
  derived and/or modified CDS sequence (opt4) from neuraminidase__InfluenzaA__ABG37211
augaaccccaaccagaagaucaucaccaucggcagcgugagccugaccaucgccaccaucugcuuccugacccagaucgccauccuggugaccaccgugacccugcacuucaagcaguacgagugcagcagcccccccaacaaccaggugaugcccugcgagcccaucaucaucgagagaaacaucaccgagaucguguaccugaccaacaccaccaucgagaaggagaucugccccaagcugguggaguacagaaacuggagcaagccccagugcaagaucaccggcuucgcccccuucagcaaggacaacagcaucagacugagcgccggcggcgacaucugggugaccagagagcccuacgugagcugcgaccccggcaagugcuaccaguucgcccugggccagggcaccacccugaacaacaagcacagcaacgacaccauccacgacagaacccccuacagaacccugcugaugaacgagcugggcgugcccuuccaccugggcaccaagcaggugugcaucgccuggagcagcagcagcugccacgacggcaaggccuggcugcacgugugcaucaccggccacgacaagaacgccaccgccagcuucaucuacgacggcagacugguggacagcaucggcagcuggagcaagaacauccugagaacccaggagagcgagugcgugugcaucaacggcaccugcaccguggugaugaccgacggcagcgccagcgagagagccgacaccaagauccuguucaucgaggagggcaagaucgugcacaucagcccccugagcggcagcgcccagcacguggaggagugcagcugcuaccccagauaccccggcgugagaugcgugugcagagacaacuggaagggcagcaacagacccaucguggacaucaacgugaaggacuacagcaucgugagcagcuacgugugcagcggccuggugggcgacacccccagaaagaacgacagaagcagcagcagcuacugcagaaaccccaacaacgagaagggcaaccacggcgugaagggcugggccuucgacgacggcaacgacguguggaugggcagaaccaucggcgaggagcugagaagcggcuacgagaccuucaaggugaucggcggcuggagcacccccaacagcaagcugcagaucaacagacaggugaucguggacagcggcaacagaagcggcuacagcggcaucuucagcguggagggcaagagcugcaucaacagaugcuucuacguggagcugaucagaggcagagagcaggagaccagagugugguggaccagcaacagcaucgugguguucugcggcaccagcggcaccuacggcaccggcagcuggcccgacggcgccgacaucaaccugaugcccaucuga

SEQ ID NO: 175172 - RNA, 1410 nt, Artificial Sequence
  derived and/or modified CDS sequence (opt4) from neuraminidase__InfluenzaA__ABG37233
augaaccccaaccagaagaucaucaccaucggcagcgugagccugaccaucgccaccaucugcuuccugaugcagaucgccauccuggugaccaccgugacccugcacuucaagcaguacgagugcaacagcccccccagcaaccaggccaugcugugcgagcccaccaucaucgagagaaacaucaccgagaucguguaccugaccaacaccaccaucgagaaggagaucugccccaagcuggccgaguacagaaacuggagcaagccccagugcaagaucaccggcuucgcccccuucagcaaggacaacagcaucagacugagcgccggcggcgacaucugggugaccagagagcccuacgugagcugcgaccccggcaagugcuaccaguucgcccugggccagggcaccaccaucaacaacagacacagcaacgacaccgugcacgacagaacccccuacagaacccugcugaugaacgagcugggcgugcccuuccaccugggcaccaagcaggugugcaucgccuggagcagcagcagcugccacgacggcaaggccuggcugcacgugugcgugaccggccacgacgagaacgccaccgccagcuucaucuacgacggcagacugguggacagcaucggcagcuggagcaagaacauccugagaacccaggagagcgagugcgugugcaucaacggcaccugcaccguggugaugaccgacggcagcgccagcggcagagccgacaccaagauccuguucaucgaggagggcaagaucgugcacaucagcccccugagcggcagcgcccagcacguggaggagugcagcugcuaccccagauaccccggcgugagaugcgugugcagagacaacuggaagggcagcaacagacccaucguggacaucaacgugaaggacuacagcaucgugagcagcuacgugugcagcggccuggugggcgacacccccagaaagaacgacagcagcagcaacagcuacugcagaaaccccaacaacgagaagggcagccacggcgugaagggcugggccuucgacgacggcaacgacguguggaugggcagaaccaucagcgccgagagcagaagcggcuacgagaccuucaaggugaucggcggcuggagcaagcccaacagcaagcugcagaucaacagacaggugaucguggacagaggcaacagaagcggcuacagcggcaucuucagcguggagggcaagagcugcaucaacagaugcuucuacguggagcugaucagaggcagaaagcaggagaccgaggugugguggaccagcaacagcaucgugguguucugcggcaccagcggcaccuacggcaccggcagcuggcccgacggcgccgacaucaaccugaugcccaucuga

SEQ ID NO: 175173 - RNA, 1410 nt, Artificial Sequence
  derived and/or modified CDS sequence (opt4) from neuraminidase__InfluenzaA__ABG37244
augaaccccaaccagaagaucaucaccaucggcagcgugagccugaccaucgccaccaucugcuuccugaugcagaucgccauccuggugaccaccgugacccugcacuucaagcaguacgagugcaacagcccccccaacaaccaggugaugcugugcgagcccaccaucaucgagagaaacaucaccgagaucguguaccugaccaacaccaccaucgagaaggagaucugccccaagcuggccgaguacagaaacuggagcaagccccagugcaagaucaccggcuucgcccccuucagcaaggacaacagcaucagacugagcgccggcggcgacaucugggugaccagagagcccuacgugagcugcgaccccggcaagugcuaccaguucgcccugggccagggcaccacccugaacaacagacacagcaacgacaccgugcacgacagaacccccuacagaacccugcugaugaacgagcugggcgugcccuuccaccugggcaccaagcaggugugcaucgccuggagcagcagcagcugccacgacggcaaggccuggcugcacgugugcgugaccggccacgacgagaacgccaccgccagcuucaucuacgacggcagacugguggacagcaucggcagcuggagcaagaacauccugagaacccaggagagcgagugcgugugcaucaacggcaccugcaccguggugaugaccgacggcagcgccagcgacagagccgacaccaagauccuguucaucgaggagggcaagaucgugcacaucagcccccugagcggcagcgcccagcacguggaggagugcagcugcuaccccagauaccccggcgugagaugcgugugcagagacaacuggaagggcagcaacagacccaucguggacaucaacgugaaggacuacagcaucgugagcagcuacgugugcagcggccuggugggcgacacccccagaaagaacgacagcagcagcagcagcuacugcuggaaccccaacaacgagaagggcggccacggcgugaagggcugggccuucgacgacggcaacgacguguggaugggcagaaccaucagcgaggagagcagaagcggcuacgagaccuucaaggugaucggcggcuggagcaagcccaacagcaagcugcagaucaacagacaggugaucguggacagaggcaacagaagcggcuacagcggcaucuucagcguggagggcaagagcugcaucaacagaugcuucuacguggagcugaucagaggcagaaagcaggagaccgaggugugguggaccagcaacagcaucgugguguucugcggcaccagcggcaccuacggcaccggcagcuggcccgacggcgccgacaucaaccugaugcccaucuga

SEQ ID NO: 175174 - RNA, 1410 nt, Artificial Sequence; identical to SEQ ID NO: 175173
  derived and/or modified CDS sequence (opt4) from neuraminidase__InfluenzaA__ABG37255

SEQ ID NO: 175175 - RNA, 1410 nt, Artificial Sequence; identical to SEQ ID NO: 175160
  derived and/or modified CDS sequence (opt4) from neuraminidase__InfluenzaA__ABG37266

SEQ ID NO: 175176 - RNA, 1410 nt, Artificial Sequence; identical to SEQ ID NO: 175173
  derived and/or modified CDS sequence (opt4) from neuraminidase__InfluenzaA__ABG37277

SEQ ID NO: 175177 - RNA, 1410 nt, Artificial Sequence; identical to SEQ ID NO: 175173
  derived and/or modified CDS sequence (opt4) from neuraminidase__InfluenzaA__ABG37288

SEQ ID NO: 175178 - RNA, 1410 nt, Artificial Sequence; identical to SEQ ID NO: 175173
  derived and/or modified CDS sequence (opt4) from neuraminidase__InfluenzaA__ABG37310

SEQ ID NO: 175179 - RNA, 1410 nt, Artificial Sequence; identical to SEQ ID NO: 175160
  derived and/or modified CDS sequence (opt4) from neuraminidase__InfluenzaA__ABG37321

SEQ ID NO: 175180 - RNA, 1410 nt, Artificial Sequence
  derived and/or modified CDS sequence (opt4) from neuraminidase__InfluenzaA__ABG37332
augaaccccaaccagaagaucaucaccaucggcagcgugagccugaccaucgccaccaucugcuuccugaugcagaucgccauccuggugaccaccgugacccugcacuucaagcagcacgagugcaacagcccccccaacaaccaggugaugcugugcgagcccaccaucaucgagagaaacaucaccgagaucgugcaccugaccaacaccaccaucgagaaggagaucugccccaagcuggccgaguacagaaacuggagcaagccccagugcaagaucaccggcuucgcccccuucagcaaggacaacagcaucagacugagcgccggcggcgacaucugggugaccagagagcccuacgugagcugcgaccccggcaagugcuaccaguucgcccugggccagggcaccacccugaacaacagacacagcaacgacaccgugcacgacagaacccccuacagaacccugcugaugaacgagcugggcgugcccuuccaccugggcaccaagcaggugugcaucgccuggagcagcagcagcugccacgacggcaaggccuggcugcacgugugcgugaccggccacgacgagaacgccaccgccagcuucaucuacgacggcagacugguggacagcaucggcagcuggagcaagaacauccugagaacccaggagagcgagugcgugugcaucaacggcaccugcaccguggugaugaccgacggcagcgccagcgacagagccgacaccaagauccuguucaucgaggagggcaagaucgugcacaucagcccccugagcggcggcgcccagcacguggaggagugcagcugcuaccccagauaccccggcgugagaugcgugugcagagacaacuggaagggcagcaacagacccaucguggacaucaacgugaaggacuacagcaucgugagcagcuacgugugcagcggccuggugggcgacacccccagaaagaacgacagcagcagcagcagcuacugcuggaaccccaacaacgagaagggcggccacggcgugaagggcugggccuucgacgacggcaacgacguguggaugggcagaaccaucagcgaggagagcagaagcggcuacgagaccuucaaggugaucggcggcuggagcaagcccaacagcaagcugcagaucaacagacaggugaucguggacagaggcaacagaagcggcuacagcggcaucuucagcguggagggcaagagcugcaucaacagaugcuucuacguggagcugaucagaggcagaaagcaggagaccgaggugugguggaccagcaacagcaucgugguguucugcggcaccagcggcaccuacggcaccggcagcuggcccgacggcgccgacaucaaccugaugcccaucuga

SEQ ID NO: 175181 - RNA, 1410 nt, Artificial Sequence
  derived and/or modified CDS sequence (opt4) from neuraminidase__InfluenzaA__ABG37343
augaaccccaaccagaagaucaucaccaucggcagcgugagccugaccaucgccaccaucugcuuccugaugcagaucgccauccuggugaccaccgugacccugcacuucaagcaguacgagugcaacagcccccccaacaaccaggugaugcugugcgagcccaccaucaucgagagaaacaucaccgagaucguguaccugaccaacaccaccaucgagaaggagaucugccccaagcuggccgaguacagaaacuggagcaagccccagugcaagaucaccggcuucgcccccuucagcaaggacaacagcaucagacugagcgccggcggcgacaucugggugaccagagagcccuacgugagcugcgaccccggcaagugcuaccaguucgcccugggccagggcaccacccugaacaacagacacagcaacgacaccgugcacgacagaacccccuacagaacccugcugaugaacgagcugggcgugcccuuccaccugggcaccaagcaggugugcaucgccuggagcagcagcagcugccacgacggcaaggccuggcugcacgugugcgugaccggccacgacgagaacgccaccgccagcuucaucuacgacggcagacugguggacagcaucggcagcuggagcaagaacauccugagaacccaggagagcgagugcgugugcaucaacggcaccugcaccguggugaugaccgacggcagcgccagcgacagagccgacaccaagauccuguucaucgaggagggcaagaucgugcacaucagcccccugagcggcagcgcccagcacguggaggagugcagcugcuaccccagauaccccggcgugagaugcgugugcagagacaacuggaagggcagcaacagacccaucguggacaucaacgugaagaacuacagcaucgugagcagcuacgugugcagcggccuggugggcgacacccccagaaagaacgacagcagcagcagcagcuacugcuggaaccccaacaacgagaagggcggccacggcgugaagggcugggccuucgacgacggcaacgacguguggaugggcagaaccaucagcgaggagagcagaagcggcuacgagaccuucaaggugaucggcggcuggagcaagcccaacagcaagcugcagaucaacagacaggugaucguggacagaggcaacagaagcggcuacagcggcaucuucagcguggagggcaagagcugcaucaacagaugcuucuacguggagcugaucagaggcagaaagcaggagaccgaggugugguggaccagcaacagcaucgugguguucugcggcaccagcggcaccuacggcaccggcagcuggcccgacggcgccgacaucaaccugaugcccaucuga

SEQ ID NO: 175182 - RNA, 1410 nt, Artificial Sequence; identical to SEQ ID NO: 175161
  derived and/or modified CDS sequence (opt4) from neuraminidase__InfluenzaA__ABG37354

SEQ ID NO: 175183 - RNA, 1413 nt, Artificial Sequence; identical to SEQ ID NO: 174888
  derived and/or modified CDS sequence (opt4) from neuraminidase__InfluenzaA__ABG37365

SEQ ID NO: 175184 - RNA, 1413 nt, Artificial Sequence; identical to SEQ ID NO: 174990
  derived and/or modified CDS sequence (opt4) from neuraminidase__InfluenzaA__ABG37387

SEQ ID NO: 175185 - RNA, 1413 nt, Artificial Sequence
  derived and/or modified CDS sequence (opt4) from neuraminidase__InfluenzaA__ABG37398
augaaccccaaccagaagaucaucaccaucggcagcaucagcaucgccaucggcaucaucagccugaugcugcagaucggcaacaucaucagcaucugggccagccacagcauccagaccggcagccagaaccacaccggcgugugcaaccagagaaucaucaccuacgagaacaacaccugggugaaccacaccuacgugaacaucaacaacaccaacgugaucgccggcaaggacaagaccagcgugacccuggccggcaacagcagccugugcagcaucagcggcugggccaucuacaccaaggacaacagcaucagaaucggcagcaagggcgacguguucgugaucagagagcccuucaucagcugcagccaccuggagugcagaaccuucuuccugacccagggcgcccugcugaacgacaagcacagcaacggcaccgugaaggacagaagccccuacagagcccugaugagcugcccccugggcgaggcccccagccccuacaacagcaaguucgagagcguggccuggagcgccagcgccugccacgacggcaugggcuggcugaccaucggcaucagcggccccgacaacggcgccguggccgugcugaaguacaacggcaucaucaccgagaccaucaagagcuggaagaagcagauccugagaacccaggagagcgagugcgugugcgugaacggcagcugcuucaccaucaugaccgacggccccagcaacggcgccgccagcuacaagaucuucaagaucgagaagggcaaggugaccaagagcaucgagcugaacgcccccaacuuccacuacgaggagugcagcugcuaccccgacaccggcaccgugaugugcgugugcagagacaacuggcacggcagcaacagacccugggugagcuucaaccagaaccuggacuaccagaucggcuacaucugcagcggcguguucggcgacaaccccagacccaaggacggcgagggcagcugcaaccccgugaccguggacggcgccaacggcgugaagggcuucagcuacaaguacggcaacggcguguggaucggcagaaccaagagcaacagacugagaaagggcuucgagaugaucugggaccccaacggcuggaccgacaccgacagcgacuucagcgugaagcaggacgugguggccaucaccgacuggagcggcuacagcggcagcuucgugcagcaccccgagcugaccggccuggacugcaucagacccugcuucuggguggagcuggugagaggccugcccaaggagaacaccaccaucuggaccagcggcagcagcaucagcuucugcggcgugaacagcgacaccgccaacuggagcuggcccgacggcgccgagcugcccuucaccaucgacaaguga

SEQ ID NO: 175186 - RNA, 1410 nt, Artificial Sequence
  derived and/or modified CDS sequence (opt4) from neuraminidase__InfluenzaA__ABG37409
augaaccccaaccagaagaucaucaccaucggcagcgugagccugaccaucgccaccaucugcuuccugaugcagaucgugauccuggugaccaccgugacccugcacuucaagcaguacgagugcaacagcccccccaacaaccaggugaugcccugcgagcccaccaucaucgagagaaacaucaccgagaucguguaccugaccaacaccaccaucgagaaggagaucugccccaagcuggccgaguacagaaacuggagcaagccccagugcaacaucaccggcuucgcccccuucagcaaggacaacagcaucagacugagcgccggcggcgacaucugggugaccagagagcccuacgugagcugcgaccccgacaagugcuaccaguucgcccugggccagggcaccacccugaacaacggccacagcaacgacaccgugcacgacagaacccccuacagaacccugcugaugaacgagcugggcgugcccuuccaccugggcaccaagcaggugugcaucgccuggagcagcagcagcugccacgacggcaaggccuggcugcacgugugcgugaccggcgacgacgagaacgccaccgccagcuucaucuacaacggcagacugguggacagcaucggcagcuggagcaagaagauccugagaacccaggagagcgagugcgugugcaucaacggcaccugcaccguggugaugaccgacggcagcgccagcggcaaggccgacaccaagauccuguucaucgaggagggcaagaucgugcacaccagccugcugagcggcagcgcccagcacguggaggagugcagcugcuaccccagauaccccggcgugagaugcgugugcagagacaacuggaagggcagcaacagacccaucguggacaucaacgugaaggacuacagcaucgugagcagcuacgugugcagcggccuggugggcgacacccccagaaagaacgacagcagcagcagcagccacugccuggaccccaacaacgaggagggcggccacggcgugaagggcugggccuucgacgacagaaacgacguguggaugggcagaaccaucagcgagaagcugagaagcggcuacgagaccuucaaggugaucgagggcuggagcaagcccaacagcaagcugcagaucaacagacaggugaucguggacagaggcaacagaagcggcuacagcggcaucuucagcguggagggcaagagcugcaucaacagaugcuucuacguggagcugaucagaggcagaaagcaggagaccgaggugcuguggaccagcaacagcaucgugguguucugcggcaccagcggcaccuacggcaccggcagcuggcccgacggcgccgacaucaaccugaugcccaucuga

SEQ ID NO: 175187 - RNA, 1410 nt, Artificial Sequence
  derived and/or modified CDS sequence (opt4) from neuraminidase__InfluenzaA__ABG37442
augaaccccaaccagaagaucaucaccaucggcagcgugagccugaccaucgccaccaucugcuuccugaugcagaucgccauccuggugaccaccgugacccugcacuucaagcaguucgagugcaacagcccccccaacaaccaggugaugcugugcgagcccaccaucaucgagggcaacaucaccgagaucguguaccugaccaacaccaccaucgagaaggagaucugccccaagcuggccgaguacagaaacuggagcaagccccagugcaacaucaccggcuucgcccccuucagcaaggacaacagcaucagacugagcgccggcggcgacaucugggugaccagagagcccuacgugagcugcgaccccgacaagugcuaccaguucgcccugggccagggcaccacccugaacaacggccacagcaacgacaccgugcacgacagaacccccuacagaacccugcugaugaacgagcugggcgugcccuuccaccugggcaccagacaggugugcaucgccuggagcagcagcagcugccacgacggcaaggccuggcugcacgugugcgugaccggcgacgacgagaacgccaccgccagcuucaucuacaacggcagacugguggacagcaucggcagcuggagcaagaagauccugagaacccaggagagcgagugcgugugcaucaacggcaccugcaccguggugaugaccgacggcagcgccagcggcaaggccgacaccaagauccuguucaucgaggagggcaagaucgugcacaucagcacccugagcggcagcgcccagcacguggaggagugcagcugcuaccccagauaccccggcgugagaugcgugugcagagacaacuggaagggcagcaacagacccaucguggacaucaacgugaaggacuacagcaucgugagcagcuacgugugcagcggccuggugggcgacacccccagaaagaacgacagcuucagcagcagccacugccuggaccccaacaacgaggagggcggccacggcgugaagggcugggccuucgacgacggcaacgacguguggaugggcagaaccaucagcgagaagcugagaagcggcuacgagaccuucaaggugaucgagggcuggagcaagcccaacagcaagcugcagaccaacagacaggugaucguggagagaggcaacagaagcggcuacagcggcaucuucagcguggagggcaagagcugcaucaacagaugcuucuacguggagcugaucagaggcagaaaggaggagaccgaggugugguggaccagcaacagcaucgugguguucugcggcaccagcggcaccuacggcaccggcagcuggcccgacggcgccgacaucaaccugaugcccaucuga

SEQ ID NO: 175188 - RNA, 1410 nt, Artificial Sequence; identical to SEQ ID NO: 174214
  derived and/or modified CDS sequence (opt4) from neuraminidase__InfluenzaA__ABG37453

SEQ ID NO: 175189 - RNA, 1410 nt, Artificial Sequence; identical to SEQ ID NO: 174226
  derived and/or modified CDS sequence (opt4) from neuraminidase__InfluenzaA__ABG37464

SEQ ID NO: 175190 - RNA, 1410 nt, Artificial Sequence
  derived and/or modified CDS sequence (opt4) from neuraminidase__InfluenzaA__ABG37475
augaaccccaaccagaagaucaucaccaucggcagcgugagccugaccaucgccaccaucugcuuccugaugcagaucgccauccuggugaccaccgugacccugcacuucaagcaguacgagugcaacagcccccccaacaaccaggugaugcugugcgagcccaccaucaucgagagaaacaucaccgagaucguguaccugaccaacaccaccaucgagaaggagaucugccccaagcuggccgaguacagaaacuggagcaagccccagugcaacaucaccggcuucgcccccuucagcaaggacaacagcaucagacugagcgccggcggcgacaucugggugaccagagagcccuacgugagcugcgaccccgacaagugcuaccaguucgcccugggccagggcaccacccugaacaacggccacagcaacgacaccgugcacgacagaacccccuacagaacccugcugaugaacgagcugggcgugcccuuccaccugggcaccagacaggugugcaucgccuggagcagcagcagcugccacgacggcaaggccuggcugcacgugugcgugaccggcgacgacgagaacgccaccgccagcuucaucuacaacggcagacugguggacagcaucggcagcuggagcaagaagauccugagaacccaggagagcgagugcgugugcaucaacggcaccugcaccguggugaugaccgacggcagcgccagcggcaaggccgacaccaagauccuguucaucgaggagggcaagaucgugcacaucagcacccugagcggcagcgcccagcacguggaggagugcagcugcuaccccagauaccccggcgugagaugcgugugcagagacaacuggaagggcagcaacagacccaucguggacaucaacgugaaggacuacagcaucgugagcagcuacgugugcagcggccuggugggcgacacccccagaaagaacgacagcuucagcagcagccacugccuggaccccaacaacgaggagggcggccacggcgugaagggcugggccuucgacgacggcaacgacguguggaugggcagaaccaucagcgagaagcugagaagcggcuacgagaccuucaaggugaucgagggcuggagcaagcccaacagcaagcugcagaucaacagacaggugaucguggagagaggcgacagaagcggcuacagcggcaucuucagcguggagggcaagagcugcaucaacagaugcuucuacguggagcugaucagaggcagaaaggaggagaccgaggugcuguggaccagcaacagcaucgugguguucugcggcaccagcggcaccuacggcaccggcagcuggcccgacggcgccgacaucaaccugaugcccaucuga

SEQ ID NO: 175191 - RNA, 1410 nt, Artificial Sequence
  derived and/or modified CDS sequence (opt4) from neuraminidase__InfluenzaA__ABG37486
augaaccccaaccagaagaucaucaccaucggcagcgugagccugaccaucgccaccaucugcuuccugaugcagaucgccauccuggugaccaccgugacccugcacuucaagcaguacgagugcaacagcccccccaacaaccaggugaugcugugcgagcccaccaucaucgagagaaacaucaccgagaucguguaccugaccaacaccaccaucgagaaggagaucugccccaagcuggccgaguacagaaacuggagcaagccccagugcaaccugaccggcuucgcccccuucagcaaggacaacagcaucagacugagcgccggcggcgacaucugggugaccagagagcccuacgugagcugcgaccccgacaagugcuaccaguucgcccugggccagggcaccacccugaacaacggccacagcaacgacaccgugcacgacagaacccccuacagaacccugcugaugaacgagcugggcgugcccuuccaccugggcaccagacaggugugcaucgccuggagcagcagcagcugccacgacggcaaggccuggcugcacgugugcgugaccggcgacgacgagaacgccaccgccagcuucaucuacaacggcagacugguggacagcaucggcagcuggagcaagaagauccugagaacccaggagagcgagugcgugugcaucaacggcaccugcaccguggugaugaccgacggcagcgccagcggcaaggccgacaccaagauccuguucaucgaggagggcaagaucgugcacaucagcacccugagcggcagcgcccagcacguggaggagugcagcugcuaccccagauaccccggcgugagaugcgugugcagagacaacuggaagggcagcaacagacccaucguggacaucaacgugaaggacuacagcaucgugagcagcuacgugugcagcggccuggugggcgacacccccagaaagaacgacagcuucagcagcagccacugccuggaccccaacaacgaggagggcggccacggcgugaagggcugggccuucgacgacggcaacgacguguggaugggcagaaccaucagcgagaagcugagaagcggcuacgagaccuucaaggugaucgagggcuggagcaagcccaacagcaagcugcagaccaacagacaggugaucguggagagaggcaacagaagcggcuacagcggcaucuucagcguggagggcaagagcugcaucaacagaugcuucuacguggagcugaucagaggcagaaaggaggagaccgaggugugguggaccagcaacagcaucgugguguucugcggcaccagcggcaccuacggcaccggcagcuggcccgacggcgccgacaucaaccugaugcccaucuga

SEQ ID NO: 175192 - RNA, 1410 nt, Artificial Sequence
  derived and/or modified CDS sequence (opt4) from neuraminidase__InfluenzaA__ABG37497
augaaccccaaccagaagaucaucaccaucggcagcgugagccugaccaucgccaccaucugcuuccugaugcagaucgccauccuggugaccaccgugacccugcacuucaagcaguacgagugcaacagcccccccaacaaccaggugaugcugugcgagcccaccaucaucgagagaaacaucaccgagaucguguaccugaccaacaccaccaucgagaaggagaucugccccaagcuggccgaguacagaaacuggagcaagccccagugcaacaucaccggcuucgcccccuucagcaaggacaacagcaucagacugagcgccggcggcgacaucugggugaccagagagcccuacgugagcugcgaccccgacaagugcuaccaguucgcccugggccagggcaccacccugaacaacggccacagcaacgacaccgugcacgacagaacccccuacagaacccugcugaugaacgagcugggcgugcccuuccaccugggcaccagacaggugugcaucgccuggagcagcagcagcugccacgacggcaaggccuggcugcacgugugcgugaccggcgacgacgagaacgccaccgccagcuucaucuacaacggcagacugguggacagcaucggcagcuggagcaagaagauccugagaacccaggagagcgagugcgugugcaucaacggcaccugcaccguggugaugaccgacggcagcgccagcggcaaggccgacaccaagaucaucuucaucgaggagggcaagaucgugcacaucagcacccugagcggcagcgcccagcacguggaggagugcagcugcuaccccagauaccccggcgugagaugcgugugcagagacaacuggaagggcagcaacagacccaucguggacaucaacgugaaggacuacagcaucgugagcagcuacgugugcagcggccuggugggcgacacccccagaaagaacgacagcuucagcagcagccacugccuggaccccaacaacgaggagggcggccacggcgugaagggcugggccuucgacgacggcaacgacguguggaugggcagaaccaucagcgagaagcugagaagcggcuacgagaccuucaaggugaucgagggcuggagcaagcccaacagcaagcugcagaccaacagacaggugaucguggagagaggcaacagaagcggcuacagcggcaucuucagcguggagggcaagagcugcaucaacagaugcuucuacguggagcugaucagaggcagaaaggaggagaccgaggugugguggaccagcaacagcaucgugguguucugcggcaccagcggcaccuacggcaccggcagcuggcccgacggcgccgacaucaaccugaugcccaucuga

SEQ ID NO: 175193 - RNA, 1410 nt, Artificial Sequence; identical to SEQ ID NO: 174240
  derived and/or modified CDS sequence (opt4) from neuraminidase__InfluenzaA__ABG37508

SEQ ID NO: 175194 - RNA, 1410 nt, Artificial Sequence; identical to SEQ ID NO: 174651
  derived and/or modified CDS sequence (opt4) from neuraminidase__InfluenzaA__ABG37519

SEQ ID NO: 175195 - RNA, 1410 nt, Artificial Sequence; identical to SEQ ID NO: 174651
  derived and/or modified CDS sequence (opt4) from neuraminidase__InfluenzaA__ABG37530

SEQ ID NO: 175196 - RNA, 1410 nt, Artificial Sequence; identical to SEQ ID NO: 174651
  derived and/or modified CDS sequence (opt4) from neuraminidase__InfluenzaA__ABG37541

SEQ ID NO: 175197 - RNA, 1410 nt, Artificial Sequence; identical to SEQ ID NO: 174651
  derived and/or modified CDS sequence (opt4) from neuraminidase__InfluenzaA__ABG37552

SEQ ID NO: 175198 - RNA, 1410 nt, Artificial Sequence; identical to SEQ ID NO: 174651
  derived and/or modified CDS sequence (opt4) from neuraminidase__InfluenzaA__ABG37563

SEQ ID NO: 175199 - RNA, 1410 nt, Artificial Sequence; identical to SEQ ID NO: 174651
  derived and/or modified CDS sequence (opt4) from neuraminidase__InfluenzaA__ABG37585

SEQ ID NO: 175200 - RNA, 1410 nt, Artificial Sequence; identical to SEQ ID NO: 174651
  derived and/or modified CDS sequence (opt4) from neuraminidase__InfluenzaA__ABG37596

SEQ ID NO: 175201 - RNA, 1410 nt, Artificial Sequence; identical to SEQ ID NO: 174651
  derived and/or modified CDS sequence (opt4) from neuraminidase__InfluenzaA__ABG37607

SEQ ID NO: 175202 - RNA, 1410 nt, Artificial Sequence; identical to SEQ ID NO: 174651
  derived and/or modified CDS sequence (opt4) from neuraminidase__InfluenzaA__ABG37618

SEQ ID NO: 175203 - RNA, 1413 nt, Artificial Sequence; identical to SEQ ID NO: 174888
  derived and/or modified CDS sequence (opt4) from neuraminidase__InfluenzaA__ABG47810

SEQ ID NO: 175204 - RNA, 1413 nt, Artificial Sequence
  derived and/or modified CDS sequence (opt4) from neuraminidase__InfluenzaA__ABG47832
augaaccccaaccagaagaucaucaccaucggcagcaucagcaucgccaucggcaucaucagccugauccugcaggugggcaacaucaucagcaucugggccagccacagcauccagaccggcagccagaaccacaccggcaucugcaaccagagaaucaucaccuacgagaacagcaccugggugaaccagaccuacgugaacaucaacaacaccaacgugguggccggcaaggacaagaccagcaugacccuggccggcaacagcagccugugccccaucagaggcugggccaucuacaccaaggacaacagcaucagaaucggcagcaagggcgacguguucgugaucagagagcccuucaucagcugcagccaccuggagugcagaaccuucuuccugacccagggcgcccugcugaacgacaagcacagcaacggcaccgugaaggacagaagccccuacagagcccugaugagcugcccccugggcgaggcccccagccccuacaacagcagauucgagagcguggccuggagcgccagcgccugccacgacggccugggcuggcugaccaucggcaucagcggccccgacaacggcgccguggccgugcugaaguacaacggcaucaucaccgagaccaucaagagcuggaagaagagaauccugagaacccaggagagcgagugcgugugcaugaacggcagcugcuucaccaucaugaccgacggccccagcaacggcgccgccagcuacagaaucuucaagaucgagaagggcagagugaccaagagcaucgagcuggacgcccccaacuaccacuacgaggagugcagcugcuaccccaacaccggcaccgugaugugcgugugcagagacaacuggcacggcagcaacagacccugggugagcuucaaccagaaccuggacuaccagaucggcuacaucugcagcggcguguucggcgacaaccccagacccaaggacggcgagggcagcugcaaccccgugaccguggacggcgccgacggcgugaagggcuucagcuacagauacggcaacggcguguggaucggcagaaccaagagcaacagacugagaaagggcuucgagaugaucugggaccccaacggcuggaccgacaccgacagcgacuucagcaugaagcaggacaucguggccaugaccgacuggagcggcuacagcggcagcuucgugcagcaccccgagcugaccggccuggacugcaugagacccugcuucuggguggagcuggugagaggccugcccagagagaacaccaccaucuggaccagcggcagcagcaucagcuucugcggcgugaacagcgacaccgccaacuggagcuggcccgacggcgccgagcugcccuucaccaucgacaaguga

SEQ ID NO: 175205 - RNA, 1413 nt, Artificial Sequence; identical to SEQ ID NO: 175028
  derived and/or modified CDS sequence (opt4) from neuraminidase__InfluenzaA__ABG47843

SEQ ID NO: 175206 - RNA, 1410 nt, Artificial Sequence
  derived and/or modified CDS sequence (opt4) from neuraminidase__InfluenzaA__ABG47865
augaaccccaaccagaagaucaucaccaucggcagcgugagccugaccaucgccaccaucugcuuccugaugcagaucgccauccuggugaucaccgugacccugcacuucaagcaguacgagugcaacagcccccccaacaaccaggugaugcugugcgagcccaccaucaucgagagaaacaucaccgagaucguguaccugaccaacaccaccaucgagaaggagaucugccccaagcuggccgaguacagaaacuggagcaagccccagugcaagaucaccggcuucgcccccuucagcaaggacaacagcaucagacugagcgccggcggcgacaucugggugaccagagagcccuacgugagcugcgaccccgacaagugcuaccaguucgcccugggccagggcaccacccugaacaacagacacagcaacgacaccgugcacgacagaacccccuacagaacccugcugaugaacgagcugggcgugcccuuccaccugggcaccaagcaggugugcaucgccuggagcagcagcagcugccacgacggcaaggccuggcugcacgugugcgugaccggccacgacgagaacgccaccgccagcuucaucuacgacggcagacugguggacagcaucggcagcuggagcaagaagauccugagaacccaggagagcgagugcgugugcaucaacggcaccugcaccguggugaugaccgacggcagcgccagcggcagagccgacaccaagauccuguucaucgaggagggcaagaucgugcacaucagcccccugagcggcagcgcccagcacguggaggagugcagcugcuaccccagauacagcggcgugagaugcgugugcagagacaacuggaagggcagcaacagacccaucguggacaucaacgugaaggacuacagcaucgugagcagcuacgugugcagcggccuggugggcgacacccccagaaagaacgacagcagcagcagcagccacugccugaaccccaacaacgaggagggcggccacggcgugaagggcugggccuucgacgacggcaacgacguguggaugggcagaaccaucagcgagaagcugagaagcggcuacgagaccuucaaggugaucggcggcuggagcaagcccaacagcaagcugcagaucaacagacaggugaucguggacagaggcaacagaagcggcuacagcggcaucuucagcguggagggcaagagcugcaucaacagaugcuucuacguggagcugaucagaggcagaaagcaggagaccgaggugugguggaccagcaacagcaucgugguguucugcggcaccagcggcaccuacggcaccggcagcuggcccgacggcgccgacaucaaccugaugcccaucuga

SEQ ID NO: 175207 - RNA, 1410 nt, Artificial Sequence; identical to SEQ ID NO: 175173
  derived and/or modified CDS sequence (opt4) from neuraminidase__InfluenzaA__ABG47876

SEQ ID NO: 175208 - RNA, 1410 nt, Artificial Sequence; identical to SEQ ID NO: 175173
  derived and/or modified CDS sequence (opt4) from neuraminidase__InfluenzaA__ABG47887

SEQ ID NO: 175209 - RNA, 1410 nt, Artificial Sequence; identical to SEQ ID NO: 175160
  derived and/or modified CDS sequence (opt4) from neuraminidase__InfluenzaA__ABG47898

SEQ ID NO: 175210 - RNA, 1410 nt, Artificial Sequence; identical to SEQ ID NO: 175173
  derived and/or modified CDS sequence (opt4) from neuraminidase__InfluenzaA__ABG47909

SEQ ID NO: 175211 - RNA, 1410 nt, Artificial Sequence; identical to SEQ ID NO: 175161
  derived and/or modified CDS sequence (opt4) from neuraminidase__InfluenzaA__ABG47920

SEQ ID NO: 175212 - RNA, 1410 nt, Artificial Sequence; identical to SEQ ID NO: 175161
  derived and/or modified CDS sequence (opt4) from neuraminidase__InfluenzaA__ABG47931

SEQ ID NO: 175213 - RNA, 1410 nt, Artificial Sequence; identical to SEQ ID NO: 175161
  derived and/or modified CDS sequence (opt4) from neuraminidase__InfluenzaA__ABG47942

SEQ ID NO: 175214 - RNA, 1410 nt, Artificial Sequence
  derived and/or modified CDS sequence (opt4) from neuraminidase__InfluenzaA__ABG47953
augaaccccaaccagaagaucaucaccaucggcagcgugagccugaccaucgccaccaucugcuuccugaugcagaucgccauccuggugaccaccgugacccugcacuucaagcaguacgagugcaacagcccccccagcaaccaggugaugcugugcgagcccaccaucaucgagagaaacaucaccgagaucguguaccugaccaacaccaccaucgagaaggagaucugccccaagcuggccgaguacagaaacuggagcaagccccagugcaagaucaccggcuucgcccccuucagcaaggacaacagcaucagacugagcgccggcggcgacaucugggugaccagagagcccuacgugagcugcgaccccggcaagugcuaccaguucgcccugggccagggcaccacccugaacaacagacacagcaacgacaccgugcacgacagaacccccuacagaacccugcugaugaacgagcugggcgugcccuuccaccugggcaccaagcaggugugcaucgccuggagcagcagcagcugccacgacggcaaggccuggcugcacgugugcgugaccggccacgacgagaacgccaccgccagcuucaucuacgacggcagacugguggacagcaucggcagcuggagcaagaacauccugagaacccaggagagcgagugcgugugcaucaacggcaccugcaccguggugaugaccgacggcagcgccagcgagagagccgacaccaagauccuguucaucgaggagggcaagaucgugcacaucagcccccugagcggcagcgcccagcacguggaggagugcagcugcuaccccagauaccccggcgugagaugcgugugcagagacaacuggaagggcagcaacagacccaucguggacaucaacgugaaggacuacagcaucgugagcagcuacgugugcagcggccuggugggcgacacccccagaaagaacgacagcagcagcagcagcuacugcagaaaccccaacaacgagaagggcagccacggcgugaagggcugggccuucgacgacggcaacgacguguggaugggcagaaccaucagcgaggagcugagaagcggcuacgagaccuucaaggugaucggcggcuggagcaagcccaacagcaagcugcagaucaacagacaggugaucguggacagaggcaacagaagcggcuacagcggcaucuucagcguggagggcaagagcugcaucaacagaugcuucuacguggagcugaucagaggcagaaagcaggagaccgaggugugguggaccagcaacagcaucgugguguucugcggcaccagcggcaccuacggcaccggcagcuggcccgacggcgccaacaucaaccugaugcccaucuga

SEQ ID NO: 175215 - RNA, 1410 nt, Artificial Sequence
  derived and/or modified CDS sequence (opt4) from neuraminidase__InfluenzaA__ABG47964
augaaccccaaccagaagaucaucaccaucggcagcgugagccugaccaucgccaccaucugcuuccugaugcagaucgccauccuggugaccaccgugacccugcacuucaagcaguacgagugcaacagcccccccaacaaccaggugaugcugugcgagcccaccaucaucgagagaaacaucaccgagaucguguaccugaccaacaccaccaucgagaaggagaucugccccaagcuggccgaguacagaaacuggagcaagccccagugcaagaucaccggcuucgcccccuucagcaaggacaacagcaucagacugagcgccggcggcgacaucugggugaccagagagcccuacgugagcugcgaccccggcaagugcuaccaguucgcccugggccagggcaccacccugaacaacagacacagcaacgacaccgugcacgacagaacccccuacagaacccugcugaugaacgagcugggcgugcccuuccaccugggcaccaagcaggugugcaucgccuggagcagcagcagcugccacgacggcaaggccuggcugcacgugugcgugaccggccacgacgagaacgccaccgccagcuucaucuacgacggcagacugguggacagcaucggcagcuggagcaagaacauccugagaacccaggagagcgagugcgugugcaucaacggcaccugcaccguggugaugaccgacggcagcgccagcgagagagccgacaccaagauccuguucaucgaggagggcaagaucgugcacaucagcccccugagcggcagcgcccagcacguggaggagugcagcugcuaccccagauaccccggcgugagaugcgugugcagagacaacuggaagggcagcaacagacccaucguggacaucaacgugaaggacuacagcaucgugagcagcuacgugugcagcggccuggugggcgacacccccagaaagaacgacagcagcagcagcagcuacugccagaaccccaacaacgagaagggcagccacggcgugaagggcugggccuucgacgacggcaacgacguguggaugggcagaaccaucagcgaggagcugagaagcggcuacgagaccuucaaggugaucggcggcuggagcaagcccaacagcaagcugcagaucaacagacaggugaucguggacagaggcaacagaagcggcuacagcggcaucuucagcguggagggcaagagcugcaucaacagaugcuucuacguggagcugaucagaggcagaaagcaggagaccgaggugugguggaccagcaacagcaucgugguguucugcggcaccagcggcaccuacggcaccggcagcuggcccgacggcgccgacaucaaccugaugcccaucuga

SEQ ID NO: 175216 - RNA, 1410 nt, Artificial Sequence
  derived and/or modified CDS sequence (opt4) from neuraminidase__InfluenzaA__ABG47975
augaaccccaaccagaagaucaucaccaucggcagcgugagccugaccaucgccaccaucugcuuccugaugcagaucgccauccuggugaccaccgugacccugcacuucaagcaguacgagugcaacagcccccccagcaaccaggugaugcugugcgagcccaccaucaucgagagaaacaucaccgagaucguguaccugaccaacaccaccaucgagaaggagaucugccccaagcuggccgaguacagaaacuggagcaagccccagugcaagaucaccggcuucgcccccuucagcaaggacaacagcaucagacugagcgccggcggcgacaucugggugaccagagagcccuacgugagcugcgaccccggcaagugcuaccaguucgcccugggccagggcaccacccugaacaacagacacagcaacgacaccgugcacgacagaacccccuacagaacccugcugaugaacgagcugggcgugcccuuccaccugggcaccaagcaggugugcaucgccuggagcagcagcagcugccacgacggcaaggccuggcugcacgugugcgugaccggccacgacgagaacgccaccgccagcuucaucuacgacggcagacugguggacagcaucggcagcuggagcaagaacauccugagaacccaggagagcgagugcgugugcaucaacggcaccugcaccguggugaugaccgacggcagcgccagcgagagagccgacaccaagauccuguucaucgaggagggcaagaucgugcacaucagcccccugagcggcagcgcccagcacguggaggagugcagcugcuaccccagauaccccggcgugagaugcgugugcagagacaacuggaagggcagcaacagacccaucguggacaucaacgugaaggacuacagcaucgugagcagcuacgugugcagcggccuggugggcgacacccccagaaagaacgacagcagcagcagcagcuacugcagagaccccaacaacgagagaggcagccacggcgugaagggcugggccuucgacgacggcaacgacguguggaugggcagaaccaucagcgaggagcugagaagcggcuacgagaccuucaaggugaucggcggcuggagcaagcccaacagcaagcugcagaucaacagacaggugaucguggacagaggcaacagaagcggcuacagcggcaucuucagcguggagggcaagagcugcaucaacagaugcuucuacguggagcugaucagaggcagaaagcaggagaccgaggugugguggaccagcaacagcaucgugguguucugcggcaccagcggcaccuacggcaccggcagcuggcccgacggcgccgacaucaaccugaugcccaucuga

SEQ ID NO: 175217 - RNA, 1410 nt, Artificial Sequence
  derived and/or modified CDS sequence (opt4) from neuraminidase__InfluenzaA__ABG47986
augaaccccaaccagaagaucaucaccaucggcagcgugagccugaccaucgccaccaucugcuuccugaugcagaucgccauccuggugaccaccgugacccugcacuucaagcaguacgagugcaacagcccccccagcaaccaggugaugcugugcgagcccaccaucaucgagagaaacaucaccgagaucguguaccugaccaacaccaccaucgagaaggagaucugccccaagcuggccgaguacagaaacuggagcaagccccagugcaagaucaccggcuucgcccccuucagcaaggacaacagcaucagacugagcgccggcggcgacaucugggugaccagagagcccuacgugagcugcgaccccggcaagugcuaccaguucgcccugggccagggcaccacccugaacaacagacacagcaacgacaccgugcacgacagaacccccuacagaacccugcugaugaacgagcugggcgugcccuuccaccugggcaccaagcaggugugcaucgccuggagcagcagcagcugccacgacggcaaggccuggcugcacgugugcgugaccggccacgacgagaacgccaccgccagcuucaucuacgacggcagacugguggacagcaucggcagcuggagcaagaacauccugagaacccaggagagcgagugcgugugcaucaacggcaccugcaccguggugaugaccgacggcagcgccagcgagagagccgacaccaagauccuguucaucgaggagggcaagaucgugcacaucagcccccugagcggcagcgcccagcacguggaggagugcagcugcuaccccagauaccccggcgugagaugcgugugcagagacaacuggaagggcagcaacagacccaucguggacaucaacgugaaggacuacagcaucgugagcagcuacgugugcagcggccuggugggcgacacccccagaaagaacgacagcagcagcagcagcuacugcagaaagcccaacaacgagaagggcagccacggcgugaagggcugggccuucgacgacggcaacgacguguggaugggcagaaccaucagcgaggagcugagaagcggcuacgagaccuucaaggugaucggcggcuggagcaagcccaacagcaagcugcagaucaacagacaggugaucguggacagaggcaacagaagcggcuacagcggcaucuucagcguggagggcaagagcugcaucaacagaugcuucuacguggagcugaucagaggcagaaagcaggagaccgaggugugguggaccagcaacagcaucgugguguucugcggcaccagcggcaccuacggcaccggcagcuggcccgacggcgccgacaucaaccugaugcccaucuga

SEQ ID NO: 175218 - RNA, 1410 nt, Artificial Sequence; identical to SEQ ID NO: 175161
  derived and/or modified CDS sequence (opt4) from neuraminidase__InfluenzaA__ABG47997

SEQ ID NO: 175219 - RNA, 1410 nt, Artificial Sequence
  derived and/or modified CDS sequence (opt4) from neuraminidase__InfluenzaA__ABG48008
augaaccccaaccagaagaucaucaccaucggcagcgugagccugaccaucgccaccaucugcuuccugaugcagaucgccauccuggugaccaccgugacccugcacuucaagcaguacgagugcaacagcccccccagcaaccaggugaugcugugcgagcccaccaucaucgagagaaacaucaccgagaucguguaccugaccaacaccaccaucgagaaggagaucugccccaagcuggccgaguacagaaacuggagcaagccccagugcaagaucaccggcuucgcccccuucagcaaggacaacagcaucagacugagcgccggcggcgacaucugggugaccagagagcccuacgugagcugcgaccccggcaagugcuaccaguucgcccugggccagggcaccacccugaacaacagacacagcaacgacaccgugcacgacagaacccccuacagaacccugcugaugaacgagcugggcgugcccuuccaccugggcaccaagcaggugugcaucgccuggagcagcagcagcugccacgacggcaaggccuggcugcacgugugcgugaccggccacgacgagaacgccaccgccagcuucaucuacgacggcagacugguggacagcaucggcagcuggagcaagaacauccugagaacccaggagagcgagugcgugugcaucaacggcaccugcaccguggugaugaccgacggcagcgccagcgagagagccgacaccaagauccuguucaucgaggagggcaagaucgugcacaucagcccccugagcggcagcgcccagcacguggaggagugcagcugcuaccccagauaccccggcgugagaugcgugugcagagacaacuggaagggcagcaacagacccaucguggacaucaacgugaaggacuacagcaucgugagcagcuacgugugcagcggccuggugggcgacacccccagaagaaacgacagcagcagcagcagcuacugcagaaagcccaacaacgagaagggcagccacggcgugaagggcugggccuucgacgacggcaacgacguguggaugggcagaaccaucagcgaggagcugagaagcggcuacgagaccuucaaggugaucggcggcuggagcaagcccaacagcaagcugcagaucaacagacaggugaucguggacagaggcaacagaagcggcuacagcggcaucuucagcguggagggcaagagcugcaucaacagaugcuucuacguggagcugaucagaggcagaaagcaggagaccgaggugugguggaccagcaacagcaucgugguguucugcggcaccagcggcaccuacggcaccggcagcuggcccgacggcgccgacaucaaccugaugcccaucuga

SEQ ID NO: 175220 - RNA, 1410 nt, Artificial Sequence
  derived and/or modified CDS sequence (opt4) from neuraminidase__InfluenzaA__ABG48019
augaaccccaaccagaagaucaucaccaucggcagcgugagccugaccaucgccaccaucugcuuccugaugcagaucgccauccuggugaccaccgugacccugcacuucaagcaguacgagugcaacagcccccccagcaaccaggugaugcugugcgagcccaccaucaucgagagaaacaucaccgagaucguguaccugaccaacaccaccaucgagaaggagaucugccccaagcuggccgaguacagaaacuggagcaagccccagugcaagaucaccggcuucgcccccuucagcaaggacaacagcaucagacugagcgccggcggcgacaucugggugaccagagagcccuacgugagcugcgaccccggcaagugcuaccaguucgcccugggccagggcaccacccugaacaacagacacagcaacgacaccgugcacgacagaacccccuacagaacccugcugaugaacgagcugggcgugcccuuccaccugggcaccaagcaggugugcaucgccuggagcagcagcagcugccacgacggcaaggccuggcugcacgugugcgugaccggccacgacgagaacgccaccgccagcuucaucuacgacggcagacugguggacagcaucggcagcuggagcaagaacauccugagaacccaggagagcgagugcgugugcaucaacggcaccugcaccguggugaugaccgacggcagcgccagcgagagagccgacaccaagauccuguucaucgaggagggcaagaucgugcacaucagcccccugagcggcagcgcccagcacguggaggagugcagcugcuaccccagauaccccggcgugagaugcgccugcagagacaacuggaagggcagcaacagacccaucguggacaucaacgugaaggacuacagcaucgugagcagcuacgugugcagcggccuggugggcgacacccccagaaagaacgacagcagcagcagcagcuacugcagaaaccccaacaacgagaagggcagccacggcgugaagggcugggccuucgacgacggcaacgacguguggaugggcagaaccaucagcgaggagcugagaagcggcuacgagaccuucaaggugaucggcggcuggagcaagcccaacagcaagcugcagaucaacagacaggugaucguggacagagacaacagaagcggcuacagcggcaucuucagcguggagggcaagagcugcaucaacagaugcuucuacguggagcugaucagaggcagaaagcaggagaccgaggugugguggaccagcaacagcaucgugguguucugcggcaccagcggcaccuacggcaccggcagcuggcccgacggcgccgacaucaaccugaugcccaucuga

SEQ ID NO: 175221 - RNA, 1410 nt, Artificial Sequence; identical to SEQ ID NO: 175161
  derived and/or modified CDS sequence (opt4) from neuraminidase__InfluenzaA__ABG48030

SEQ ID NO: 175222 - RNA, 1410 nt, Artificial Sequence; identical to SEQ ID NO: 175161
  derived and/or modified CDS sequence (opt4) from neuraminidase__InfluenzaA__ABG48041

SEQ ID NO: 175223 - RNA, 1413 nt, Artificial Sequence; identical to SEQ ID NO: 174888
  derived and/or modified CDS sequence (opt4) from neuraminidase__InfluenzaA__ABG48052

SEQ ID NO: 175224 - RNA, 1410 nt, Artificial Sequence; identical to SEQ ID NO: 174790
  derived and/or modified CDS sequence (opt4) from neuraminidase__InfluenzaA__ABG48063

SEQ ID NO: 175225 - RNA, 1410 nt, Artificial Sequence; identical to SEQ ID NO: 174913
  derived and/or modified CDS sequence (opt4) from neuraminidase__InfluenzaA__ABG48074

SEQ ID NO: 175226 - RNA, 1410 nt, Artificial Sequence; identical to SEQ ID NO: 174214
  derived and/or modified CDS sequence (opt4) from neuraminidase__InfluenzaA__ABG48085

SEQ ID NO: 175227 - RNA, 1410 nt, Artificial Sequence
  derived and/or modified CDS sequence (opt4) from neuraminidase__InfluenzaA__ABG48107
augaaccccaaccagaagaucaucaccaucggcagcgugagccugaccaucgccaccaucugcuuccugaugcagaucgccauccuggugaccaccgugacccugcacuucaagcaguacgagugcaacagcccccccaacaaccaggugaugcugugcgagcccaccaucaucgagagaaacaucaccgagaucguguaccugaccaacaccaccaucgagaaggagaucugccccaagcuggccgaguacagaaacuggagcaagccccagugcaacaucaccggcuucgcccccuucagcaaggacaacagcaucagacugagcgccggcggcgacaucugggugaccagagagcccuacgugagcugcgaccccgacaagugcuaccaguucgcccugggccagggcaccacccugaacaacggccacagcaacgacaccgugcacgacagaacccccuacagaacccugcugaugaacgagcugggcgugcccuuccaccugggcaccagacaggugugcaucgccuggagcagcagcagcugccacgacggcaaggccuggcugcacgugugcgugaccggcgacgacgagaacgccaccgccagcuucaucuacaacggcagacugguggacagcaucggcagcuggagcaagaagacccugagaacccaggagagcgagugcgugugcaucaacggcaccugcaccguggugaugaccgacggcagcgccagcggcaaggccgacaccaagauccuguucaucgaggagggcaagaucgugcacaucagcacccugagcggcagcgcccagcacguggaggagugcagcugcuaccccagauaccccggcgugagaugcgugugcagagacaacuggaagggcagcaacagacccaucguggacaucaacgugaaggacuacagcaucgugagcagcuacgugugcagcggccuggugggcgacacccccagaaagaacgacagcuucagcagcagccacugccuggaccccaacaacgaggagggcggccacggcgugaagggcugggccuucgacgacggcaacgacguguggaugggcagaaccaucagcgagaagcugagaagcggcuacgagaccuucaaggugaucgagggcuggagcaagcccaacagcaagcugcagaucaacagacaggugaucguggagagaggcaacagaagcggcuacagcggcaucuucagcguggagggcaagagcugcaucaacagaugcuucuacguggagcugaucagaggcagaaaggaggagaccgaggugugguggaccagcaacagcaucgugguguucugcggcaccagcggcaccuacggcaccggcagcuggcccgacggcgccgacaucaaccugaugcccaucuga

SEQ ID NO: 175228 - RNA, 1410 nt, Artificial Sequence; identical to SEQ ID NO: 174226
  derived and/or modified CDS sequence (opt4) from neuraminidase__InfluenzaA__ABG48118

SEQ ID NO: 175229 - RNA, 1410 nt, Artificial Sequence; identical to SEQ ID NO: 174226
  derived and/or modified CDS sequence (opt4) from neuraminidase__InfluenzaA__ABG48129

SEQ ID NO: 175230 - RNA, 1410 nt, Artificial Sequence; identical to SEQ ID NO: 174214
  derived and/or modified CDS sequence (opt4) from neuraminidase__InfluenzaA__ABG48140

SEQ ID NO: 175231 - RNA, 1410 nt, Artificial Sequence; identical to SEQ ID NO: 174226
  derived and/or modified CDS sequence (opt4) from neuraminidase__InfluenzaA__ABG48151

SEQ ID NO: 175232 - RNA, 1410 nt, Artificial Sequence; identical to SEQ ID NO: 174214
  derived and/or modified CDS sequence (opt4) from neuraminidase__InfluenzaA__ABG48173

SEQ ID NO: 175233 - RNA, 1410 nt, Artificial Sequence; identical to SEQ ID NO: 174226
  derived and/or modified CDS sequence (opt4) from neuraminidase__InfluenzaA__ABG48184

SEQ ID NO: 175234 - RNA, 1410 nt, Artificial Sequence
  derived and/or modified CDS sequence (opt4) from neuraminidase__InfluenzaA__ABG48195
augaaccccaaccagaagaucaucaccaucggcagcgugagccugaccaucgccaccaucugcuuccugaugcagaucgccauccuggugaccaccgugacccugcacuucaagcaguacgagugcaacagcccccccaacaaccaggugaugcugugcgagcccaccaucaucgagagaaacaucaccgagaucguguaccugaccaacaccaccaucgagaaggagaucugccccaagcuggccgaguacagaaacuggagcaagccccagugcaacaucaccggcuucgcccccuucagcaaggacaacagcaucagacugagcgccggcggcgacaucugggugaccagagagcccuacgugagcugcgaccccgacaagugcuaccaguucgcccugggccagggcaccacccugaacaacggccacagcaacgacaccgugcacgacagaacccccuacagaacccugcugaugaacgagcugggcgugcccuuccaccugggcaccagacaggugugcaucgccuggagcagcagcagcugccacgacggcaaggccuggcugcacgugugcgugaccggcgacgacgagaacgccaccgccagcuucaucuacaacggcagacugguggacagcaucggcagcuggagcaagaagauccugagaacccaggagagcgagugcgugugcaucaacggcaccugcaccguggugaugaccgacggcagcgccagcggcaaggccgacaccaagauccuguucaucgaggagggcaagaucgugcacaucagcacccugagcggcagcgcccagcacguggaggagugcagcugcuaccccagauaccccggcgugagaugcgugugcagagacaacuggaagggcagcaacagacccaucguggacaucaacgugaaggacuacagcaucgugagcagcuacgugugcagcggccuggugggcgacacccccagaaagaacgacagcuucagcagcagccacugcaucgaccccaacaacgaggagggcggccacggcgugaagggcugggccuucgacgacggcaacgacguguggaugggcagaaccaucagcgagaagcugagaagcggcuacgagaccuucaaggugaucgagggcuggagcaagcccaacagcaagcugcagaccaacagacaggugaucguggagagaggcaacagaagcggcuacagcggcaucuucagcguggagggcaagagcugcaucaacagaugcuucuacguggagcugaucagaggcagaaaggaggagaccgaggugugguggaccagcaacagcaucgugguguucugcggcaccagcggcaccuacggcaccggcagcuggcccgacggcgccgacaucaaccugaugcccaucuga

SEQ ID NO: 175235 - RNA, 1410 nt, Artificial Sequence
  derived and/or modified CDS sequence (opt4) from neuraminidase__InfluenzaA__ABG48206
augaaccccaaccagaagaucaucaccaucggcagcgugagccugaccaucgccaccaucugcuuccugaugcagaucgccauccuggugaccaccgugacccugcacuucaagcagcacgagugcaacagcccccccaacaaccaggugaugcugugcgagcccaccaucaucgagagaaacaucaccgagaucguguaccugaccaacaccaccaucgagaaggagaucugccccaagcugguggaguacagaaacuggagcaagccccagugcaacaucaccggcuucgcccccuucagcaaggacaacagcaucagacugagcgccggcggcgacaucugggugaccagagagcccuacgugagcugcgaccccgacaagugcuaccaguucgcccugggccagggcaccacccugaacaacggccacagcaacgacaccgugcacgacagaacccccuacagaacccugcugaugaacgagcugggcgugcccuuccaccugggcaccagacaggugugcaucgccuggagcagcagcagcugccacgacggcaaggccuggcugcacgugugcgugaccggcgacgacaagaacgccaccgccagcuucaucuacaacggcagacugguggacagcaucggcagcuggagcaagaagauccugagaacccaggagagcgagugcgugugcaucaacggcaccugcaccguggugaugaccgacggcagcgccagcggcaaggccgacaccaagauccuguucaucgaggagggcaagaucgugcacaucagcacccugagcggcagcgcccagcacguggaggagugcagcugcuaccccagauaccccggcgugagaugcgugugcagagacaacuggaagggcagcaacagacccaucguggacaucaacgugaaggacuacagcaucgugagcagcuacgugugcagcggccuggugggcgacacccccagaaagaacgacagcuucagcagcagccacugccuggaccccaacaacgaggagggcggccacggcgugaagggcugggccuucgacgacggcaacgacguguggaugggcagaaccaucaacgagaagcugagaagcggcuacgagaccuucaaggugaucgagggcuggagcaagcccaacagcaagcugcagaucaacagacaggugaucguggagagaggcaacagaagcggcuacagcggcaucuucagcguggagggcaagagcugcaucaacagaugcuucuacguggagcugaucagaggcagaaaggaggagaccgaggugugguggaccagcaacagcaucgugguguucugcggcaccagcggcaccuacggcaccggcagcuggcccgacggcgccgacaucaaccugaugcccaucuga

SEQ ID NO: 175236 - RNA, 1410 nt, Artificial Sequence; identical to SEQ ID NO: 174651
  derived and/or modified CDS sequence (opt4) from neuraminidase__InfluenzaA__ABG48217

SEQ ID NO: 175237 - RNA, 1410 nt, Artificial Sequence; identical to SEQ ID NO: 174651
  derived and/or modified CDS sequence (opt4) from neuraminidase__InfluenzaA__ABG48228

SEQ ID NO: 175238 - RNA, 1410 nt, Artificial Sequence; identical to SEQ ID NO: 175235
  derived and/or modified CDS sequence (opt4) from neuraminidase__InfluenzaA__ABG48239

SEQ ID NO: 175239 - RNA, 1410 nt, Artificial Sequence; identical to SEQ ID NO: 174651
  derived and/or modified CDS sequence (opt4) from neuraminidase__InfluenzaA__ABG48250

SEQ ID NO: 175240 - RNA, 1410 nt, Artificial Sequence
  derived and/or modified CDS sequence (opt4) from neuraminidase__InfluenzaA__ABG48272
augaaccccaaccagaagaucaucaccaucggcagcgugagccugaccaucagcaccaucugcuucuucaugcagaucgccauccugaucaccaccgugacccugcacuucaagcaguacgaguucaacagcccccccaacaaccaggugaugcugugcgagcccaccaucaucgagagaaacaucaccgagaucguguaccugaccaacaccaccaucgagaaggagaucugccccaagcuggccgaguacagaaacuggagcaagccccagugcgacaucaccggcuucgcccccuucagcaaggacaacagcaucagacugagcgccggcggcgacaucugggugaccagagagcccuacgugagcugcgaccccgacaagugcuaccaguucgcccugggccagggcaccacccugaacaacgugcacagcaacgacaccgugcacgacagaacccccuacagaacccugcugaugaacgagcugggcgugcccuuccaccugggcaccaagcaggugugcaucgccuggagcagcagcagcugccacgacggcaaggccuggcugcacgugugcgugaccggcgacgacaagaacgccaccgccagcuucaucuacaacggcagacugguggacagcaucgugagcuggagcaagaagauccugagaacccaggagagcgagugcgugugcaucaacggcaccugcaccguggugaugaccgacggcagcgccagcggcaaggccgacaccaagauccuguucaucgaggagggcaagaucgugcacaccagcacccugagcggcagcgcccagcacguggaggagugcagcugcuaccccagauaccccggcgugagaugcgugugcagagacaacuggaagggcagcaacagacccaucguggacaucaacaucaaggacuacagcaucgugagcagcuacgugugcagcggccuggugggcgacacccccagaaagaacgacagcagcagcagcagccacugccuggaccccaacaacgaggagggcggccacggcgugaagggcugggccuucgacgacggcaacgacguguggaugggcagaaccaucagcgagaagagcagaagcggcuacgagaccuucaaggugaucgagggcuggagcaaccccaacagcaagcugcagaucaacagacaggugaucguggacagaggcaacagaagcggcuacagcggcaucuucagcguggagggcaagagcugcaucaacagaugcuucuacguggagcugaucagaggcagaaaggaggagaccgaggugcuguggaccagcaacagcaucgugguguucugcggcaccagcggcaccuacggcaccggcagcuggcccgacggcgccgacaucaaccugaugcccaucuga

SEQ ID NO: 175241 - RNA, 1410 nt, Artificial Sequence
  derived and/or modified CDS sequence (opt4) from neuraminidase__InfluenzaA__ABG48294
augaaccccaaccagaagaucaucaccaucggcagcgugagccugaccaucgccaccaucugcuuccugaugcagaucgccauccuggugaccaccgugacccugcacuucaagcaguacgagugcagcagcccccccaacaaccaggugauccccugccagcccaccaucaucgagagaaacaucaccgagaucguguaccugaccaacaccaccaucgagaaggagaucugccccaagcugguggaguacagaaacuggagcaagccccagugcaagaucaccggcuucgcccccuucagcaaggacaacagcaucagacugagcgccggcggcgacaucugggugaccagagagcccuacgugagcugcgaccccggcaagugcuaccaguucgcccugggccagggcaccacccugaacaacagacacagcaacgacaccgugcacgacagaacccccuacagaacccugcugaugaacgagcugggcgugcccuuccaccugggcaccaagcaggugugcaucgccuggagcagcagcagcugccacgacggcaaggccuggcugcacgugugcgugaccggccacgacgagaacgccaccgccagcuucaucuacgacggcagacugguggacagcaucggcagcuggagcagaaacauccugagaacccaggagagcgagugcgugugcaucaacggcaccugcaccguggugaugaccgacggcagcgccagcgagagagccgacaccaagauccuguucaucgaggagggcaagguggugcacaucagcccccugagcggcagcgcccagcacguggaggagugcagcugcuaccccagauaccccggcgugagaugcgugugcagagacaacuggaagggcagcaacagacccaucguggacaucaacgugaaggacuacagcaucaucagcagcuacgugugcagcggccuggugggcgacacccccagaagaaacgacagcagcagcagcagcuacugccagaaccccaacaacgagaagggcagccacggcgugaagggcugggccuucgacgacggcaacgacguguggaugggcagaaccaucagcgaggagcugagaagcggcuacgagaccuucaaggugaucggcggcuggagcacccccaacagcaagcugcagaucaacagacaggugaucguggacagcggcaacagaagcggcuacagcggcaucuucagcguggagggcaagagcugcaucaacagaugcuucuacguggagcugaucagaggcagaaagcaggagaccaaggugugguggaccagcaacagcaucgugguguucugcggcaccagcggcaccuacggcaccggcagcuggcccgacggcgccgacaucgaccugaugcccaucuga

SEQ ID NO: 175242 - RNA, 1410 nt, Artificial Sequence
  derived and/or modified CDS sequence (opt4) from neuraminidase__InfluenzaA__ABG48305
augaaccccaaccagaagaucaucaucaucggcagcgugagccugaccaucgccaccaucugcuuccugaugcagaucgccauccuggugaccaccgugacccugcacuucaagcaguacgagugcaacagcccccccaacaaccaggugaugcugugcgagcccaccaucaucgagagaaacaucaccgagaucguguaccugaccaacaccaccaucgagaaggagaucugccccaagcuggccgaguacagaaacuggagcaagccccagugcaagaucaccggcuucgcccccuucagcaaggacaacagcaucagacugagcgccggcggcgacaucugggugaccagagagcccuacgugagcugcgaccccggcaagugcuaccaguucgcccugggccagggcaccacccugaacaacagacacagcaacgacaccgugcacgacagaacccccuacagaacccugcugaugaacgagcugggcgugcccuuccaccugggcaccaagcaggugugcaucgccuggagcagcagcagcugccacgacggcaaggccuggcugcacgugugcgugaccggccacgacgagaacgccaccgccagcuucaucuacgacggcagacugguggacagcaucggcagcuggagcaagaacauccugagaacccaggagagcgagugcgugugcaucaacggcaccugcaccguggugaugaccgacggcagcgccagcgagagagccgacaccaagauccuguucaucgaggagggcaagaucgugcacaucagcccccugagcggcagcgcccagcacguggaggagugcagcugcuaccccagauaccccggcgugagaugcgugugcagagacaacuggaagggcagcaacagacccaucguggacaucaacgugaaggacuacagcaucgugagcagcuacgugugcagcggccuggugggcgacacccccagaaagaacgacagcagcagcagcagcuacugcagaaaccccaacaacgagaagggcagccacggcgugaagggcugggccuucgacgacggcaacgacguguggaugggcagaaccaucagcgaggagcugagaagcggcuacgagaccuucaaggugaucggcggcuggagcaagcccaacagcaagcugcagaucaacagacaggugaucguggacagaggcaacagaagcggcuacagcggcaucuucagcguggagggcaagagcugcaucaacagaugcuucuacguggagcugaucagaggcagaaagcaggagaccgaggugugguggaccagcaacagcaucgugguguucugcggcaccagcggcaccuacggcaccggcagcuggcccgacggcgccgacaucaaccugaugcccaucuga

SEQ ID NO: 175243 - RNA, 1410 nt, Artificial Sequence
  derived and/or modified CDS sequence (opt4) from neuraminidase__InfluenzaA__ABG48316
augaaccccaaccagaagaucaucaccaucggcagcgugagccugaccguggccaccaucugcuuccugaugcagaucgccauccuggugaccaccgugacccugcacuucaagcaguacgagugcaacagcccccccaacaaccaggugaugcugugcgagcccaccaucaucgagagaaacaucaccgagaucguguaccugaccaacaccaccaucgagaaggagaucugccccaagcuggccgaguacagaaacuggagcaagccccagugcaagaucaccggcuucgcccccuucagcaaggacaacagcaucagacugagcgccggcggcgacaucugggugaccagagagcccuacgugagcugcgaccccggcaagugcuaccaguucgcccugggccagggcaccacccugaacaacagacacagcaacgacaccgugcacgacagaacccccuacagaacccugcugaugaacgagcugggcgugcccuuccaccugggcaccaagcaggugugcaucgccuggagcagcagcagcugccacgacggcaaggccuggcugcacgugugcgugaccggccacgacgagaacgccaccgccagcuucaucuacgacggcagacugguggacagcaucggcagcuggagcaagaacauccugagaacccaggagagcgagugcgugugcaucaacggcaccugcaccguggugaugaccgacggcagcgccagcgagagagccgacaccaagauccuguucaucgaggagggcaagaucgugcacaucagcccccugagcggcagcgcccagcacguggaggagugcagcugcuaccccagauaccccggcgugagaugcgugugcagagacaacuggaagggcagcaacagacccaucguggacaucaacgugaaggacuacagcaucgugagcagcuacgugugcagcggccuggugggcgacacccccagaaagaacgacagcagcagcagcagcuacugcagaaaccccaacaacgagaagggcagccacggcgugaagggcugggccuucgacgacggcaacgacguguggaugggcagaaccaucagcgaggagcugagaagcggcuacgagaccuucaaggugaucggcggcuggagcaagcccaacagcaagcugcagaucaacagacaggugaucguggagagaggcaacagaagcggcuacagcggcaucuucagcguggagggcaagagcugcaucaacagaugcuucuacguggagcugaucagaggcagaaagcaggagaccgaggugugguggaccagcaacagcaucgugguguucugcggcaccagcggcaccuacggcaccggcagcuggcccgacggcgccgacaucaaccugaugcccaucuga

SEQ ID NO: 175244 - RNA, 1410 nt, Artificial Sequence
  derived and/or modified CDS sequence (opt4) from neuraminidase__InfluenzaA__ABG48327
augaaccccaaccagaagaucaucaccaucggcagcgugagccugaccaucgccaccaucugcuuccugaugcagaucgccauccuggugaccaccgugacccugcacuucaagcaguacgagugcaacagcccccccaacaaccaggugaugcugugcgagcccaccaucaucgagagaaacaucaccgagaucguguaccugaccaacaccaccaucgagaaggagaucugccccaagcuggccgaguacagaaacuggagcaagccccagugcaagaucaccggcuucgcccccuucagcaaggacaacagcaucagacugagcgccggcggcgacaucugggugaccagagagcccuacgugagcugcgaccccggcaagugcuaccaguucgcccugggccagggcaccacccugaacaacagacacagcaacgacaccgugcacgacagaacccccuacagaacccugcugaugaacgagcugggcgugcccuuccaccugggcaccaagcaggugugcaucgccuggagcagcagcagcugccacgacggcaaggccuggcugcacgugugcgugaccggccacgacgagaacgccaccgccagcuucaucuacgacggcagacugguggacagcaucggcagcuggagcaagaacauccugagaacccaggagagcgagugcgugugcaucaacggcaccugcaccguggugaugaccgacggcagcgccagcgagagagccgacaccaagauccuguucaucgaggagggcaagaucgugcacaucagcccccugagcggcagcgcccagcacguggaggagugcagcugcuaccccagauaccccggcgugagaugcgugugcagagacaacuggaagggcagcaacagacccaucguggacaucaacgugaaggacuacagcaucgugagcagcuacgugugcagcggccuggugggcgacacccccagaaagaacgacagcagcagcagcagcuacugcagaaaccccaacaacgagaagggcagcagaggcgugaagggcugggccuucgacgacggcaacgacguguggaugggcagaaccaucagcgaggagcugagaagcggcuacgagaccuucaaggugaucggcggcuggagcaagcccaacagcaagcugcagaucaacagacaggugaucguggacagaggcaacagaagcggcuacagcggcaucuucagcguggagggcaagagcugcaucaacagaugcuucuacguggagcugaucagaggcagaaagcaggagaccgaggugugguggaccagcaacagcaucgugguguucugcggcaccagcggcaccuacggcaccggcagcuggcccgacggcgccgacaucaaccugaugcccaucuga

SEQ ID NO: 175245 - RNA, 1410 nt, Artificial Sequence
  derived and/or modified CDS sequence (opt4) from neuraminidase__InfluenzaA__ABG48338
augaaccccaaccagaagaucaucaccaucggcagcgugagccugaccaucgccaccaucugcuuccugaugcagaucgccauccuggugaccaccgugacccugcacuucaagcaguacgagugcaacagcccccccaacaaccaggugaugcugugcgagcccaccaucaucgagagaaacaucaccgagaucguguaccugaccaacaccaccaucgagaaggagaucugccccaagcuggccgaguacagaaacuggagcaagccccagugcaagaucaccggcuucgcccccuucagcaaggacaacagcaucagacugagcgccggcggcgacaucugggugaccagagagcccuacgugagcugcgaccccggcaagugcuaccaguucgcccugggccagggcaccacccugaacaacagacacagcaacgacaccgugcacgacagaacccccuacagaacccugcugaugaacgagcugggcgugcccuuccaccugggcaccaagcaggugugcaucgccuggagcagcagcagcugccacgacggcaaggccuggcugcacgugugcgugaccggccacgacgagaacgccaccgccagcuucaucuacgacggcagacugguggacagcaucggcagcuggagcaagaacauccugagaacccaggagagcgagugcgugugcaucaacggcaccugcaccguggugaugaccgacggcagcgccagcgagagagccgacaccaagauccuguucaucgaggagggcaagaucgugcacaucagcccccugagcggcagcgcccagcacguggaggagugcagcugcuaccccagauaccccggcgugagaugcgugugcagagacaacuggaagggcagcaacagacccaucguggacaucaacgugaaggacuacagcaucgugagcagcuacgugugcagcggccuggugggcgacacccccagaaagaacgacagcagcagcagcagcuacugcagaaaccccaacaacgagaagggcagccacggcgugaagggcugggccuucgacgacggcaacgacguguggaugggcagaaccaucagcgaggagcugagaagcggcuacgagaccuucaaggugaucggcggcuggagcaagcccaacagcaagcugcagaucaacagacaggugaucguggacagaggcaacagaagcggcuacagcggcaucuucagcguggagggcaagagcugcaucaacagaugcuucuacguggagcugaucagaggcagaaagcaggagaccgaggugugguggaccagcaacagcaucgugguguucugcggcaccagcggcaccuacggcaccggcagcuggcccgacggcgccgacaucaaccugaugcccaucuga

SEQ ID NO: 175246 - RNA, 1410 nt, Artificial Sequence; identical to SEQ ID NO: 175245
  derived and/or modified CDS sequence (opt4) from neuraminidase__InfluenzaA__ABG48349

SEQ ID NO: 175247 - RNA, 1410 nt, Artificial Sequence
  derived and/or modified CDS sequence (opt4) from neuraminidase__InfluenzaA__ABG48360
augaaccccaaccagaagaucaucaccaucggcagcgugagccugaccaucgccaccaucugcuuccugaugcagaucgccauccuggugaccaccgugacccugcacuucaagcaguacgagugcaacagcccccccaacaaccaggugaugcugugcgagcccaccaucaucgagagaaacaucaccgagaucguguaccugaccaacaccaccaucgagaaggagaucugccccaagcuggccgaguacagaaacuggagcaagccccagugcaagaucaccggcuucgcccccuucagcaaggacaacagcaucagacugagcgccggcggcgacaucugggugaccagagagcccuacgugagcugcgaccccggcaagugcuaccaguucgcccugggccagggcaccacccugaacaacagacacagcaacgacaccgugcacgacagaacccccuacagaacccugcugaugagcgagcugggcgugcccuuccaccugggcaccaagcaggugugcaucgccuggagcagcagcagcugccacgacggcaaggccuggcugcacgugugcgugaccggccacgacgagaacgccaccgccagcuucaucuacgacggcaagcugguggacagcaucggcagcuggagcaagaacauccugagaacccaggagagcgagugcgugugcaucaacggcaccugcaccguggugaugaccgacggcagcgccagcgagagagccgacaccaagauccuguucaucgaggagggcaagaucgugcacaucagcccccugagcggcagcgcccagcacguggaggagugcagcugcuaccccagauaccccggcgugagaugcgugugcagagacaacuggaagggcagcaacagacccaucguggacaucaacgugaaggaccacagcaucgugagcagcuacgugugcagcggccuggugggcgacacccccagaaagaacgacagcagcagcagcagcuacugcagaaaccccaacaacgagaagggcagccacggcgugaagggcugggccuucgacgacggcaacgacguguggaugggcagaaccaucagcgaggagcugagaagcggcuacgagaccuucaaggugaucggcggcuggagcaagcccaacagcaagcugcagaucaacagacaggugaucguggacagaggcaacagaagcggcuacagcggcaucuucagcguggagggcaagagcugcaucaacagaugcuucuacguggagcugaucagaggcagaaagcaggagaccgaggugugguggaccagcaacagcaucgugguguucugcggcaccagcggcaccuacggcaccggcagcuggcccgacggcgccgacaucaaccugaugcccaucuga

SEQ ID NO: 175248 - RNA, 1410 nt, Artificial Sequence; identical to SEQ ID NO: 175245
  derived and/or modified CDS sequence (opt4) from neuraminidase__InfluenzaA__ABG48371

SEQ ID NO: 175249 - RNA, 1410 nt, Artificial Sequence
  derived and/or modified CDS sequence (opt4) from neuraminidase__InfluenzaA__ABG67138
augaaccccaaccagaagaucaucaccaucggcagcgugagccugaccaucgccaccaucugcuuccugacccagaucgccauccuggugaccaccgugacccugcacuucaagcaguacgagugcaacagcccccccagcaaccaggugaugcugugcgagcccaccaccaucgagagaaacaucaccgagaucguguaccugaccaacaccaccaucgagaaggagaucugccccaagcuggccgaguacagaaacuggagcaagccccagugcaagaucaccggcuucgcccccuucagcaaggacaacagcaucagacugagcgccggcggcgacaucugggugaccagagagcccuacgugagcugcgaccccgacaagugcuaccaguucgcccugggccagggcaccacccugaacaacagacacagcaacgacaccgugcacgacagaacccccuacagaacccugcugaugaacgagcugggcgugcccuuccaccugggcaccaagcaggugugcaucgccuggagcagcagcagcugccacgacggcaaggccuggcugcacgugugcgugaccggccacgacgagaacgccaccgccagcuucaucuacgacggcagacugguggacagcaucggcagcuggagcaagaagauccugagaacccaggagagcgagugcgugugcaucaacggcaccugcaccguggugaugaccgacggcagcgccagcggcagagccgacaccaagauccuguucaucgaggagggcaagaucgugcacaucagcccccugagcggcagcgcccagcacguggaggagugcagcugcuaccccagauaccccggcgugagaugcgugugcagagacaacuggaagggcagcaacagacccaucguggacaucaacgugaaggacuacagcaucgugagcagcuacgugugcagcggccuggugggcgacacccccagaaagaacgacagcagcagcagcagccacugccugaaccccaacaacgaggagggcggccacggcgugaagggcugggccuucgacgacggcaacgacguguggaugggcagaaccaucagcgagaagcugagaagcggcuacgagaccuucaaggugaucgagggcuggagcaagcccaacagcaagcugcagaucaacagacaggugaucguggacagaggcaacagaagcggcuacagcggcaucuucagcguggagggcaagagcugcaucaacagaugcuucuacguggagcugaucagaggcagaaagcaggagaccgaggugugguggaccagcaacagcaucgugguguucugcggcaccagcggcaccuacggcaccggcagcuggcccgacggcgccgacaucaaccugaugcccaucuga

SEQ ID NO: 175250 - RNA, 1410 nt, Artificial Sequence; identical to SEQ ID NO: 174186
  derived and/or modified CDS sequence (opt4) from neuraminidase__InfluenzaA__ABG67149

SEQ ID NO: 175251 - RNA, 1410 nt, Artificial Sequence
  derived and/or modified CDS sequence (opt4) from neuraminidase__InfluenzaA__ABG67160
augaaccccaaccagaagaucaucaccaucggcagcgugagccugaccaucgccaccaucugcuuccugaugcagaucgccauccuggugaccaccgugacccugcacuucaagcaguacgagugcaacagcccccccaacaaccaggugaugcugugcgagcccaccaucaucgagagaaacaucaccgagaucguguaccugaccaacaccaccaucgagaaggagaucugccccaagcuggccgaguacagaagcuggagcaagccccagugcaagaucaccggcuucgcccccuucagcaaggacaacagcaucagacugagcgccggcggcgacaucugggugaccagagagcccuacgugagcugcgaccccggcaagugcuaccaguucgcccugggccagggcaccacccugaacaacagacacagcaacgacaccgugcacgacagaacccccuacagaacccugcugaugaacgagcugggcgugcccuuccaccugggcaccaagcaggugugcaucgccuggagcagcagcagcugccacgacggcaaggccuggcugcacgugugcgugaccggccacgacgagaacgccaccgccagcuucaucuacgacggcagacugguggacagcaucggcagcuggagcaagaacauccugagaacccaggagagcgagugcgugugcgugaacggcaccugcaccguggugaugaccgacggcagcgccagcgagagagccgacaccaagauccuguucaucgaggagggcaagaucgugcacaucagcccccugagcggcagcgcccagcacguggaggagugcagcugcuaccccagauaccccggcgugagaugcgugugcagagacaacuggaagggcagcaacagacccaucguggacaucaacgugaaggacuacagcaucgugagcagcuacgugugcagcggccuggugggcgacacccccagaaagaacgacagcagcagcagcagcuacugcuggaaccccaacaacgagaagggcggccacggcgugaagggcugggccuucgacgacggcaacgacguguggaugggcagaaccaucagcgaggagcugagaagcggcuacgagaccuucaaggugaucggcggcuggagcaagcccaacagcaagcugcagaucaacagacaggugaucguggacagaggcaacagaagcggcuacagcggcaucuucagcguggagggcaagagcugcaucaacagaugcuucuacguggagcugaucagaggcagaaagcaggagaccgaggugugguggaccagcaacagcaucgugguguucugcggcaccagcggcaccuacggcaccggcagcuggcccgacggcgccgacaucaaccugaugcccaucuga

SEQ ID NO: 175252 - RNA, 1410 nt, Artificial Sequence
  derived and/or modified CDS sequence (opt4) from neuraminidase__InfluenzaA__ABG67171
augaaccccaaccagaagaucaucaccaucggcagcgugagccugaccaucgccaccaucugcuuccugaugcagaucgccauccuggugaccaccgugacccugcacuucaagcaguacgagugcaacagcccccccaacaaccaggugaugcugugcgagcccaccaucaucgagagaaacaucaccgagaucguguaccugaccaacaccaccaucgagaaggagaucugccccaagcuggccgaguacagaaacuggagcaagccccagugcaagaucaccggcuucgcccccuucagcaaggacaacagcaucagacugagcgccggcggcgacaucugggugaccagagagcccuacgugagcugcgaccccggcaagugcuaccaguucgcccugggccagggcaccacccugaacaacagacacagcaacgacaccgugcacgacagaacccccuacagaacccugcugaugaacgagcugggcgugcccuuccaccugggcaccaagcaggugugcaucgccuggagcagcagcagcugccacgacggcaaggccuggcugcacgugugcgugaccggccacgacaagaacgccaccgccagcuucaucuacgacggcagacugguggacagcaucggcagcuggagcaagaacauccugagaacccaggagagcgagugcgugugcaucaacggcaccugcaccguggugaugaccgacggcagcgccagcgacagagccgacaccaagauccuguucaucgaggagggcaagaucgugcacaucagcccccugagcggcagcgcccagcacguggaggagugcagcugcuaccccagauaccccggcgugagaugcgugugcagagacaacuggaagggcagcaacagacccaucguggacaucaacgugaaggacuacagcaucgugagcagcuacgugugcagcggccuggugggcgacacccccagaaagaacgacagcagcagcagcagcuacugcuggaaccccaacaacgagaagggcggccacggcgugaagggcugggccuucgacgacggcaacgacguguggaugggcagaaccaucagcgaggagagcagaagcggcuacgagaccuucaaggugaucggcggcuggagcaagcccaacagcaagcugcagaucaacagacaggugaucguggacagaggcaacagaagcggcuacagcggcaucuucagcguggagggcaagagcugcaucaacagaugcuucuacguggagcugaucagaggcagaaagcaggagaccgaggugugguggaccagcaacagcaucgugguguucugcggcaccagcggcaccuacggcaccggcagcuggcccgacggcgccgacaucaaccugaugcccaucuga

SEQ ID NO: 175253 - RNA, 1410 nt, Artificial Sequence; identical to SEQ ID NO: 175173
  derived and/or modified CDS sequence (opt4) from neuraminidase__InfluenzaA__ABG67182

SEQ ID NO: 175254 - RNA, 1410 nt, Artificial Sequence
  derived and/or modified CDS sequence (opt4) from neuraminidase__InfluenzaA__ABG67193
augaaccccaaccagaagaucaucaccaucggcagcgugagccugaccaucgccaccaucugcuuccugaugcagaucgccauccuggugaccaccgugacccugcacuucaagcaguacgagugcaacagcccccccaacaaccaggugaugcugugcgagcccaccaccaucgagagaaacaucaccgagaucguguaccugaccaacaccaccaucgagaaggagaucugccccaagcuggccgaguacagaaacuggagcaagccccagugcaagaucaccggcuucgcccccuucagcaaggacaacagcaucagacugagcgccggcggcgacaucugggugaccagagagcccuacgugagcugcgaccccggcaagugcuaccaguucgcccugggccagggcaccacccugaacaacagacacagcaacgacaccgugcacgacagaacccccuacagaacccugcugaugaacgagcugggcgugcccuuccaccugggcaccaagcaggugugcaucgccuggagcagcagcagcugccacgacggcaaggccuggcugcacgugugcgugaccggccacgacgagaacgccaccgccagcuucaucuacgacggcagacugguggacagcaucggcagcuggagcaagaacauccugagaacccaggagagcgagugcgugugcaucaacggcaccugcaccguggugaugaccgacggcagcgccagcgacagagccgacaccaagauccuguucaucgaggagggcaagaucgugcacaucagcccccugagcggcagcgcccagcacguggaggagugcagcugcuaccccagauaccccggcgugagaugcgugugcagagacaacuggaagggcagcaacagacccaucguggacaucaacgugaagaacuacagcaucgugagcagcuacgugugcagcggccuggugggcgacacccccagaaagaacgacagcagcagcagcagcuacugcuggaaccccaacaacgagaagggcggccacggcgugaagggcugggccuucgacgacggcaacgacguguggaugggcagaaccaucagcgaggagagcagaagcggcuacgagaccuucaaggugaucggcggcuggagcaagcccaacagcaagcugcagaucaacagacaggugaucguggacagaggcaacagaagcggcuacagcggcaucuucagcguggagggcaagagcugcaucaacagaugcuucuacguggagcugaucagaggcagaaagcaggagaccgaggugugguggaccagcaacagcaucgugguguucugcggcaccagcggcaccuacggcaccggcagcuggcccgacggcgccgacaucaaccugaugcccaucuga

SEQ ID NO: 175255 - RNA, 1410 nt, Artificial Sequence; identical to SEQ ID NO: 175173
  derived and/or modified CDS sequence (opt4) from neuraminidase__InfluenzaA__ABG67204

SEQ ID NO: 175256 - RNA, 1410 nt, Artificial Sequence
  derived and/or modified CDS sequence (opt4) from neuraminidase__InfluenzaA__ABG67215
augaaccccaaccagaagaucaucaccaucggcagcgugagccugaccaucgccaccaucugcuuccugaugcagaucgccauccuggugaccaccgugacccugcacuucaagcaguacgagugcaacagcccccccagcaaccaggugaugcugugcgagcccaccaucaucgagagaaacaucaccgagaucguguaccugaccaacaccaccaucgagaaggagaucugccccaagcuggccgaguacagaaacuggagcaagccccagugcaagaucaccggcuucgcccccuucagcaaggacaacagcaucagacugagcgccggcggcgacaucugggugaccagagagcccuacgugagcugcggccccggcaagugcuaccaguucgcccugggccagggcaccacccugaacaacagacacagcaacgacaccgugcacgacagaacccccuacagaacccugcugaugaacgagcugggcgugcccuuccaccugggcaccaagcaggugugcaucgccuggagcagcagcagcugccacgacggcaaggccuggcugcacgugugcgugaccggccacgacgagaacgccaccgccagcuucaucuacgacggcagacugguggacagcaucggcagcuggagcaagaacauccugagaacccaggagagcgagugcgugugcaucaacggcaccugcaccguggugaugaccgacggcagcgccagcgagagagccgacaccaagauccuguucaucgaggagggcaagaucgugcacaucagcccccugagcggcagcgcccagcacguggaggagugcagcugcuaccccagauaccccggcgugagaugcgugugcagagacaacuggaagggcagcaacagacccaucguggacaucaacgugaaggacuacagcaucgugagcagcuacgugugcagcggccuggugggcgacacccccagaaagaacgacagcagcagcagcagcuacugcagaaaccccaacaacgagaagggcagccacggcgugaagggcugggccuucgacgacggcaacgacguguggaugggcagaaccaucagcgaggagcugagaagcggcuacgagaccuucaaggugaucggcggcuggagcaagcccaacagcaagcugcagaucaacagacaggugaucguggacagaggcaacagaagcggcuacagcggcaucuucagcguggagggcaagagcugcaucaacagaugcuucuacguggagcugaucagaggcagaaagcaggagaccgaggugugguggaccagcaacagcaucgugguguucugcggcaccagcggcaccuacggcaccggcagcuggcccgacggcgccgacaucaaccugaugcccaucuga

SEQ ID NO: 175257 - RNA, 1410 nt, Artificial Sequence; identical to SEQ ID NO: 175161
  derived and/or modified CDS sequence (opt4) from neuraminidase__InfluenzaA__ABG67226

SEQ ID NO: 175258 - RNA, 1410 nt, Artificial Sequence; identical to SEQ ID NO: 175161
  derived and/or modified CDS sequence (opt4) from neuraminidase__InfluenzaA__ABG67248

SEQ ID NO: 175259 - RNA, 1413 nt, Artificial Sequence; identical to SEQ ID NO: 174888
  derived and/or modified CDS sequence (opt4) from neuraminidase__InfluenzaA__ABG67480

SEQ ID NO: 175260 - RNA, 1413 nt, Artificial Sequence; identical to SEQ ID NO: 174456
  derived and/or modified CDS sequence (opt4) from neuraminidase__InfluenzaA__ABG67494

SEQ ID NO: 175261 - RNA, 1410 nt, Artificial Sequence; identical to SEQ ID NO: 174214
  derived and/or modified CDS sequence (opt4) from neuraminidase__InfluenzaA__ABG67505

SEQ ID NO: 175262 - RNA, 1410 nt, Artificial Sequence; identical to SEQ ID NO: 174214
  derived and/or modified CDS sequence (opt4) from neuraminidase__InfluenzaA__ABG67516

SEQ ID NO: 175263 - RNA, 1410 nt, Artificial Sequence; identical to SEQ ID NO: 175227
  derived and/or modified CDS sequence (opt4) from neuraminidase__InfluenzaA__ABG67527

SEQ ID NO: 175264 - RNA, 1410 nt, Artificial Sequence
  derived and/or modified CDS sequence (opt4) from neuraminidase__InfluenzaA__ABG67538
augaaccccaaccagaagaucaucaccaucggcagcgugagccugaccaucgccaccaucugcuuccugaugcagaucgccauccuggugaccaccgugacccugcacuucaagcaguacgagugcaacagcccccccaacaaccaggugaugcugugcgagcccaccaccaucgagagaaacaccaccgagaucguguaccugaccaacaccaccaucgagaaggagaucugccccaagcuggccgaguacagaaacuggagcaagccccagugcaacaucaccggcuucgcccccuucagcaaggacaacagcaucagacugagcgccggcggcgacaucugggugaccagagagcccuacgugagcugcgaccccgacaagugcuaccaguucgcccugggccagggcaccacccugaacaacggccacagcaacgacaccgugcacgacagaacccccuacagaacccugcugaugaacgagcugggcgugcccuuccaccugggcaccagacaggugugcaucgccuggagcagcagcagcugccacgacggcaaggccuggcugcacgugugcgugaccggcgacgacgagaacgccaccgccagcuucaucuacaacggcagacugguggacagcaucggcagcuggagcaagaagauccugagaacccaggagagcgagugcgugugcaucaacggcaccugcaccguggugaugaccgacggcagcgccagcggcaaggccgacaccaagauccuguucaucgaggagggcaagaucgugcacaucagcacccugagcggcagcgcccagcacguggaggagugcagcugcuaccccagauaccccggcgugagaugcgugugcagagacaacuggaagggcagcaacagacccaucaucgacaucaacgugaaggacuacagcaucgugagcagcuacgugugcagcggccuggugggcgacacccccagaaagaacgacagcuucagcagcagccacugccuggaccccaacaacgaggagggcggccacggcgugaagggcugggccuucgacgacggcaacgacguguggaugggcagaaccaucagcgagaagcugagaagcggcuacgagaccuucaaggugaucgagggcuggagcaagcccaacagcaagcugcagaccaacagacaggugaucguggagagaggcaacagaagcggcuacagcggcaucuucagcguggagggcaagagcugcaucaacagaugcuucuacguggagcugaucagaggcagaaaggaggagaccgaggugugguggaccagcaacagcaucgugguguucugcggcaccagcggcaccuacggcaccggcagcuggcccgacggcgccgacaucaaccugaugcccaucuga

SEQ ID NO: 175265 - RNA, 1410 nt, Artificial Sequence
  derived and/or modified CDS sequence (opt4) from neuraminidase__InfluenzaA__ABG67549
augaaccccaaccagaagaucaucaccaucggcagcgugagccugaccaucgccaccaucugcuuccugaugcagaucgccauccuggugaccaccgugacccugcacuucaagcagcacgagugcaacagcccccccaacaaccaggugaugcugugcgagcccaccaucaucgagagaaacaucaccgagaucguguaccugaccaacaccaccaucgagaaggagaucugccccaagcugguggaguacagaaacuggagcaagccccagugcaacaucaccggcuucgcccccuucagcaaggacaacagcaucagacugagcgccggcggcgacaucugggugaccagagagcccuacgugagcugcgaccccgacaagugcuaccaguucgcccugggccagggcaccacccugaacaacggccacagcaacgacaccgugcacgacagaacccccuacagaacccugcugaugaacgagcugggcgugcccuuccaccugggcaccagacaggugugcaucgccuggagcagcagcagcugccacgacggcaaggccuggcugcacgugugcgugaccggcgacgacaagaacgccaccgccagcuucaucuacaacggcagacugguggacagcaucggcagcuggagcaagaagauccugagaacccaggagagcgagugcgugugcaucaacggcaccugcaccguggugaugaccgacggcagcgccagcggcaaggccgacaccaagauccuguucaucgaggagggcaagaucgugcacaucagcacccugagcggcagcgcccagcacguggaggagugcagcugcuaccccagauaccccggcgugagaugcgugugcagagacaacuggaagggcagcaacagacccaucguggacaucaacgugaaggacuacagcaucgugagcagcuacgugugcagcggccuggugggcgacacccccagaaagaacgacagcuucagcagcagccacugccuggaccccaacaacgaggagggcggccacggcgugaagggcugggccuucgacgacggcaacgacguguggaugggcagaaccaucagcgagaagcugagaagcggcuacgagaccuucaaggugaucgagggcuggagcaagcccaacagcaagcugcagaucaacagacaggugaucguggagagaggcaacagaagcggcuacagcggcaucuucagcguggagggcaagagcugcaucaacagaugcuucuacguggagcugaucagaggcagaaaggaggagaacgaggugugguggaccagcaacagcaucgugguguucugcggcaccagcggcaccuacggcaccggcagcuggcccgacggcgccgacaucaaccugaugcccaucuga

SEQ ID NO: 175266 - RNA, 1410 nt, Artificial Sequence; identical to SEQ ID NO: 174651
  derived and/or modified CDS sequence (opt4) from neuraminidase__InfluenzaA__ABG67560

SEQ ID NO: 175267 - RNA, 1410 nt, Artificial Sequence; identical to SEQ ID NO: 174651
  derived and/or modified CDS sequence (opt4) from neuraminidase__InfluenzaA__ABG67571

SEQ ID NO: 175268 - RNA, 1410 nt, Artificial Sequence
  derived and/or modified CDS sequence (opt4) from neuraminidase__InfluenzaA__ABG67582
augaaccccaaccagaagaucaucaccaucggcagcgugagccugaccaucgccaccaucugcuuccugaugcagaucgccauccuggugaccaccgugacccugcacuucaagcagcacgagugcaacagcccccccaacaaccaggugaugcugugcgagcccaccaucaucgagagaaacaucaccgagaucguguaccugaccaacaccaccaucgagaaggagaucugccccaagcugguggaguacagaaacuggagcaagccccagugcaacaucaccggcuucgcccccuucagcaaggacaacagcaucagacugagcgccggcggcgacaucugggugaccagagagcccuacgugagcugcgaccccgacaagugcuaccaguucgcccugggccagggcaccacccugaacaacggccacagcaacgacaccgugcacgacagaacccccuacagaacccugcugaugaacgagcugggcgugcccuuccaccugggcaccagacaggugugcaucgccuggagcagcagcagcugccacgacggcaaggccuggcugcacgugugcgugaccggcgacgacaagaacgccaccgccagcuucaucuacaacggcagacugguggacagcaucggcagcuggagcaagaagauccugagaacccaggagagcgagugcgugugcaucaacggcaccugcaccguggugaugaccgacggcagcgccagcggcaaggccgacaccaagauccuguucaucgaggagggcaagaucgugcacaucagcacccugagcggcagcgccaagcacguggaggagugcagcugcuaccccagauaccccggcgugagaugcgugugcagagacaacuggaagggcagcaacagacccaucguggacaucaacgugaaggacuacagcaucgugagcagcuacgugugcagcggccuggugggcgacacccccagaaagaacgacagcuucagcagcagccacugccuggaccccaacaacgaggagggcggccacggcgugaagggcugggccuucgacgacggcaacgacguguggaugggcagaaccaucagcgagaagcugagaagcggcuacgagaccuucaaggugaucgagggcuggagcaagcccaacagcaagcugcagaucaacagacaggugaucguggagagaggcaacagaagcggcuacagcggcaucuucagcguggagggcaagagcugcaucaacagaugcuucuacguggagcugaucagaggcagaaaggaggagaccgaggugugguggaccagcaacagcaucgugguguucugcggcaccagcggcaccuacggcaccggcagcuggcccgacggcgccgacaucaaccugaugcccaucuga

SEQ ID NO: 175269 - RNA, 1410 nt, Artificial Sequence; identical to SEQ ID NO: 175235
  derived and/or modified CDS sequence (opt4) from neuraminidase__InfluenzaA__ABG67593

SEQ ID NO: 175270 - RNA, 1410 nt, Artificial Sequence; identical to SEQ ID NO: 174651
  derived and/or modified CDS sequence (opt4) from neuraminidase__InfluenzaA__ABG67604

SEQ ID NO: 175271 - RNA, 1410 nt, Artificial Sequence; identical to SEQ ID NO: 174651
  derived and/or modified CDS sequence (opt4) from neuraminidase__InfluenzaA__ABG67615

SEQ ID NO: 175272 - RNA, 1410 nt, Artificial Sequence; identical to SEQ ID NO: 174651
  derived and/or modified CDS sequence (opt4) from neuraminidase__InfluenzaA__ABG67626

SEQ ID NO: 175273 - RNA, 1410 nt, Artificial Sequence; identical to SEQ ID NO: 174651
  derived and/or modified CDS sequence (opt4) from neuraminidase__InfluenzaA__ABG67637

SEQ ID NO: 175274 - RNA, 1410 nt, Artificial Sequence; identical to SEQ ID NO: 174651
  derived and/or modified CDS sequence (opt4) from neuraminidase__InfluenzaA__ABG67648

SEQ ID NO: 175275 - RNA, 1410 nt, Artificial Sequence
  derived and/or modified CDS sequence (opt4) from neuraminidase__InfluenzaA__ABG67659
augaaccccaaccagaagaucaucaccaucggcagcgugagccugaccaucgccaccaucugcuuccugaugcagaucgccauccuggugaccaccgugacccugcacuucaagcagcacgagugcaacagcccccccaacaaccaggugaugcugugcgagcccaccaucaucgagagaaacaucaccgagaucguguaccugaccaacaccaccaucgagaaggagaucugccccaagcugguggaguacagaaacuggagcaagccccagugcaacaucaccggcuucgcccccuucagcagagacaacagcaucagacugagcgccggcggcgacaucugggugaccagagagcccuacgugagcugcgaccccgacaagugcuaccaguucgcccugggccagggcaccacccugaacaacggccacagcaacgacaccgugcacgacagaacccccuacagaacccugcugaugaacgagcugggcgugcccuuccaccugggcaccagacaggugugcaucgccuggagcagcagcagcugccacgacggcaaggccuggcugcacgugugcgugaccggcgacgacaagaacgccaccgccagcuucaucuacaacggcagacugguggacagcaucggcagcuggagcaagaagauccugagaacccaggagagcgagugcgugugcaucaacggcaccugcaccguggugaugaccgacggcagcgccagcggcaaggccgacaccaagauccuguucaucgaggagggcaagaucgugcacaucagcacccugagcggcagcgcccagcacguggaggagugcagcugcuaccccagauaccccggcgugagaugcgugugcagagacaacuggaagggcagcaacagacccaucguggacaucaacgugaaggacuacagcaucgugagcagcuacgugugcagcggccuggugggcgacacccccagaaagaacgacagcuucagcagcagccacugccuggaccccaacaacgaggagggcggccacggcgugaagggcugggccuucgacgacggcaacgacguguggaugggcagaaccaucagcgagaagcugagaagcggcuacgagaccuucaaggugaucgagggcuggagcaagcccaacagcaagcugcagaucaacagacaggugaucguggagagaggcaacagaagcggcuacagcggcaucuucagcguggagggcaagagcugcaucaacagaugcuucuacguggagcugaucagaggcagaaaggaggagaccgaggugugguggaccagcaacagcaucgugguguucugcggcaccagcggcaccuacggcaccggcagcuggcccgacggcgccgacaucaaccugaugcccaucuga

SEQ ID NO: 175276 - RNA, 1410 nt, Artificial Sequence
  derived and/or modified CDS sequence (opt4) from neuraminidase__InfluenzaA__ABG67670
augaaccccaaccagaagaucaucaccaucggcagcgugagccugaccaucgccaccaucugcuuccugaugcagaucgccauccugaucaccaccgugacccugcacuucaagcaguacgagugcaacagcccccccaacaaccaggugaugcugugcgagcccaccaucaucgagagaaacaucaccgagaucguguaccugaccaacaccaccaucgagaaggagaucugccccaagcuggccgaguacagaaacuggagcaagccccagugcaagaucaccggcuucgcccccuucagcaaggacaacagcaucagacugagcgccggcggcgacaucugggugaccagagagcccuacgugagcugcgaccccggcaagugcuaccaguucgcccugggccagggcaccacccugaacaacagacacagcaacgacaccgugcacgacagaacccccuacagaacccugcugaugaacgagcugggcgugcccuuccaccugggcaccaagcaggugugcaucgccuggagcagcagcagcugccacgacggcaaggccuggcugcacgugugcgugaccggccacgacgagaacgccaccgccagcuucaucuacgacggcagacugguggacagcaucggcagcuggagcaagaacauccugagaacccaggagagcgagugcgugugcaucaacggcaccugcaccguggugaugaccgacggcagcgccagcggcagagccgacaccaagauccuguucaucgaggagggcaagaucgugcacaucagcccccugagcggcagcgcccagcacguggaggagugcagcugcuaccccagauaccccggcgugagaugcgugugcagagacaacuggaagggcagcaacagacccaucguggacaucaacgugaaggacuacagcaucgugagcagcuacgugugcagcggccuggugggcgacacccccagaaagaacgacagcagcagcagcagccacugccugaaccccaacaacgaggagggcggccacggcgugaagggcugggccuucgacgacggcaacgacguguggaugggcagaaccaucagcgagaagcugagaagcggcuacgagaccuucaaggugaucggcggcuggagcaagcccaacagcaagcugcagaucaacagacaggugaucguggacagaggcaacagaagcggcuacagcggcaucuucagcguggagggcaagagcugcaucaacagaugcuucuacguggagcugaucagaggcagaaagcaggagaccgaggugugguggaccagcaacagcaucgugguguucugcggcaccagcggcaccuacggcaccggcagcuggcccgacggcgccgacaucaaccugaugcccaucuga

SEQ ID NO: 175277 - RNA, 1410 nt, Artificial Sequence; identical to SEQ ID NO: 174790
  derived and/or modified CDS sequence (opt4) from neuraminidase__InfluenzaA__ABG79944

SEQ ID NO: 175278 - RNA, 1413 nt, Artificial Sequence; identical to SEQ ID NO: 175119
  derived and/or modified CDS sequence (opt4) from neuraminidase__InfluenzaA__ABG79955

SEQ ID NO: 175279 - RNA, 1410 nt, Artificial Sequence
  derived and/or modified CDS sequence (opt4) from neuraminidase__InfluenzaA__ABG79966
augaaccccaaccagaagaucaucaccaucggcagcgugagccugaccaucgccaccaucugcuuccugaugcagaucgccauccuggugaccaccgugacccugcacuucaagcaguacgagugcaacagcccccccagcaaccaggugaugcugugcgagcccaccaucaucgagagaaacaucaccgagaucguguaccugaccaacaccaccaucgagaaggagaucugccccaagcuggccgaguacagaaacuggagcaagccccagugcaagaucaccggcuucgcccccuucagcaaggacaacagcaucagacugagcgccggcggcgacaucugggugaccagagagcccuacgugagcugcgaccccggcaagugcuaccaguucgcccugggccagggcaccacccugaacaacagacacagcaacgacaccgugcacgacagaacccccuacagaacccugcugaugaacgagcugggcgugcccuuccaccugggcaccaagcaggugugcaucgccuggagcagcagcagcugccacgacggcaaggccuggcugcacgugugcgugaccggccacgacgagaacgccaccgccagcuucaucuacgacggcagacugguggacagcaucggcagcuggagcaagaacauccugagaacccaggagagcgagugcgugugcaucaacggcaccugcaccguggugaugaccgacggcagcgccagcgagagagccgacaccaagauccuguucaucgaggagggcaagaucgugcacaucagcccccugagcggcagcgcccagcacguggaggagugcagcugcuaccccagauaccccggcgugagaugcgugugcagagacaacuggaagggcagcaacagacccaucguggacaucaacgugaaggacuacagcaucgugagcagcuacgugugcagcggccuggugggcgacacccccagaaagaacgacagcagcagcagcagcuacugccagaaccccaacaacgagaagggcagccacggcgugaagggcugggccuucgacgacggcaacgacguguggaugggcagaaccaucagcgaggagcugagaagcggcuacgagaccuucaaggugaucggcggcuggagcaagcccaacagcaagcugcagaucaacagacaggugaucguggacagaggcaacagaagcggcuacagcggcaucuucagcguggagggcaagagcugcaucaacagaugcuucuacguggagcugaucagaggcagaaagcaggagaccgaggugugguggaccagcaacagcaucgugguguucugcggcaccagcggcaccuacggcaccggcagcuggcccgacggcgccgacaucaaccugaugcccaucuga

SEQ ID NO: 175280 - RNA, 1410 nt, Artificial Sequence
  derived and/or modified CDS sequence (opt4) from neuraminidase__InfluenzaA__ABG79977
augaaccccaaccagaagaucaucaccaucggcagcgugagccugaccaucgccaccaucugcuuccugaugcagaucgccauccuggugaccaccgugacccugcacuucaagcaguacgagugcaacagcccccccaacaaccaggccaugcugugcgagcccaccaucaucgagagaaacaucaccgagaucguguaccugaccaacaccaccaucgagaaggagaucugccccaagcuggccgaguacagaaacuggagcaagccccagugcaagaucaccggcuucgcccccuucagcaaggacaacagcaucagacugagcgccggcggcgacaucugggugaccagagagcccuacgugagcugcgaccccggcaagugcuaccaguucgcccugggccagggcaccacccugaacaacagacacagcaacgacaccgugcacgacagaacccccuacagaacccugcugaugaacgagcugggcgugcccuuccaccugggcaccaagcaggugugcaucgccuggagcagcagcagcugccacgacggcaaggccuggcugcacgugugcgugaccggccacgacgagaacgccaccgccagcuucaucuacgacggcagacugguggacagcaucggcagcuggagcaagaacauccugagaacccaggagagcgagugcgugugcaucaacggcaccugcaccguggugaugaccgacggcagcgccagcgacagagccgacaccaagauccuguucaucgaggagggcaagaucgugcacaucagcccccugagcggcagcgcccagcacguggaggagugcagcugcuaccccagauaccccggcgugagaugcgugugcagagacaacuggaagggcagcaacagacccaucguggacaucaacgugaaggacuacagcaucgugagcagcuacgugugcagcggccuggugggcgacacccccagaaagaacgacagcagcagcagcagcuacugcuggaaccccaacaacgagaagggcggccacggcgugaagggcugggccuucgacgacggcaacgacguguggaugggcagaaccaucagcgaggagagcagaagcggcuacgagaccuucaaggugaucggcggcuggagcaagcccaacagcaagcugcagaucaacagacaggugaucguggacagaggcaacagaagcggcuacagcggcaucuucagcguggagggcaagagcugcaucaacagaugcuucuacguggagcugaucagaggcagaaagcaggagaccgaggugugguggaccagcaacagcaucgugguguucugcggcaccagcggcaccuacggcaccggcagcuggcccgacggcgccgacaucaaccugaugcccaucuga

SEQ ID NO: 175281 - RNA, 1410 nt, Artificial Sequence; identical to SEQ ID NO: 175173
  derived and/or modified CDS sequence (opt4) from neuraminidase__InfluenzaA__ABG79988

SEQ ID NO: 175282 - RNA, 1410 nt, Artificial Sequence; identical to SEQ ID NO: 175173
  derived and/or modified CDS sequence (opt4) from neuraminidase__InfluenzaA__ABG79999

SEQ ID NO: 175283 - RNA, 1410 nt, Artificial Sequence
  derived and/or modified CDS sequence (opt4) from neuraminidase__InfluenzaA__ABG80010
augaaccccaaccagaagaucaucaccaucggcagcgugagccugaccaucgccaccaucugcuuccugaugcagaucgccauccuggugaccaccgugacccugcacuucaagcaguacgagugcaacagcccccccaacaaccaggugaugcugugcgagcccaccaucaucgagagaaacaucaccgagaucguguaccugaccaacaccaccaucgagaaggagaucugccccaagcuggccgaguacagaaacuggagcaagccccagugcaagaucaccggcuucgcccccuucagcaaggacaacagcaucagacugagcgccggcggcgacaucugggugaccagagagcccuacgugagcugcgaccccggcaagugcuaccaguucgcccugggcaagggcaccacccugaacaacagacacagcaacgacaccgugcacgacagaacccccuacagaacccugcugaugaacgagcugggcgugcccuuccaccugggcaccaagcaggugugcaucgccuggagcagcagcagcugccacgacggcaaggccuggcugcacgugugcgugaccggccacgacgagaacgccaccgccagcuucaucuacgacggcagacugguggacagcaucggcagcuggagcaagaacauccugagaacccaggagagcgagugcgugugcaucaacggcaccugcaccguggugaugaccgacggcagcgccagcgacagagccgacaccaagauccuguucaucgaggagggcaagaucgugcacaucagcccccugagcggcagcgcccagcacguggaggagugcagcugcuaccccagauaccccggcgugagaugcgugugcagagacaacuggaagggcagcaacagacccaucguggacaucaacgugaaggacuacagcaucgugagcagcuacgugugcagcggccuggugggcgacacccccagaaagaacgacagcagcagcagcagcuacugcuggaaccccaacaacgagaagggcggccacggcgugaagggcugggccuucgacgacggcaacgacguguggaugggcagaaccaucagcgaggagagcagaagcggcuacgagaccuucaaggugaucggcggcuggagcaagcccaacagcaagcugcagaucaacagacaggugaucguggacagaggcaacagaagcggcuacagcggcaucuucagcguggagggcaagagcugcaucaacagaugcuucuacguggagcugaucagaggcagaaagcaggagaccgaggugugguggaccagcaacagcaucgugguguucugcggcaccagcggcaccuacggcaccggcagcuggcccgacggcgccgacaucaaccugaugcccaucuga

SEQ ID NO: 175284 - RNA, 1410 nt, Artificial Sequence; identical to SEQ ID NO: 175173
  derived and/or modified CDS sequence (opt4) from neuraminidase__InfluenzaA__ABG80021

SEQ ID NO: 175285 - RNA, 1410 nt, Artificial Sequence
  derived and/or modified CDS sequence (opt4) from neuraminidase__InfluenzaA__ABG80032
augaaccccaaccagaagaucaucaccaucggcagcgugagccugaccaucgccaccaucugcuuccugaugcagaucgccauccuggugaccaccgugacccugcacuucaagcaguacgagugcaacagcccccccaacaaccaggugaugcugugcgagcccaccaucaucgagagaaacaucaccgagaucguguaccugaccaacaccaccaucgagaaggagaucugccccaagcuggccgaguacagaaacuggagcaagccccagugcaagaucaccggcuucgcccccuucagcaaggacaacagcaucagacugagcgccggcggcgacaucugggugaccagagagcccuacgugagcugcgaccccggcaagugcuaccaguucgcccugggccagggcaccacccugaacaacagacacagcaacgacaccgugcacgacagaacccccuacagaacccugcugaugaacgagcugggcgugcccuuccaccugggcaccaagcaggugugcaucgccuggagcagcagcagcugccacgacggcaaggccuggcugcacgugugcgugaccggccacgacgagaacgccaccgccagcaucaucuacgacggcagacugguggacagcaucagcagcuggagcaagaacauccugagaacccaggagagcgagugcgugugcaucaacggcaccugcaccguggugaugaccgacggcagcgccagcgagagagccgacaccaagauccuguucaucgaggagggcaagaucgugcacaucagcccccugagcggcagcgcccagcacguggaggagugcagcugcuaccccagauaccccggcgugagaugcgugugcagagacaacuggaagggcagcaacagacccaucguggacaucaacgugaaggacuacagcaucgugagcagcuacgugugcagcggccuggugggcgacacccccagaaagaacgacagcagcagcagcagcuacugccugaaccccaacaacgaggagggcggccacggcgugaagggcugggccuucgacgacggcaacgacguguggaugggcagaaccaucagcgagaagcugagaagcggcuacgagaccuucaaggugaucggcggcuggagcaagcccaacagcaagcugcagaucaacagacaggugaucguggacagaggcaacagaagcggcuacagcggcaucuucagcguggagggcaagagcugcgugaacagaugcuucuacguggagcugaucagaggcagaaagcaggagaccgaggugugguggaccagcaacagcaucgugguguucugcggcaccagcggcaccuacggcaccggcagcuggcccgacggcgccgacaucaaccugaugcccaucuga

SEQ ID NO: 175286 - RNA, 1410 nt, Artificial Sequence; identical to SEQ ID NO: 175160
  derived and/or modified CDS sequence (opt4) from neuraminidase__InfluenzaA__ABG80043

SEQ ID NO: 175287 - RNA, 1410 nt, Artificial Sequence; identical to SEQ ID NO: 175173
  derived and/or modified CDS sequence (opt4) from neuraminidase__InfluenzaA__ABG80054

SEQ ID NO: 175288 - RNA, 1410 nt, Artificial Sequence; identical to SEQ ID NO: 175160
  derived and/or modified CDS sequence (opt4) from neuraminidase__InfluenzaA__ABG80065

SEQ ID NO: 175289 - RNA, 1410 nt, Artificial Sequence
  derived and/or modified CDS sequence (opt4) from neuraminidase__InfluenzaA__ABG80076
augaaccccaaccagaagaucaucaccaucggcagcgugagccugaccaucgccaccaucugcuuccugaugcagaucgccauccuggugaccaccgugacccugcacuucaagcaguacgagugcaacagcccccccaacaaccaggugaugcugugcgagcccaccaucaucgagagaaacaucaccgagaucguguaccugaccaacaccaccaucgagaaggagaucugccccaagcuggccgaguacagaaacuggagcaagccccagugcaagaucaccggcuucgcccccuucagcaaggacaacagcaucagacugagcgccggcggcgacaucugggugaccagagagcccuacgugagcugcgaccccggcaagugcuaccaguucgcccugggccagggcaccacccugaacaacagacacagcaacgacaccgugcacgacagaacccccuacagaacccugcugaugaacgagcugggcgugcccuuccaccugggcaccaagcaggugugcaucgccuggagcagcagcagcugccacgacggcaaggccuggcugcacgugugcgugaccggccacgacgagaacgccaccgccagcuucaucuacgacggcagacugguggacagcaucggcagcuggagcaagaacauccugagaacccaggagagcgagugcgugugcaucaacggcaccugcaccguggugaugaccgacggcagcgccagcgagagagccgacaccaagauccuguucaucgaggagggcaagaucgugcacaucagcccccugagcggcagcgcccagcacguggaggagugcagcugcuaccccagauaccccggcgugagaugcgugugcagagacaacuggaagggcagcaacagacccaucguggacaucaacgugaaggacuacagcaucgugagcagcuacgugugcagcggccuggugggcgacacccccagaaagaacgacagcagcagcagcagcuacugcagaaaccccaacaacgagaagggcagccacggcgugaagggcugggccuucgacgacggcaacgacguguggaugggcagaaccaucagcgaggagcugagaagcggcuacgagaccuucaaggugaucggcggcuggagcaagcccaacagcaagcugcagaucaacagacaggugaucguggacagaggcaacagaagcggcuacagcggcaucuucagcguggagggcaagaacugcaucaacagaugcuucuacguggagcugaucagaggcagaaagcaggagaccgaggugugguggaccagcaacagcaucgugguguucugcggcaccagcggcaccuacggcaccggcagcuggcccgacggcgccgacaucaaccugaugcccaucuga

SEQ ID NO: 175290 - RNA, 1410 nt, Artificial Sequence
  derived and/or modified CDS sequence (opt4) from neuraminidase__InfluenzaA__ABG80087
augaaccccaaccagaagaucaucaccaucggcagcgugagccugaccaucgccaccaucugcuuccugaugcagaucgccgugcuggugaccaccgugacccugcacuucaagcaguacgagugcaacagcccccccagcaaccaggugaugcugugcgagcccaccaucaucgagagaaacaucaccgagaucguguaccugaccaacaccaccaucgagaaggagaucugccccaagcuggccgaguacagaaacuggagcaagccccagugcaagaucaccggcuucgcccccuucagcaaggacaacagcaucagacugagcgccggcggcgacaucugggugaccagagagcccuacgugagcugcgaccccggcaagugcuaccaguucgcccugggccagggcaccacccugaacaacagacacagcaacgacaccgugcacgacagaacccccuacagaacccugcugaugaacgagcugggcgugcccuuccaccugggcaccaagcaggugugcauggccuggagcagcagcagcugccacgacggcaaggccuggcugcacgugugcgugaccggccacgacgagaacgccaccgccagcuucaucuacgacggcagacugguggacagcaucggcagcuggagcaagaacauccugagaacccaggagagcgagugcgugugcaucaacggcaccugcaccguggugaugaccgacggcagcgccagcgagagagccgacaccaagauccuguucaucgaggagggcaagaucgugcacaucagcccccugagcggcagcgcccagcacguggaggagugcagcugcuaccccagauaccccggcgugagaugcgugugcagagacaacuggaagggcagcaacagacccaucguggacaucaacgugaaggacuacagcaucgugagcagcuacgugugcagcggccuggugggcgacacccccagaaagaacgacagcagcagcagcagcuacugcagaaaccccaacaacgagaagggcagccacggcgugaagggcugggccuucgacgacggcaacgacguguggaugggcagaaccaucagcgaggagcugagaagcggcuacgagaccuucaaggugaucggcggcuggagcaagcccaacagcaagcugcagaucaacagacaggugaucguggacagaggcaacagaagcggcuacagcggcaucuucagcguggagggcaagagcugcaucaacagaugcuucuacguggagcugaucagaggcagaaagcaggagaccgaggugugguggaccagcaacagcaucgugguguucugcggcaccagcggcaccuacggcaccggcagcuggcccgacggcgccgacaucaaccugaugcccaucuga

SEQ ID NO: 175291 - RNA, 1410 nt, Artificial Sequence; identical to SEQ ID NO: 175217
  derived and/or modified CDS sequence (opt4) from neuraminidase__InfluenzaA__ABG80098

SEQ ID NO: 175292 - RNA, 1410 nt, Artificial Sequence; identical to SEQ ID NO: 175161
  derived and/or modified CDS sequence (opt4) from neuraminidase__InfluenzaA__ABG80109

SEQ ID NO: 175293 - RNA, 1410 nt, Artificial Sequence
  derived and/or modified CDS sequence (opt4) from neuraminidase__InfluenzaA__ABG80120
augaaccccaaccagaagaucaucaccaucggcagcgugagccugaccaucgccaccaucugcuuccugaugcagaucgccauccuggugaccaccgugacccugcacuucaagcaguacgagugcaacagcccccccagcaaccaggugaugcugugcgagcccaccaucaucgagagaaacaucaccgagaucguguaccugaccaacaccaccaucgagaaggagaucugccccaagcuggccgaguacagaaacuggagcaagccccagugcaagaucaccggcuucgcccccuucagcaaggacaacagcaucagacugagcgccggcggcgacaucugggugaccagagagcccuacgugagcugcgaccccggcaagugcuaccaguucgcccugggccagggcaccacccugaacaacagacacagcaacgacaccgugcacgacagaacccccuacagaacccugcugaugaacgagcugggcgugcccuuccaccugggcaccaagcaggugugcaucgccuggagcagcagcagcugccacgacggcaaggccuggcugcacgugugcgugaccggccacgacgagaacgccaccgccagcuucaucuacgacggcagacugguggacagcaucggcagcuggagcaagaacauccugagaacccaggagagcgagugcaucugcaucaacggcaccugcaccguggugaugaccgacggcagcgccagcgagagagccgacaccaagauccuguucaucgaggagggcaagaucgugcacaucagcccccugagcggcagcgcccagcacguggaggagugcagcugcuaccccagauaccccggcgugagaugcgugugcagagacaacuggaagggcagcaacagacccaucguggacaucaacgugaaggacuacagcaucgugagcagcuacgugugcagcggccuggugggcgacacccccagaaagaacgacagcagcagcagcagcuacugcagaaaccccaacaacgagaagggcagccacggcgugaagggcugggccuucgacgacggcaacgacguguggaugggcagaaccaucagcgaggagcugagaagcggcuacgagaccuucaaggugaucggcggcuggagcaagcccaacagcaagcugcagaucaacagacaggugaucguggacagaggcaacagaagcggcuacagcggcaucuucagcguggagggcaagagcugcaucaacagaugcuucuacguggagcugaucagaggcagaaagcaggagaccgaggugugguggaccagcaacagcaucgugguguucugcggcaccagcggcaccuacggcaccggcagcuggcccgacggcgccgacaucaaccugaugcccaucuga

SEQ ID NO: 175294 - RNA, 1410 nt, Artificial Sequence
  derived and/or modified CDS sequence (opt4) from neuraminidase__InfluenzaA__ABG80131
augaaccccaaccagaagaucaucaccaucggcagcgugagccugaccaucgccaccaucugcuuccugaugcagaucgccaucauggugaccaccgugacccugcacuucaagcaguacgagugcaacagcccccccagcaaccaggugaugcugugcgagcccaccaucaucgagagaaacaucaccgagaucguguaccugaccaacaccaccaucgagaaggagaucugccccaagcuggccgaguacagaaacuggagcaagccccagugcaagaucaccggcuucgcccccuucagcaaggacaacagcaucagacugagcgccggcggcgacaucugggugaccagagagcccuacgugagcugcgaccccggcaagugcuaccaguucgcccugggccagggcaccacccugaacaacagacacagcaacgacaccgugcacgacagaacccccuacagaacccugcugaugaacgagcugggcgugcccuuccaccugggcaccaagcaggugugcaucgccuggagcagcagcagcugccacgacggcaaggccuggcugcacgugugcgugaccggccacgacgagaacgccaccgccagcuucaucuacgacggcagacugguggacagcaucggcagcuggagcaagaacauccugagaacccaggagagcgagugcgugugcaucaacggcaccugcaccguggugaugaccgacggcagcgccagcgagagagccgacaccaagauccuguucaucgaggagggcaagaucgugcacaucagcccccugagcggcagcgcccagcacguggaggagugcagcugcuaccccagauaccccggcgugagaugcgugugcagagacaacuggaagggcagcaacagacccaucguggacaucaacgugaaggacuacagcaucgugagcagcuacgugugcagcggccuggugggcgacacccccagaaagaacgacagcagcagcagcagcuacugcagaaaccccaacaacgagaagggcagccacggcgugaagggcugggccuucgacgacggcaacgacguguggaugggcagaaccaucagcgaggagcugagaagcggcuacgagaccuucaaggugaucggcggcuggagcaagcccaacagcaagcugcagaucaacagacaggugaucguggacagaggcaacagaagcggcuacagcggcaucuucagcguggagggcaagagcugcaucaacagaugcuucuacguggagcugaucagaggcagaaagcaggagaccgaggugugguggaccagcaacagcaucgugguguucugcggcaccagcggcaccuacggcaccggcagcuggcccgacggcgccgacaucaaccugaugcccaucuga

SEQ ID NO: 175295 - RNA, 1410 nt, Artificial Sequence; identical to SEQ ID NO: 175161
  derived and/or modified CDS sequence (opt4) from neuraminidase__InfluenzaA__ABG80142

SEQ ID NO: 175296 - RNA, 1410 nt, Artificial Sequence; identical to SEQ ID NO: 175217
  derived and/or modified CDS sequence (opt4) from neuraminidase__InfluenzaA__ABG80153

SEQ ID NO: 175297 - RNA, 1410 nt, Artificial Sequence; identical to SEQ ID NO: 175161
  derived and/or modified CDS sequence (opt4) from neuraminidase__InfluenzaA__ABG80164

SEQ ID NO: 175298 - RNA, 1413 nt, Artificial Sequence; identical to SEQ ID NO: 174888
  derived and/or modified CDS sequence (opt4) from neuraminidase__InfluenzaA__ABG80186

SEQ ID NO: 175299 - RNA, 1410 nt, Artificial Sequence; identical to SEQ ID NO: 174121
  derived and/or modified CDS sequence (opt4) from neuraminidase__InfluenzaA__ABG80197

SEQ ID NO: 175300 - RNA, 1410 nt, Artificial Sequence; identical to SEQ ID NO: 174313
  derived and/or modified CDS sequence (opt4) from neuraminidase__InfluenzaA__ABG80219

SEQ ID NO: 175301 - RNA, 1410 nt, Artificial Sequence
  derived and/or modified CDS sequence (opt4) from neuraminidase__InfluenzaA__ABG80230
augaaccccaaccagaagaucaucaccaucggcagcgugagccugaccaucgccaccaucugcuuccugaugcagaucgccauccuggugaccaccgugacccugcacuucaagcaguacgagugcaacagcccccccaacaaccaggugaugcugugcgagcccaccaucaucgagagaaacaucaccgagaucguguaccugaccaacaccaccaucgagaaggagaucugccccaagcuggccgaguacagaaacuggagcaagccccagugcaacaucaccggcuucgcccccuucagcaaggacaacagcaucagacugagcgccggcggcgacaucugggugaccagagagcccuacgugagcugcgaccccgacaagugcuaccaguucgcccugggccagggcaccacccugaacaacggccacagcaacgacaccgugcacgacagaacccccuacagaacccugcugaugaacgagcugggcgugcccuuccaccugggcaccagacaggugugcaucgccuggagcagcagcagcugccacgacggcaaggccuggcugcacgugugcgugaccggcgacgacgagaacgccaccgccagcuucaucuacaacggcagacugguggacagcaucggcagcuggagcaagaacauccugagaacccaggagagcgagugcgugugcaucaacggcaccugcaccguggugaugaccgacggcagcgccagcggcaaggccgacaccaagauccuguucaucgaggagggcaagaucgugcacaucagcacccugagcgagagcgcccagcacguggaggagugcagcugcuaccccagauaccccggcgugagaugcgugugcagagacaacuggaagggcagcaacagacccaucguggacaucaacgugaaggacuacagcaucgugagcagcuacgugugcagcggccuggugggcgacacccccagaaagaacgacagcuucagcagcagccacugccuggaccccaacaacgaggagggcggccacggcgugaagggcugggccuucgacgacggcaacgacguguggaugggcagaaccaucagcgagaagcugagaagcggcuacgagaccuucaaggugaucgagggcuggagcaagcccaacagcaagcugcagaccaacagacaggugaucguggagagaggcaacagaagcggcuacagcggcaucuucagcguggagggcaagagcugcaucaacagaugcuucuacguggagcugaucagaggcagaaaggaggagaccgaggugugguggaccagcaacagcaucgugguguucugcggcaccagcggcaccuacggcaccggcagcuggcccgacggcgccgacaucaaccugaugcccaucuga

SEQ ID NO: 175302 - RNA, 1410 nt, Artificial Sequence; identical to SEQ ID NO: 174651
  derived and/or modified CDS sequence (opt4) from neuraminidase__InfluenzaA__ABG80241

SEQ ID NO: 175303 - RNA, 1410 nt, Artificial Sequence; identical to SEQ ID NO: 174651
  derived and/or modified CDS sequence (opt4) from neuraminidase__InfluenzaA__ABG80252

SEQ ID NO: 175304 - RNA, 1410 nt, Artificial Sequence; identical to SEQ ID NO: 175235
  derived and/or modified CDS sequence (opt4) from neuraminidase__InfluenzaA__ABG80263

SEQ ID NO: 175305 - RNA, 1410 nt, Artificial Sequence; identical to SEQ ID NO: 174796
  derived and/or modified CDS sequence (opt4) from neuraminidase__InfluenzaA__ABG80274

SEQ ID NO: 175306 - RNA, 1410 nt, Artificial Sequence; identical to SEQ ID NO: 174387
  derived and/or modified CDS sequence (opt4) from neuraminidase__InfluenzaA__ABG80285

SEQ ID NO: 175307 - RNA, 1410 nt, Artificial Sequence; identical to SEQ ID NO: 174387
  derived and/or modified CDS sequence (opt4) from neuraminidase__InfluenzaA__ABG80296

SEQ ID NO: 175308 - RNA, 1410 nt, Artificial Sequence; identical to SEQ ID NO: 174387
  derived and/or modified CDS sequence (opt4) from neuraminidase__InfluenzaA__ABG80307

SEQ ID NO: 175309 - RNA, 1410 nt, Artificial Sequence; identical to SEQ ID NO: 174774
  derived and/or modified CDS sequence (opt4) from neuraminidase__InfluenzaA__ABG80318

SEQ ID NO: 175310 - RNA, 1410 nt, Artificial Sequence; identical to SEQ ID NO: 174387
  derived and/or modified CDS sequence (opt4) from neuraminidase__InfluenzaA__ABG80329

SEQ ID NO: 175311 - RNA, 1410 nt, Artificial Sequence; identical to SEQ ID NO: 174387
  derived and/or modified CDS sequence (opt4) from neuraminidase__InfluenzaA__ABG80340

SEQ ID NO: 175312 - RNA, 1410 nt, Artificial Sequence; identical to SEQ ID NO: 175245
  derived and/or modified CDS sequence (opt4) from neuraminidase__InfluenzaA__ABG80351

SEQ ID NO: 175313 - RNA, 1410 nt, Artificial Sequence
  derived and/or modified CDS sequence (opt4) from neuraminidase__InfluenzaA__ABG80373
augaaccccaaccagaagaucaucaccaucggcagcgugagccugaccaucgccaccaucugcuuccugaugcagaucgccauccuggugaccaccgugacccugcacuucaagcaguacgagugcaacagcccccccaacaaccaggugaugcugugcgagcccaccaucaucgagagaaacaucaccgagaucguguaccugaccaacaccaccaucgagaaggagaucugccccaagcuggccgaguacagaaacuggagcaagccccagugcaagaucaccggcuucgcccccuucagcaaggacaacagcaucagacugagcgccggcggcgacaucugggugaccagagagcccuacgugagcugcgaccccggcaagugcuaccaguucgcccugggccagggcaccacccugaacaacagacacagcaacgacaccgugcacgacagaacccccuacagaacccugcugaugaacgagcugggcgugcccuuccaccugggcaccaagcaggugugcaucgccuggagcagcagcagcugccacgacggcaaggccuggcugcacgugugcgugaccggccacgacgagaacgccaccgccagcuucaucuacgacggcagacugguggacagcaucggcagcuggagcaagaacauccugagaacccaggagagcgagugcgugugcaucaacggcaccugcaccguggugaugaccgacggcagcgccagcgagagagccgacaccaagauccuguucaucgaggagggcaagaucgugcacaucagcccccugagcggcagcgcccagcacguggaggagugcagcugcuaccccagauaccccggcgugagaugcgugugcagagacaacuggaagggcagcaacagacccaucguggacaucaacgugaaggaccacagcaucgugagcagcuacgugugcagcggccuggugggcgacacccccagaaagaacgacagcagcagcagcagcuacugcagaaaccccaacaacgagaagggcagccacggcgugaagggcugggccuucgacgacggcaacgacguguggaugggcagaaccaucagcgaggagcugagaagcggcuacgagaccuucaaggugaucggcggcuggagcaagcccaacagcaagcugcagaucaacagacaggugaucguggacagaggcaacagaagcggcuacagcggcaucuucagcguggagggcaagagcugcaucaacagaugcuucuacguggagcugaucagaggcagaaagcaggagaccgaggugugguggaccagcaacagcaucgugguguucugcggcaccagcggcaccuacggcaccggcagcuggcccgacggcgccgacaucaaccugaugcccaucuga

SEQ ID NO: 175314 - RNA, 1410 nt, Artificial Sequence; identical to SEQ ID NO: 175313
  derived and/or modified CDS sequence (opt4) from neuraminidase__InfluenzaA__ABG80384

SEQ ID NO: 175315 - RNA, 1410 nt, Artificial Sequence
  derived and/or modified CDS sequence (opt4) from neuraminidase__InfluenzaA__ABG80395
augaaccccaaccagaagaucaucaccaucggcagcgugagccugaccaucgccaccaucugcuuccugaugcagaucgccauccuggugaccaccgugacccugcacuucaagcaguacgagugcaacagcccccccaacaaccaggugaugcugugcgagcccaccaucaucgagagaaacaucaccgagaucguguaccugaccaacaccaccaucgagaaggagaucugccccaagcuggccgaguacagaaacuggagcaagccccagugcaagaucaccggcuucgcccccuucagcaaggacaacagcaucagacugagcgccggcggcgacaucugggugaccagagagcccuacgugagcugcgaccccggcaagugcuaccaguucgcccugggccagggcaccacccugaacaacagacacagcaacgacaccgugcacgacagaacccccuacagaacccugcugaugaacgagcugggcgugcccuuccaccugggcaccaagcaggugugcaucgccuggagcagcagcagcugccacgacggcaaggccuggcugcacgugugcgugaccggccacgacgagaacgccaccgccagcuucaucuacgacggcagacugguggacagcaucggcagcuggagcaagaacauccugagaacccaggagagcgagugcgugugcaucaacggcaccugcaccguggugaugaccgacggcagcgccagcaagagagccgacaccaagauccuguucaucgaggagggcaagaucgugcacaucagcccccugagcggcagcgcccagcacguggaggagugcagcugcuaccccagauaccccggcgugagaugcgugugcagagacaacuggaagggcagcaacagacccaucguggacaucaacgugaaggacuacagcaucgugagcagcuacgugugcagcggccuggugggcgacacccccagaaagaacgacagcagcagcagcagcuacugcagaaaccccaacaacgagaagggcagccacggcgugaagggcugggccuucgacgacggcaacgacguguggaugggcagaaccaucagcgaggagcugagaagcggcuacgagaccuucaaggugaucggcggcuggagcaagcccaacagcaagcugcagaucaacagacaggugaucguggacagaggcaacaugagcggcuacagcggcaucuucagcguggagggcaagagcugcaucaacagaugcuucuacguggagcugaucagaggcagaaagcaggagaccgaggugugguggaccagcaacagcaucgugguguucugcggcaccagcggcaccuacggcaccggcagcuggcccgacggcgccgacaucaaccugaugcccaucuga

SEQ ID NO: 175316 - RNA, 1410 nt, Artificial Sequence; identical to SEQ ID NO: 175245
  derived and/or modified CDS sequence (opt4) from neuraminidase__InfluenzaA__ABG80406

SEQ ID NO: 175317 - RNA, 1410 nt, Artificial Sequence; identical to SEQ ID NO: 175245
  derived and/or modified CDS sequence (opt4) from neuraminidase__InfluenzaA__ABG80417

SEQ ID NO: 175318 - RNA, 1410 nt, Artificial Sequence; identical to SEQ ID NO: 175245
  derived and/or modified CDS sequence (opt4) from neuraminidase__InfluenzaA__ABG80428

SEQ ID NO: 175319 - RNA, 1410 nt, Artificial Sequence; identical to SEQ ID NO: 174186
  derived and/or modified CDS sequence (opt4) from neuraminidase__InfluenzaA__ABG88292

SEQ ID NO: 175320 - RNA, 1413 nt, Artificial Sequence; identical to SEQ ID NO: 175110
  derived and/or modified CDS sequence (opt4) from neuraminidase__InfluenzaA__ABG88314

SEQ ID NO: 175321 - RNA, 1413 nt, Artificial Sequence
  derived and/or modified CDS sequence (opt4) from neuraminidase__InfluenzaA__ABG88325
augaaccccaaccagaagaucaucaccaucggcagcaccagcaucgccaucggcaucaucagccugauccugcagaucggcaacaucaucagcaucugggccagccacagcauccagaccggcagccagaaccacaccggcaucugcaaccagagaaucaucaccuacgagaacagcaccugggugaaccagaccuacgugaacaucaacaacaccagcgugguggccggcaaggacaagaccagcaugacccuggccggcaacagcagccugugccccaucagaggcugggccaucuacaccaaggacaacagcaucagaaucggcagcaagggcgacguguucgugaucagagagcccuucaucagcugcagccaccuggagugcagaaccuucuuccugacccagggcgcccugcugaacgacaagcacagcaacggcaccgugaaggacagaagccccuacagagcccugaugagcugcccccugggcgaggcccccagccccuacaacagcagauucgagagcguggccuggagcgccagcgccugccacgacggccugggcuggcugaccaucggcaucagcggccccgacaacggcgccguggccgugcugaaguacaacggcaucaucaccgagaccaucaagagcuggaagaagagaauccugagaacccaggagagcgagugcgugugcaugaacggcagcugcuucaccaucaugaccgacggccccagcaacggcgccgccagcuacagaaucuucaagaucgagaagggcagagugaccaagagcaucgagcuggacgcccccaacuaccacuacgaggagugcagcugcuaccccgacaccggcaccgugaugugcgugugcagagacaacuggcacggcagcaacagacccugggugagcuucaaccagaaccuggacuaccagaccggcuacaucugcagcggcguguucggcgacaaccccagacccaaggacggcgagggcagcugcaaccccgugaccgccgacggcgccgacggcgugaagggcuucagcuacagauacggcaacggcguguggaucggcagaaccaagagcaacagacugagaaagggcuucgagaugaucugggaccccaacggcuggaccgacaccgacagcgacuucagcaugaagcaggacaucguggccaugaccgacuggagcggcuacagcggcagcuucgugcagcaccccgagcugaccggccuggacugcaugagacccugcuucuggguggagcuggugagaggccugcccagagagaacaccaccaucuggaccagcggcagcagcaucagcuucugcggcgugaacagcgacaccgccaacuggagcuggcccgacggcgccgagcugcccuucaccaucgacaaguga

SEQ ID NO: 175322 - RNA, 1413 nt, Artificial Sequence
  derived and/or modified CDS sequence (opt4) from neuraminidase__InfluenzaA__ABG88336
augaaccccaaccagaagaucaucaccaucggcagcaucugcauggccaucggcaucaucagccugauccugcagaucggcaacaucaucagcaucugggugagccacagcauccagaccggcaaccagaaccacaccggcaucugcaaccagagaaucaucaccuacgagaacagcaccugggugaaccagaccuacgugaacaucaacaacaccaacgugguggccggcaaggacaccaccagcgugacccuggccggcaacagcagccugugccccgugagaggcugggccaucuacagcaaggacaacagcaucagaaucggcagcaagggcgacguguucgugaucagagagcccuucaucagcugcagccaccuggagugcagaaccuucuuccugacccagggcgcccugcugaacgacaagcacagcaacggcaccgugaaggacagaagccccuacagagcccugaugagcugccccaucggcgaggcccccagccccuacaacagcagauucgagagcguggccuggagcgccagcgccugccacgacggcaugggcuggcugaccaucggcaucagcggccccgacgacggcgccguggccgugcugaaguacaacggcaucaucaccgagaccaucaagagcuggagaaagagaauccugagaacccaggagagcgagugcgugugcgugaacggcagcugcuucaccaucaugaccgacggccccagcaacggccccgccagcuacaagaucuucaagaucgagaagggcaagaucaccaagagcaucgagcuggacgcccccaacagccacuacgaggagugcagcugcuaccccgacaccggcaccgugaugugcgugugcagagacaacuggcacggcagcaacagacccugggugagcuucaaccagaaccuggacuaccagcugggcuacaucugcagcggcaucuucggcgacaaccccagacccaaggacggcaagggcagcugcggccccgugaccguggacggcgccgacggcgugaagggcuucagcuacagauacggcaacggcguguggaucggcagaaccaagagcaacagcagcagaaagggcuucgagaugaucugggaccccaacggcuggaccgacaccgacagcaacuuccuggugaagcaggacgugguggccaugaccgacuggagcggcuacagcggcagcuucgugcagcaccccgagcugaccggccuggacugcaugagacccugcuucuggguggagcugaucagaggcagacccagagagaccaccaccaucuggaccagcggcagcagcaucagcuucugcggcgugaacagcgacaccgugaacuggagcuggcccgacggcgccgagcugcccuucaccaucgacaaguga

SEQ ID NO: 175323 - RNA, 1413 nt, Artificial Sequence
  derived and/or modified CDS sequence (opt4) from neuraminidase__InfluenzaA__ABG88347
augaaccccaaccagaagaucaucaccaucggcagcaucugcauggccaucggcaucaucggccugauccugcagaucggcaacaucaucagcaucugggugagccacagcauccagaccggcagccagaaccacaccggcaucugcaaccagagaaucaucaccuacgagaacagcaccugggugaaccagaccuacgugaacaucaacaacaccaacgugguggccggcaaggacaccaccagcgugacccuggccggcaacagcagccugugccccgugagaggcugggccaucuacagcaaggacaacagcaucagaaucggcagcaagggcgacguguucgugaucagagagcccuucaucagcugcagccaccuggagugcagaaccuucuuccugacccagggcgcccugcugaacgacaagcacagcaacggcaccgugaaggacagaagccccuacagagcccugaugagcugccccaucggcgaggcccccagccccuacaacagcagauucgagagcguggccuggagcgccagcgccugccacgacggcaugggcuggcugaccaucggcaucagcggccccgacgacggcgccguggccgugcugaaguacaacggcaucaucaccgagaccaucaagagcuggagaaagagaauccugagaacccaggagagcgagugcgugugcgugaacggcagcugcuucaccaucaugaccgacggccccagcaacggccccgccagcuacaagaucuucaagaucgagaagggcaagaucaccaagagcaucgagcuggacgcccccaacagccacuacgaggagugcagcugcuaccccgacaccggcaccgugaugugcgugugcagagacaacuggcacggcagcaacagacccugggugagcuucaaccagaaccuggacuaccagcugggcuacaucugcagcggcaucuucggcgacaaccccagacccaaggacggcaagggcagcugcggccccgugaccguggacggcgccgacggcgugaagggcuucagcuacagauacggcaacggcguguggaucggcagaaccaagagcaacagcagcagaaagggcuucgagaugaucugggaccccaacggcuggaccgacaccgacagcaacuuccuggugaagcaggacgugguggccaugaccgacuggagcggcuacagcggcagcuucgugcagcaccccgagcugaccggccuggacugcaugagacccugcuucuggguggagcugaucagaggcagacccagagagaccaccaccaucuggaccagcggcagcagcaucagcuucugcggcgugaacagcgacaccgugaacuggagcuggcccgacggcgccgagcugcccuucaccaucgacaaguga

SEQ ID NO: 175324 - RNA, 1410 nt, Artificial Sequence
  derived and/or modified CDS sequence (opt4) from neuraminidase__InfluenzaA__ABG88358
augaaccccaaccagaagaucaucaccaucggcagcgugagccugaccaucgccaccaucugcuuccugaugcagaucgccauccuggugaccaccgugacccugcacuucaagcaguacgagugcaacagcccccccaacaaccaggugaugcugugcgagcccaccaucaucgagagaaacaucaccgagaucguguaccugaccaacaccaccaucgagaaggagaucugccccaagcuggccgaguacagaaacuggagcaagccccagugcaagaucaccggcuucgcccccuucagcaaggacaacagcaucagacugagcgccggcggcgacaucugggugaccagagagcccuacgugagcugcgaccccggcaagugcuaccaguucgcccugggccagggcaccacccugaacaacagacacagcaacgacaccgugcacgacagaacccccuacagaacccugcugaugaacgagcugggcgugcccuuccaccugggcaccaagcaggugugcaucgccuggagcagcagcagcugccacgacggcaaggccuggcugcacgugugcgugaccggccacgacaagaacgccaccgccagcuucaucuacgacggcagacugguggacagcaucggcagcuggagcaagaacauccugagaacccaggagagcgagugcgugugcaucaacggcaccugcaccguggugaugaccgacggcagcgccagcgacagagccgacaccaagauccuguucaucgaggagggcaagaucgugcacaucagaccccugagcggcagcgcccagcacguggaggagugcagcugcuaccccagauaccccggcgugagaugcgugugcagagacaacuggaagggcagcaacagacccaucguggacaucaacgugaaggacuacagcaucgugagcagcuacgugugcagcggccuggugggcgacacccccagaaagaacgacagcagcagcagcagcuacugcuggaaccccaacaacgagaagggcggccacggcgugaagggcugggccuucgacgacggcaacgacguguggaugggcagaaccaucagcgaggagagcagaagcggcuacgagaccuucaaggugaucggcggcuggagcaagcccaacagcaagcugcagaucaacagacaggugaucguggacagaggcaacagaagcggcuacagcggcaucuucagcguggagggcaagagcugcaucaacagaugcuucuacguggagcugaucagaggcagaaagcaggagaccgaggugugguggaccagcaacagcaucgugguguucugcggcaccagcggcaccuacggcaccggcagcuggcccgacggcgccgacaucaaccugaugcccaucuga

SEQ ID NO: 175325 - RNA, 1410 nt, Artificial Sequence; identical to SEQ ID NO: 175173
  derived and/or modified CDS sequence (opt4) from neuraminidase__InfluenzaA__ABG88369

SEQ ID NO: 175326 - RNA, 1410 nt, Artificial Sequence; identical to SEQ ID NO: 175173
  derived and/or modified CDS sequence (opt4) from neuraminidase__InfluenzaA__ABG88380

SEQ ID NO: 175327 - RNA, 1410 nt, Artificial Sequence; identical to SEQ ID NO: 175173
  derived and/or modified CDS sequence (opt4) from neuraminidase__InfluenzaA__ABG88391

SEQ ID NO: 175328 - RNA, 1410 nt, Artificial Sequence; identical to SEQ ID NO: 175160
  derived and/or modified CDS sequence (opt4) from neuraminidase__InfluenzaA__ABG88402

SEQ ID NO: 175329 - RNA, 1410 nt, Artificial Sequence; identical to SEQ ID NO: 175217
  derived and/or modified CDS sequence (opt4) from neuraminidase__InfluenzaA__ABG88413

SEQ ID NO: 175330 - RNA, 1410 nt, Artificial Sequence; identical to SEQ ID NO: 175161
  derived and/or modified CDS sequence (opt4) from neuraminidase__InfluenzaA__ABG88424

SEQ ID NO: 175331 - RNA, 1410 nt, Artificial Sequence; identical to SEQ ID NO: 175161
  derived and/or modified CDS sequence (opt4) from neuraminidase__InfluenzaA__ABG88435

SEQ ID NO: 175332 - RNA, 1410 nt, Artificial Sequence; identical to SEQ ID NO: 175161
  derived and/or modified CDS sequence (opt4) from neuraminidase__InfluenzaA__ABG88446

SEQ ID NO: 175333 - RNA, 1410 nt, Artificial Sequence
  derived and/or modified CDS sequence (opt4) from neuraminidase__InfluenzaA__ABG88457
augaaccccaaccagaagaucaucaccaucggcagcgugagccugaccaccgccaccaucugcuuccugaugcagaucgccauccuggugaccaccgugacccugcacuucaagcaguacgagugcaacagcccccccaacaaccaggugaugcugugcgagcccaccaucaucgagagaaacaucaccgagaucguguaccugaccaacaccaccaucgagaaggagaucugccccaagcuggccgaguacagaaacuggagcaagccccagugcaagaucaccggcuucgcccccuucagcaaggacaacagcaucagacugagcgccggcggcgacaucugggugaccagagagcccuacgugagcugcgaccccggcaagugcuaccaguucgcccugggccagggcaccacccugaacaacagacacagcaacgacaccgugcacgacagaacccccuacagaacccugcugaugaacgagcugggcgugcccuuccaccugggcaccaagcaggugugcaucgccuggagcagcagcagcugccacgacggcaaggccuggcugcacgugugcgugaccggccacgacgagaacgccaccgccagcuucaucuacgacggcagacugguggacagcaucggcagcuggagcaagaacauccugagaacccaggagagcgagugcgugugcaucaacggcaccugcaccguggugaugaccgacggcagcgccagcgagagagccgacaccaagauccuguucaucaaggagggcaagaucgugcacaucagcccccugagcggcagcgcccagcacguggaggagugcagcugcuaccccagauaccccggcgugagaugcgugugcagagacaacuggaagggcagcaacagacccaucguggacaucaacgugaaggacuacagcaucgugagcagcuacgugugcagcggccuggugggcgacacccccagaaagaacgacagcagcagcagcagcuacugccagaaccccaacaacgagaagggcagccacggcgugaagggcugggccuucgacgacggcaacgacguguggaugggcagaaccaucagcgaggagcugagaagcggcuacgagaccuucaaggugaucggcggcuggagcaagcccaacagcaagcugcagaucaacagacaggugaucguggacagaggcaacagaagcggcuacagcggcaucuucagcguggagggcaagagcugcaucaacagaugcuucuacguggagcugaucagaggcagaaagcaggagaccgaggugugguggaccagcaacagcaucgugguguucugcggcaccagcggcaccuacggcaccggcagcuggcccgacggcgccgacaucaaccugaugcccaucuga

SEQ ID NO: 175334 - RNA, 1410 nt, Artificial Sequence; identical to SEQ ID NO: 175161
  derived and/or modified CDS sequence (opt4) from neuraminidase__InfluenzaA__ABG88468

SEQ ID NO: 175335 - RNA, 1410 nt, Artificial Sequence; identical to SEQ ID NO: 175161
  derived and/or modified CDS sequence (opt4) from neuraminidase__InfluenzaA__ABG88479

SEQ ID NO: 175336 - RNA, 1410 nt, Artificial Sequence; identical to SEQ ID NO: 175161
  derived and/or modified CDS sequence (opt4) from neuraminidase__InfluenzaA__ABG88490

SEQ ID NO: 175337 - RNA, 1410 nt, Artificial Sequence; identical to SEQ ID NO: 175161
  derived and/or modified CDS sequence (opt4) from neuraminidase__InfluenzaA__ABG88501

SEQ ID NO: 175338 - RNA, 1410 nt, Artificial Sequence; identical to SEQ ID NO: 175161
  derived and/or modified CDS sequence (opt4) from neuraminidase__InfluenzaA__ABG88512

SEQ ID NO: 175339 - RNA, 1410 nt, Artificial Sequence; identical to SEQ ID NO: 175161
  derived and/or modified CDS sequence (opt4) from neuraminidase__InfluenzaA__ABG88523

SEQ ID NO: 175340 - RNA, 1410 nt, Artificial Sequence
  derived and/or modified CDS sequence (opt4) from neuraminidase__InfluenzaA__ABG88534
augaaccccaaccagaagaucaucaccaucggcagcgugagccugaccaucgccaccaucugcuuccugaugcagaucgccauccuggugaccaccgugacccugcacuucaagcaguacgagugcaacagcccccccagcaaccaggugaugcugugcgagcccaccaucaucgagagaaacaucaccgagaucguguaccugaccaacaccaccaucgagaaggagaucugccccaagcuggccgaguacagaaacuggagcaagccccagugcaagaucaccggcuucgcccccuucagcaaggacaacagcaucagacugagcgccggcggcgacaucugggugaccagagagcccuacgugagcugcgaccccggcaagugcuaccaguucgcccugggccagggcaccacccugaacaacagacacagcaacgacaccgugcacgacagaacccccuacagaacccugcugaugaacgagcugggcgugcccuuccaccugggcaccaagcaggugugcaucgccuggagcagcagcagcugccacgacggcaaggccuggcugcacgugugcgugaccggccacgacgagaacgccaccgccagcuucaucuacgacggcagacugguggacagcaucggcagcuggagcaagaacauccugagaacccaggagagcgagugcgugugcaucaacggcaccugcaccguggugaugaccgacggcagcgccagcgagagagccgacaccaagauccuguucaucgaggagggcaagaucgugcacaucagcccccugagcggcagcgcccagcacguggaggagugcagcugcuaccccagauaccccggcgugagaugcgugugcagagacaacuggaagggcagcaacagacccaucguggacaucaacgugaaggacuacagcaucgugagcagcuacgugugcagcggccuggugggcgacacccccagaaagaacgacagcagcagcagcagcuacugcagaaaccccaacaacgagaagggcagccacggcgugaagggcugggccuucgacgacggcaacgacguguggaugggcagaaccaucagcgaggagcugagaagcggcuacgagaccuucaaggugaucggcggcuggagcaagcccaacagcaagcugcagaucaacagacaggugaucguggacagaggcaacagaagcggcuacagcggcaucuucagcguggagaacaagagcugcaucaacagaugcuucuacguggagcugaucagaggcagaaagcaggagaccgaggugugguggaccagcaacagcaucgugguguucugcggcaccagcggcaccuacggcaccggcagcuggcccgacggcgccgacaucaaccugaugcccaucuga

SEQ ID NO: 175341 - RNA, 1410 nt, Artificial Sequence; identical to SEQ ID NO: 174853
  derived and/or modified CDS sequence (opt4) from neuraminidase__InfluenzaA__ABG88567

SEQ ID NO: 175342 - RNA, 1410 nt, Artificial Sequence
  derived and/or modified CDS sequence (opt4) from neuraminidase__InfluenzaA__ABG88600
augaaccccaaccagaagaucaucaccaucggcagcgugagccugaccaucgccaccaucugcuuccugaugcagaucgccauccuggugaccaccgugacccugcacuucaagcaguacgagugcaacagcccccccaacaaccaggugaugcugugcgagcccaccaucaucgagagaaacaucaccgagaucguguaccugaccaacaccaccaucgagaaggagaucugccccaagcccgccgaguacagaaacuggagcaagccccagugcaacaucaccggcuucgcccccuucagcaaggacaacagcaucagacugagcgccggcggcgacaucugggugaccagagagcccuacgugagcugcgaccccgacaagugcuaccaguucgcccugggccagggcaccacccugaacaacggccacagcaacgacaccgugcacgacagaacccccuacagaacccugcugaugaacgagcugggcgugcccuuccaccugggcaccaagcaggugugcaucgccuggagcagcagcagcugccacgacggcaaggccuggcugcacgugugcgugaccggcgacgacgagaacgccaccgccagcuucaucuacaacggcagacugguggacagcaucggcagcuggagcaagaagauccugagaacccaggagagcgagugcgugugcaucaacggcaccugcaccguggugaugaccgacggcagcgccagcggcaaggccgacaccaagauccuguucaucgaggagggcaagaucgugcacaccagccugcugagcggcagcgcccagcacguggaggagugcagcugcuaccccagauaccccggcgugagaugcgugugcagagacaacuggaagggcagcaacagacccaucguggacaucaacgugaaggacuacagcaucgugagcagcuacgugugcagcggccuggugggcgacacccccagaaagaacgacagcagcagcagcagccacugccuggaccccaacaacgaggagggcggccacggcgugaagggcugggccuucgacgacggcaacgacguguggaugggcagaaccaucagcgagaagcugagaagcggcuacgagaccuucaaggugaucgagggcuggagcaagcccaacagcaagcugcagaucaacagacaggugaucguggacagaggcaacagaagcggcuacagcggcaucuucagcguggagggcaagagcugcaucaacagaugcuucuacguggagcugaucagaggcagaaagcaggagaccgaggugcuguggaccagcaacagcaucgugguguucugcggcaccagcggcaccuacggcaccggcagcuggcccgacggcgccgacaucaaccugaugcccaucuga

SEQ ID NO: 175343 - RNA, 1410 nt, Artificial Sequence; identical to SEQ ID NO: 174214
  derived and/or modified CDS sequence (opt4) from neuraminidase__InfluenzaA__ABG88611

SEQ ID NO: 175344 - RNA, 1410 nt, Artificial Sequence; identical to SEQ ID NO: 174226
  derived and/or modified CDS sequence (opt4) from neuraminidase__InfluenzaA__ABG88622

SEQ ID NO: 175345 - RNA, 1410 nt, Artificial Sequence; identical to SEQ ID NO: 174214
  derived and/or modified CDS sequence (opt4) from neuraminidase__InfluenzaA__ABG88633

SEQ ID NO: 175346 - RNA, 1410 nt, Artificial Sequence; identical to SEQ ID NO: 175265
  derived and/or modified CDS sequence (opt4) from neuraminidase__InfluenzaA__ABG88655

SEQ ID NO: 175347 - RNA, 1410 nt, Artificial Sequence; identical to SEQ ID NO: 175265
  derived and/or modified CDS sequence (opt4) from neuraminidase__InfluenzaA__ABG88666

SEQ ID NO: 175348 - RNA, 1410 nt, Artificial Sequence; identical to SEQ ID NO: 174651
  derived and/or modified CDS sequence (opt4) from neuraminidase__InfluenzaA__ABG88677

SEQ ID NO: 175349 - RNA, 1410 nt, Artificial Sequence; identical to SEQ ID NO: 175265
  derived and/or modified CDS sequence (opt4) from neuraminidase__InfluenzaA__ABG88688

SEQ ID NO: 175350 - RNA, 1410 nt, Artificial Sequence; identical to SEQ ID NO: 174651
  derived and/or modified CDS sequence (opt4) from neuraminidase__InfluenzaA__ABG88699

SEQ ID NO: 175351 - RNA, 1410 nt, Artificial Sequence; identical to SEQ ID NO: 174387
  derived and/or modified CDS sequence (opt4) from neuraminidase__InfluenzaA__ABG88710

SEQ ID NO: 175352 - RNA, 1410 nt, Artificial Sequence; identical to SEQ ID NO: 174387
  derived and/or modified CDS sequence (opt4) from neuraminidase__InfluenzaA__ABG88721

SEQ ID NO: 175353 - RNA, 1410 nt, Artificial Sequence
  derived and/or modified CDS sequence (opt4) from neuraminidase__InfluenzaA__ABG88732
augaaccccaaccagaagaucaucaccaucggcagcgugagccugaccaucgccaccaucugcuuccugaugcagaucgccauccuggugaccaccgugacccugcacuucaagcaguacgagugcaacagcccccccaacaaccaggugaugcugugcgagcccaccaucaucgagagaaacaucaccgagaucguguaccugaccaacaccaccaucgagaaggagaucugccccaagcuggccgaguacagaaacuggagcaagccccagugcaagaucaccggcuucgcccccuucagcaaggacaacagcaucagacugagcgccggcggcgacaucugggugaccagagagcccuacgugagcugcgaccccggcaagugcuaccaguucgcccugggccagggcaccacccugaacaacagacacagcaacgacaccgugcacgacagaacccccuacagaacccugcugaugaacgagcugggcgugcccuuccaccugggcaccaagcaggugugcaucgccuggagcagcagcagcugccacgacggcaaggccuggcugcacgugugcgugaccggccacgacgagaacgccaccgccagcuucaucuacgacggcagacugguggacagcaucggcagcuggagcaagaacauccugagaacccaggagagcgagugcgugugcaucaacggcaccugcaccguggugaugaccgacggcagcgccagcgagagagccgacaccaagauccuguucaucgaggagggcaagaucgugcacaucagcccccugagcggcagcgcccagcacguggaggagugcagcugcuaccccagauaccccggcgugagaugcgugugcagagacaacuggaagggcagcaacagacccaucguggacaucaacgugaaggacuacagcaucgugagcagcuacgugugcagcggccuggugggcgacacccccagaaagaacgacagcagcagcagcagcuacugcagaaaccccaacaacgagaagggcagccacggcgugaagggcugggccuucgacgacggcaacgacguguggaugggcagaaccaucagcgaggagcugagaagcggcuacgagaccuucaaggugaucggcggcuggagcaagcccaacagcaagcugcagaucaacagacaggugaucguggagagaggcaacagaagcggcuacagcggcaucuucagcguggagggcaagagcugcaucaacagaugcuucuacguggagcugaucagaggcagaaagcaggagaccgaggugugguggaccagcaacagcaucgugguguucugcggcaccagcggcaccuacggcaccggcagcuggcccgacggcgccgacaucaaccugaugcccaucuga

SEQ ID NO: 175354 - RNA, 1410 nt, Artificial Sequence; identical to SEQ ID NO: 175313
  derived and/or modified CDS sequence (opt4) from neuraminidase__InfluenzaA__ABG88743

SEQ ID NO: 175355 - RNA, 1410 nt, Artificial Sequence; identical to SEQ ID NO: 175313
  derived and/or modified CDS sequence (opt4) from neuraminidase__InfluenzaA__ABG88754

SEQ ID NO: 175356 - RNA, 1410 nt, Artificial Sequence; identical to SEQ ID NO: 174579
  derived and/or modified CDS sequence (opt4) from neuraminidase__InfluenzaA__ABG88765

SEQ ID NO: 175357 - RNA, 1410 nt, Artificial Sequence; identical to SEQ ID NO: 175245
  derived and/or modified CDS sequence (opt4) from neuraminidase__InfluenzaA__ABG88776

SEQ ID NO: 175358 - RNA, 1410 nt, Artificial Sequence; identical to SEQ ID NO: 175245
  derived and/or modified CDS sequence (opt4) from neuraminidase__InfluenzaA__ABG88787

SEQ ID NO: 175359 - RNA, 1410 nt, Artificial Sequence
  derived and/or modified CDS sequence (opt4) from neuraminidase__InfluenzaA__ABG88820
augaaccccaaccagaagaucaucaccaucggcagcgugagccugaccaucagcaccaucugcuucuucaugcagaucgccauccugaucaccaccgugacccugcacuucaagcaguacgaguucaacagcccccccaacaaccaggugaugcugugcgagcccaccaucaucgagagaaacaucaccgagaucguguaccugaccaacaccaccaucgagaaggagaagugccccaagcuggccgaguacagaaacuggagcaagccccagugcaacaucaccggcuucgcccccuucagcaaggacaacagcaucagacugagcgccggcggcgacaucugggugaccagagagcccuacgugagcugcgaccccgacaagugcuaccaguucgcccugggccagggcaccacccugaacaacgugcacagcaacgacaccgugagagacagaacccccuacagaacccugcugaugaacgagcugggcgugcccuuccaccugggcaccaagcaggugugcaucgccuggagcagcagcagcugccacgacggcaaggccuggcugcacgugugcgugaccggcgacgacaagaacgccaccgccagcuucaucuacaacggcagacugguggacagcaucgugagcuggagcaaggagauccugagaacccaggagagcgagugcgugugcaucaacggcaccugcaccguggugaugaccgacggcagcgccagcggcaaggccgacaccaagauccuguucaucgaggagggcaagaucgugcacaccagcacccugagcggcagcgcccagcacguggaggagugcagcugcuaccccagauaccccggcgugagaugcgugugcagagacaacuggaagggcagcaacagacccaucguggacaucaacaucaaggacuacagcaucgugagcagcuacgugugcagcggccuggugggcgacacccccagaaagaacgacagcagcagcagcagccacugccuggaccccaacaacgaggagggcggccacggcgugaagggcugggccuucgacgacggcaacgacguguggaugggcagaaccaucagcgagaagcugagacugggcuacgagaccuucaaggugaucgagggcuggagcaaccccaacagcaagcugcagaccaacagacaggugaucguggacagaggcaacagaagcggcuacagcggcaucuucagcguggagggcaagagcugcaucaacagaugcuucuacguggagcugaucagaggcagaaaggaggagaccgaggugcuguggaccagcaacagcaucgugguguucugcggcaccagcggcaccuacggcaccggcagcuggcccgacggcgccgacaucaaccugaugcccaucuga

SEQ ID NO: 175360 - RNA, 1350 nt, Artificial Sequence
  derived and/or modified CDS sequence (opt4) from neuraminidase__InfluenzaA__ABI16506
augaaccccaaccagaagaucaucaccaucggcagcaucugcauggugaucggcaucgugagccugaugcugcagaucggcaacauggugagccugugggugagccacagcauccagaccggcaaccagcaccagguggagcccaucagcaacaccaacuuccugaccgagaaggccguggccagcgugacccuggccggcaacagcagccugugccccaucagaggcugggccgugcacagcaaggacaacagcaucagaaucggcagcaagggcgacguguucgugaucagagagcccuucaucagcugcagccaccuggagugcagaaccuucuuccugacccagggcgcccugcugaacgacaagcacagcaacggcaccgugaaggacagaagcccccacagaacccugaugagcugccccgugggcgaggcccccagccccuacaacagcagauucgagagcguggccuggagcgccagcgccugccacgacggcaccagcuggcugaccaucggcaucagcggccccgacaacggcgccguggccgugcugaaguacaacggcaugaucaccgacaccaucaagagcuggagaaacaacauccugagaacccaggagagcgagugcgugugcgugaacggcagcugcuucaccgugaugaccgacggccccagcaacggccaggccagcuacaagaucuucaagauggagaagggcaagguggugaagagcguggagcuggacgcccccaacuaccacuacgaggagugcagcugcuaccccgacgccggcgagaucaccugcgugugcagagacaacuggcacggcagcaacagacccugggugagcuucaaccagaaccuggaguaccagaucggcuacaucugcagcggcguguucggcgacaaccccagacccaacgacggcaccggcagcugcggccccgugagccccaacggcgccuacggcgugaagggcuucagcuucaaguacggcaacggcguguggaucggcagaaccaagagccccagcagcagaagcggcuucgagaugaucugggaccccaacggcuggaccgagaccgacagcagcuucagcgugaagcaggacaucguggccaucaccgacuggagcggcuacagcggcagcuucgugcagcaccccgagcugaccggccuggacugcaucagacccugcuucuggguggagcugaucagaggcagacccaaggagagcaccaucuggaccagcggcagcagcaucagcuucugcggcgugaacagcgacaccgugagcuggagcuggcccgacggcgccgagcugcccuucaccaucgacaaguga

SEQ ID NO: 175361 - RNA, 1413 nt, Artificial Sequence; identical to SEQ ID NO: 175025
  derived and/or modified CDS sequence (opt4) from neuraminidase__InfluenzaA__ABI20840

SEQ ID NO: 175362 - RNA, 1413 nt, Artificial Sequence
  derived and/or modified CDS sequence (opt4) from neuraminidase__InfluenzaA__ABI20862
augaaccccaaccagaagaucaucaccaucggcagcaucugcaugaccaucggcaucaucagccugauccugcagaucggcaacaucaucagcaucugggugagccacagcauccagaccggcagccagaaccacaccggcaucugcaaccagagaaucaucaccuacgagaacagcaccugggugaaccagaccuacgugaacaucaacaacaccaacgugguggccggcaaggacaccaccagcgugacccuggccggcaacagcagccugugccccaucagaggcugggccaucuacagcaaggacaacagcaucagaaucggcagcaagggcgacguguucgugaucagagagcccuucaucagcugcagccaccuggagugcagaaccuucuuccugacccagggcgcccugcugaacgacaagcacagcaacggcaccgugaaggacagaagccccuacagagcccugaugagcugccccaucggcgaggcccccagccccuacaacagcagauucgagagcguggccuggagcgccagcgccugccacgacggcaugggcuggcugaccaucggcaucagcggccccgacgacggcgccguggccgugcugaaguacaacggcaucaucaccgagaccaucaagagcuggagaaagagaauccugagaacccaggagagcgagugcgugugcgugaacggcagcugcuucaccaucaugaccgacggccccagcaacggccccgccagcuacagaaucuucaagaucgagaagggcaagaucaccaagagcaucgagcuggacgcccccaacagccacuacgaggagugcagcugcuaccccgacaccggcaccgugaugugcgugugcagagacaacuggcacggcagcaacagacccugggugagcuucaaccagaaccuggacuaccagaccggcuacaucugcagcggcguguucggcgacaaccccagacccaaggacggcaagggcagcugcgaccccgugaccguggacggcgccgacggcgugaagggcuucagcuacagauacggcaacggcguguggaucggcagaaccaagagcaacagcagcagaaagggcuucgagaugaucugggaccccaacggcuggaccgacaccgacagcaacuuccuggugaagcaggacgugguggccaugaccgacuggagcggcuacagcggcagcuucgugcagcaccccgagcugaccggccuggacugcaugagacccugcuucuggguggagcugaucagaggcagacccagagagaagaccaccaucuggaccagcggcagcagcaucagcuucugcggcgugaacagcgacaccgccaacuggagcuggcccgacggcgccgagcugcccuucaccaucgacaaguga

SEQ ID NO: 175363 - RNA, 1413 nt, Artificial Sequence
  derived and/or modified CDS sequence (opt4) from neuraminidase__InfluenzaA__ABI20873
augaaccccaaccagaagaucaucaccaucggcagcaucagcauggccaucggcaucaucagccugacccugcagaucggcaacaucaucagcaucugggccagccacagcauccagaccggcagccagaaccacaccggcaucugcaaccagagaaucaucaccuacgagaacagcaccugggugaaccagaccuacgugaacaucaacaacaccaacgugguggccgagaaggacaagaccagcgugacccuggccggcaacagcagccugugccccaucagaggcugggccaucuacaccaaggacaacagcaucagaaucggcagcaagggcgacguguucgugaucagagagcccuucaucagcugcagccaccuggagugcagaaccuucuuccugacccagggcgcccugcugaacgacaagcacagcaacggcaccgugaaggacagaagccccuacagagcccugaugagcugcccccugggcgaggcccccagccccuacaacagcagauucgagagcguggccuggagcgccaccgccugccacgacggcaucggcuggcugaccaucggcaucagcggccccgacaacggcgccguggccgugcugaaguacaacggcgugaucaccgagaccaucaagagcuggaagaagcagauccugagaacccaggagagcgagugcgugugcgugaacggcagcugcuucaccaucaugaccgacggccccagcaacggcgccgccagcuacagaaucuucaagaucgagaagggcaagaucaccaagagcaucgagcuggacgcccccaacuuccacuacgaggagugcagcugcuaccccgacaccggcaccgugaugugcgugugcagagacaacuggcacggcagcaacagacccugggugagcuucaaccagaaccuggacuaccagaucggcuacaucugcagcggcguguucggcgacaaccccagacccaaggacggcgagggcagcugcaaccccgugaccguggacggcgccgacggcgugaagggcuucagcuacagauacggcaacggcguguggaucggcagaaccaagagcaacagacugagaaagggcuucgagaucaucugggaccccaacggcuggaccgacaccgacagcgacuucagcgugaagcaggacgugguggccaugaccgacuggagcggcuacagcggcagcuucgugcagcaccccgagcugaccggccuggacugcaugagacccugcuucuggguggagcuggugagaggccugcccagagagaacgccaccaucuggaccagcggcagcagcaucagcuucugcggcgugaacagcgacaccgccaacuggagcuggcccgacggcgccgagcugcccuucaccaucgacaaguga

SEQ ID NO: 175364 - RNA, 1410 nt, Artificial Sequence; identical to SEQ ID NO: 175160
  derived and/or modified CDS sequence (opt4) from neuraminidase__InfluenzaA__ABI20895

SEQ ID NO: 175365 - RNA, 1410 nt, Artificial Sequence; identical to SEQ ID NO: 175173
  derived and/or modified CDS sequence (opt4) from neuraminidase__InfluenzaA__ABI20906

SEQ ID NO: 175366 - RNA, 1410 nt, Artificial Sequence; identical to SEQ ID NO: 175161
  derived and/or modified CDS sequence (opt4) from neuraminidase__InfluenzaA__ABI20928

SEQ ID NO: 175367 - RNA, 1410 nt, Artificial Sequence; identical to SEQ ID NO: 175161
  derived and/or modified CDS sequence (opt4) from neuraminidase__InfluenzaA__ABI20939

SEQ ID NO: 175368 - RNA, 1410 nt, Artificial Sequence; identical to SEQ ID NO: 175161
  derived and/or modified CDS sequence (opt4) from neuraminidase__InfluenzaA__ABI20950

SEQ ID NO: 175369 - RNA, 1410 nt, Artificial Sequence; identical to SEQ ID NO: 175161
  derived and/or modified CDS sequence (opt4) from neuraminidase__InfluenzaA__ABI20961

SEQ ID NO: 175370 - RNA, 1410 nt, Artificial Sequence; identical to SEQ ID NO: 174887
  derived and/or modified CDS sequence (opt4) from neuraminidase__InfluenzaA__ABI20983

SEQ ID NO: 175371 - RNA, 1410 nt, Artificial Sequence
  derived and/or modified CDS sequence (opt4) from neuraminidase__InfluenzaA__ABI20994
augaaccccaaccagaagaucaucaccaucggcagcgugagccugaccaucgccaccaucugcuuccugaugcagaucgccauccuggugaccaccgugacccugcacuucaagcaguacgagugcaacagcccccccaacaaccaggugaugcugugcgagcccaccaucaucgagagaaacaucaccgagaucguguaccugaccaacaccaccaucgagaaggagaucugccccaagcuggccgaguacagaaacuggagcaagccccagugcaacaucaccggcuucgcccccuucagcaaggacaacagcaucagacugagcgccggcggcgacaucugggugaccagagagcccuacgugagcugcgaccccgacaagugcuaccaguucgcccugggccagggcaccacccugaacaacggccacagcaacgacaccgugcacaacagaacccccuacagaacccugcugaugaacgagcugggcgugcccuuccaccugggcaccaagcaggugugcaucgccuggagcagcagcagcugccacgacggcaaggccuggcugcacgugugcgugaccggcgacgacgagaacgccaccgccagcuucaucuacaacggcagacugguggacagcaucggcagcuggagcaagaagauccugagaacccaggagagcgagugcgugugcaucaacggcaccugcaccguggugaugaccgacggcagcgccagcggcaaggccgacaccaagauccuguucaucgaggagggcaagaucgugcacaccagcagccugagcggcagcgcccagcacguggaggagugcagcugcuaccccagauaccccggcgugagaugcgugugcagagacaacuggaagggcagcaacagacccaucguggacaucaacgugaaggacuacagcaucgugagcagcuacgugugcagcggccuggugggcgacacccccagaaagaacgacagcagcagcagcagccacugccuggaccccaacaacgaggagggcggccacggcgugaagggcugggccuucgacgacggcaacgacguguggaugggcagaaccaucagcgagaagcugagaagcggcuacgagaccuucaaggugaucgagggcuggagcaagcccaacagcaagcugcagaucaacagacaggugaucguggacagaggcaacagaagcggcuacagcggcaucuucagcguggagagcaagagcugcaucaacagaugcuucuacguggagcugaucagaggcagaaagcaggagaccgaggugcuguggaccagcaacagcaucgugguguucugcggcaccagcggcaccuacggcaccggcagcuggcccgacggcgccgacaucaaccugaugcccaucuga

SEQ ID NO: 175372 - RNA, 1410 nt, Artificial Sequence
  derived and/or modified CDS sequence (opt4) from neuraminidase__InfluenzaA__ABI21005
augaaccccaaccagaagaucaucaccaucggcagcgugagccugaccaucgccaccaucugcuuccugaugcagaucgccgugcuggugaccaccgugacccugcacuucaagcaguacgagugcaacagcccccccaacaaccaggugaugcugugcgagcccaccaucaucgagagaaacaucaccgagaucguguaccugaccaacaccaccaucgagaaggagaucugccccaagcuggccgaguacagaaacuggagcaagccccagugcaacaucaccggcuucgcccccuucagcaaggacaacagcaucagacugagcgccggcggcgacaucugggugaccagagagcccuacgugagcugcgaccccgacaagugcuaccaguucgcccugggccagggcaccacccugaacaacggccacagcaacgacaccgugcacgacagaacccccuacagaacccugcugaugaacgagcugggcgugcccuuccaccugggcaccaagcaggugugcaucgccuggagcagcagcagcugccacgacggcaaggccuggcugcacgugugcgugaccggcgacgacgagaacgccaccgccagcuucaucuacaacggcagacuggccgacagcaucggcagcuggagcaagaagauccugagaacccaggagagcgagugcgugugcaucaacggcaccugcaccguggugaugaccgacggcagcgccagcggcaaggccgacaccaagauccuguucaucgaggagggcaagaucgugcacaccagccugcugagcggcagcgcccagcacguggaggagugcagcugcuaccccagauaccccggcgugagaugcgugugcagagacaacuggaagggcagcaacagacccaucguggacaucaacgugaaggacuacagcaucgugagcagcuacgugugcagcggccuggugggcgacacccccagaaagaacgacagcagcagcagcagccacugccuggaccccaacaacgaggagggcggccacggcgugaagggcugggccuucgacgacggcaacgacguguggaugggcagaaccaucagcgagaagcugagaagcggcuacgagaccuucaaggugaucgagggcuggagcaagcccaacagcaagcugcagaucaacagacaggugaucguggacagaggcaacagaagcggcuacagcggcaucuucagcguggagggcaagagcugcaucaacagaugcuucuacguggagcugaucagaggcagaaagcaggagaccgaggugcuguggaccagcaacagcaucgugguguucugcggcaccagcggcaccuacggcaccggcagcuggcccgacggcgccgacaucaaccugaugcccaucuga

SEQ ID NO: 175373 - RNA, 1410 nt, Artificial Sequence; identical to SEQ ID NO: 174214
  derived and/or modified CDS sequence (opt4) from neuraminidase__InfluenzaA__ABI21016

SEQ ID NO: 175374 - RNA, 1410 nt, Artificial Sequence
  derived and/or modified CDS sequence (opt4) from neuraminidase__InfluenzaA__ABI21027
augaaccccaaccagagaaucaucaccaucggcagcgugagccugaccaucgccaccaucugcuuccugaugcagaucgccauccuggugaccaccgugacccugcacuucaagcaguacgagugcaacagcccccccaacaaccaggugaugcugugcgagcccaccaucaucgagagaaacaucaccgagaucguguaccugaccaacaccaccaucgagaaggagaucugccccaagcuggccgaguacagaaacuggagcaagccccagugcaacaucaccggcuucgcccccuucagcaaggacaacagcaucagacugagcgccggcggcgacaucugggugaccagagagcccuacgugagcugcgaccccgacaagugcuaccaguucgcccugggccagggcaccacccugaacaacggccacagcaacgacaccgugcacgacagaacccccuacagaacccugcugaugaacgagcugggcgugcccuuccaccugggcaccagacaggugugcaucgccuggagcagcagcagcugccacgacggcaaggccuggcugcacgugugcgugaccggcgacgacgagaacgccaccgccagcuucaucuacaacggcagacugguggacagcaucggcagcuggagcaagaagauccugagaacccaggagagcgagugcgugugcaucaacggcaccugcaccguggugaugaccgacggcagcgccagcggcaaggccgacaccaagauccuguucaucgaggagggcaagaucgugcacaucagcacccugagcggcagcgcccagcacguggaggagugcagcugcuaccccagauaccccggcgugagaugcgugugcagagacaacuggaagggcagcaacagacccaucguggacaucaacgugaaggacuacagcaucgugagcagcuacgugugcagcggccuggugggcgacacccccagaaagaacgacagcuucagcagcagccacugccuggaccccaacaacgaggagggcggccacggcgugaagggcugggccuucgacgacggcaacgacguguggaugggcagaaccaucagcgagaagcugagaagcggcuacgagaccuucaaggugaucgagggcuggagcaagcccaacagcaagcugcagaccaacagacaggugaucguggagagaggcaacagaagcggcuacagcggcaucuucagcguggagggcaagagcugcaucaacagaugcuucuacguggagcugaucagaggcagaaaggaggagaccgaggugugguggaccagcaacagcaucgugguguucugcggcacccccggcaccuacggcaccggcagcuggcccgacggcgccgacaucaaccugaugcccaucuga

SEQ ID NO: 175375 - RNA, 1410 nt, Artificial Sequence; identical to SEQ ID NO: 174651
  derived and/or modified CDS sequence (opt4) from neuraminidase__InfluenzaA__ABI21038

SEQ ID NO: 175376 - RNA, 1410 nt, Artificial Sequence
  derived and/or modified CDS sequence (opt4) from neuraminidase__InfluenzaA__ABI21049
augaaccccaaccagaagaucaucaccaucggcagcgugagccugaccaucgccaccaucugcuuccugaugcagaucgccauccuggugaccaccgugacccugcacuucaagcagcacgagugcaacagcccccccaacaaccaggugaugcugugcgagcccaccaucaucgagagaaacaucaccgagaucguguaccugaccaacaccaccaucgagaaggagaucugccccaagcugguggaguacagaaacuggagcaagccccagugcaacaucaccggcuucgcccccuucagcaaggacaacagcaucagacugagcgccggcggcgacaucugggugaccagagagcccuacgugagcugcgaccccgacaagugcuaccaguucgcccugggccagggcaccacccugaacaacggccacagcaacgacaccgugcacgacagaacccccuacagaacccugcugaugaacgagcugggcgugcccuuccaccugggcaccagacaggugugcaucgccuggagcagcagcagcugccacgacggcaaggccuggcugcacgugugcgugaccggcgacgacaagaacgccaccgccagcuucaucuacaacggcagacugguggacagcaucggcagcuggagcaagaagauccugagaacccaggagagcgagugcgugugcaucaacggcaccugcaccguggugaugaccgacggcagcgccagcggcaaggccgacaccaagauccuguucaucgaggagggcaagaucgugcacaucagcacccugagcggcagcgcccagcacguggaggagugcagcugcuaccccagauaccccggcgugagaugcgugugcagagacaacuggaagggcagcaacagacccaucguggacaucaacgugaaggacuacagcaucgugagcggcuacgugugcagcggccuggugggcgacacccccagaaagaacgacagcuucagcagcagccacugccuggaccccaacaacgaggagggcggccacggcgugaagggcugggccuucgacgacggcaacgacguguggaugggcagaaccaucagcgagaagcugagaagcggcuacgagaccuucaaggugaucgagggcuggagcaagcccaacagcaagcugcagaucaacagacaggugaucguggagagaggcaacagaagcggcuacagcggcaucuucagcguggagggcaagagcugcaucaacagaugcuucuacguggagcugaucagaggcagaaaggaggagaccgaggugugguggaccagcaacagcaucgugguguucugcggcaccagcggcaccuacggcaccggcagcuggcccgacggcgccgacaucaaccugaugcccaucuga

SEQ ID NO: 175377 - RNA, 1410 nt, Artificial Sequence
  derived and/or modified CDS sequence (opt4) from neuraminidase__InfluenzaA__ABI21060
augaaccccaaccagaagaucaucaccaucggcagcgugagccugaccaucgccaccaucugcuuccugaugcagaucgccauccuggugaccaccgugacccugcacuucaagcagcacgagugcaacagcccccccaacaaccaggugaugcugugcgagcccaccaucaucgagagaaacaucaccgagaucguguaccugaccaacaccaccaucgagaaggagaucugccccaagcccguggaguacagaaacuggagcaagccccagugcaacaucaccggcuucgcccccuucagcaaggacaacagcaucagacugagcgccggcggcgacaucugggugaccagagagcccuacgugagcugcgaccccgacaagugcuaccaguucgcccugggccagggcaccacccugaacaacggccacagcaacgacaccgugcacgacagaacccccuacagaacccugcugaugaacgagcugggcgugcccuuccaccugggcaccagacaggugugcaucgccuggagcagcagcagcugccacgacggcaaggccuggcugcacgugugcgugaccggcgacgacaagaacgccaccgccagcuucaucuacaacggcagacugguggacagcaucggcagcuggagcaagaagauccugagaacccaggagagcgagugcgugugcaucaacggcaccugcaccguggugaugaccgacggcagcgccagcggcaaggccgacaccaagauccuguucaucgaggagggcaagaucgugcacaucagcacccugagcggcagcgcccagcacguggaggagugcagcugcuaccccagauaccccggcgugagaugcgugugcagagacaacuggaagggcagcaacagacccaucguggacaucaacgugaaggacuacagcaucgugagcagcuacgugugcagcggccuggugggcgacacccccagaaagaacgacagcuucagcagcagccacugccuggaccccaacaacgaggagggcggccacggcgugaagggcugggccuucgacgacggcaacgacguguggaugggcagaaccaucagcgagaagcugagaagcggcuacgagaccuucaaggugaucgagggcuggagcaagcccaacagcaagcugcagaucaacagacaggugaucguggagagaggcaacagaagcggcuacagcggcaucuucagcguggagggcaagagcugcaucaacagaugcuucuacguggagcugaucagaggcagaaaggaggagaccgaggugugguggaccagcaacagcaucgugguguucugcggcaccagcggcaccuacggcaccggcagcuggcccgacggcgccgacaucaaccugaugcccaucuga

SEQ ID NO: 175378 - RNA, 1410 nt, Artificial Sequence
  derived and/or modified CDS sequence (opt4) from neuraminidase__InfluenzaA__ABI21071
augaaccccaaccagaagaucaucaccaucggcagcgugagccugaccaucagcaccaucugcuucuucaugcagaucgccauccugaucaccaccgugacccugcacuucaagcaguacgaguucaacagcccccccaacaaccaggugaugcugugcgagcccaccaucaucgagagaaacaucaccgagaucguguaccugaccaacaccaccaucgagaaggagaucugccccaagcuggccgaguacagaaacuggagcaagccccagugcgacaucaccggcuucgcccccuucagcaaggacaacagcaucagacugagcgccggcggcgacaucugggugaccagagagcccuacgugagcugcgaccccgacaagugcuaccaguucgcccugggccagggcaccacccugaacaacgugcacagcaacgacaccgugcacgacagaacccccuacagaacccugcugaugagcgagcugggcgugcccuuccaccugggcaccaagcaggugugcaucgccuggagcagcagcagcugccacgacggcaaggccuggcugcacgugugcgugaccggcgacgacaagaacgccaccgccagcuucaucuacaacggcagacugguggacagcaucgugagcuggagcaaggagauccugagaacccaggagagcgagugcgugugcaucaacggcaccugcaccguggugaugaccgacggcagcgccagcggcaaggccgacaccaagauccuguucaucgaggagggcaagaucgugcacaccagcacccugagcggcagcgcccagcacguggaggagugcagcugcuaccccagauaccccggcgugagaugcgugugcagagacaacuggaagggcagcaacagacccaucguggacaucaacaucaaggacuacagcaucgugagcagcuacgugugcagcggccuggugggcgacacccccagaaagaacgacagcagcagcagcagccacugccuggaccccaacaacgaggagggcggccacggcgugaagggcugggccuucgacgacggcaacgacguguggaugggcagaaccaucagcgagaagcugagaagcggcuacgagaccuucaaggugaucgagggcuggagcaaccccaacagcaagcugcagaucaacagacaggugaucguggacagaggcaacagaagcggcuacagcggcaucuucagcguggagggcaagagcugcaucaacagaugcuucuacguggagcugaucagaggcagaaaggaggagaccgaggugcuguggaccagcaacagcaucgugguguucugcggcaccagcggcaccuacggcaccggcagcuggcccgacggcgccgacaucaaccugaugcccaucuga

SEQ ID NO: 175379 - RNA, 1410 nt, Artificial Sequence
  derived and/or modified CDS sequence (opt4) from neuraminidase__InfluenzaA__ABI21082
augaaccccaaccagaagaucaucaccaucggcagcgugagccugaccaucagcaccaucugcuucuucaugcagaucgccacccugaucaccaccgugacccugcacuucaagcaguacgaguucaacagcccccccaacaaccaggugaugcugugcgagcccaccaucaucgagagaaacaucaccgagaucguguaccugaccaacaccaccaucgagaaggagaucugccccaagcuggccgaguacagaaacuggagcaagccccagugcgacaucaccggcuucgcccccuucagcaaggacaacagcaucagacugagcgccggcggcgacaucugggugaccagagagcccuacgugagcugcgaccccgacaagugcuaccaguucgcccugggccagggcaccacccugaacaacgugcacagcaacgacaccgugcacgacagaacccccuacagaacccugcugaugaacgagcugggcgugcccuuccaccugggcaccaagcaggugugcaucgccuggagcagcagcagcugccacgacggcaaggccuggcugcacgugugcgugaccggcgacgacaagaacgccaccgccagcuucaucuacaacggcagacugguggacagcaucgugagcuggagcaaggagauccugagaacccaggagagcgagugcgugugcaucaacggcaccugcaccguggugaugaccgacggcagcgccagcggcaaggccgacaccaagauccuguucaucgaggagggcaagaucgugcacaccagcacccugagcggcagcgcccagcacguggaggagugcagcugcuaccccagauaccccggcgugagaugcgugugcagagacaacuggaagggcagcaacagacccaucguggacaucaacaucaaggacuacagcaucgugagcagcuacgugugcagcggccuggugggcgacacccccagaaagaacgacagcagcagcagcagccacugccuggaccccaacaacgaggagggcggccacggcgugaagggcugggccuucgacgacggcaacgacguguggaugggcagaaccaucagcgagaagcugagaagcggcuacgagaccuucaaggugaucgagggcuggagcaaccccaacagcaagcugcagaucaacagacaggugaucguggacagaggcaacagaagcggcuacagcggcaucuucagcguggagggcaagagcugcaucaacagaugcuucuacguggagcugaucagaggcagaaaggaggagaccgaggugcuguggaccagcaacagcaucgugguguucugcggcaccagcggcaccuacggcaccggcagcuggcccgacggcgccgacaucaaccugaugcccaucuga

SEQ ID NO: 175380 - RNA, 1410 nt, Artificial Sequence; identical to SEQ ID NO: 174796
  derived and/or modified CDS sequence (opt4) from neuraminidase__InfluenzaA__ABI21093

SEQ ID NO: 175381 - RNA, 1410 nt, Artificial Sequence
  derived and/or modified CDS sequence (opt4) from neuraminidase__InfluenzaA__ABI21104
augaaccccaaccagaagaucaucaccaucggcagcgugagccugaccaucagcaccaucugcuucuucaugcagaucgccauccugaucaccaccgugacccugcacuucaagcaguacgaguucaacagcccccccaacaaccaggugaugcugugcgagcccaccaucaucgagagaaacaucaccgagaucguguaccuggccaacaccaccaucgagaaggagaucugccccaagcuggccgaguacagaaacuggagcaagccccagugcgacaucaccggcuucgcccccuucagcaaggacaacagcaucagacugagcgccggcggcgacaucugggugaccagagagcccuacgugagcugcgaccccgacaagugcuaccaguucgcccugggccagggcaccacccugaacaacgugcacagcaacgacaccgugcacgacagaacccccuacagaacccugcugaugaacgagcugggcgugcccuuccaccugggcaccaagcaggugugcaucgccuggagcagcagcagcugccacgacggcaaggccuggcugcacgugugcgugaccggcgacgacaagaacgccaccgccagcuucaucuacaacggcagacugguggacagcaucgugagcuggagcaaggagauccugagaacccaggagagcgagugcgugugcaucaacggcaccugcaccguggugaugaccgacggcagcgccagcggcaaggccgacaccaagauccuguucaucgaggagggcaagaucgugcacaccagcacccugagcggcagcgcccagcacguggaggagugcagcugcuaccccagauaccccggcgugagaugcgugugcagagacaacuggaagggcagcaacagacccaucguggacaucaacaucaaggacuacagcaucgugagcagcuacgugugcagcggccuggugggcgacacccccagaaagaacgacagcagcagcagcagccacugccuggaccccaacaacgaggagggcggccacggcgugaagggcugggccuucgacgacggcaacgacguguggaugggcagaaccaucagcgagaagcugagaagcggcuacgagaccuucaaggugaucgagggcuggagcaaccccaacagcaagcugcagaucaacagacaggugaucguggacagaggcaacagaagcggcuacagcggcaucuucagcguggagggcaagaacugcaucaacagaugcuucuacguggagcugaucagaggcagaaaggaggagaccgaggugcuguggaccagcaacagcaucgugguguucugcggcaccagcggcaccuacggcaccggcagcuggcccgacggcgccgacaucaaccugaugcccaucuga

SEQ ID NO: 175382 - RNA, 1410 nt, Artificial Sequence; identical to SEQ ID NO: 174387
  derived and/or modified CDS sequence (opt4) from neuraminidase__InfluenzaA__ABI21115

SEQ ID NO: 175383 - RNA, 1410 nt, Artificial Sequence; identical to SEQ ID NO: 174387
  derived and/or modified CDS sequence (opt4) from neuraminidase__InfluenzaA__ABI21126

SEQ ID NO: 175384 - RNA, 1410 nt, Artificial Sequence; identical to SEQ ID NO: 174796
  derived and/or modified CDS sequence (opt4) from neuraminidase__InfluenzaA__ABI21137

SEQ ID NO: 175385 - RNA, 1410 nt, Artificial Sequence; identical to SEQ ID NO: 174387
  derived and/or modified CDS sequence (opt4) from neuraminidase__InfluenzaA__ABI21148

SEQ ID NO: 175386 - RNA, 1410 nt, Artificial Sequence
  derived and/or modified CDS sequence (opt4) from neuraminidase__InfluenzaA__ABI21159
augaaccccaaccagaagaucaucaccaucggcagcgugagccugaccaucagcaccaucugcuucuucaugcagaucgccauccugaucaccaccgugacccugcacuucaagcaguacgaguucaacagcccccccaacaaccaggugaugcugugcgagcccaccaucaucgagagaaacaucaccgagaucguguaccugaccaacaccaccaucgagaaggagaucugccccaagcuggccgaguacagaaacuggagcaagccccagugcgacaucaccggcuucgcccccuucagcaaggacaacagcaucagacugagcgccggcggcgacaucugggugaccagagagcccuacgugagcugcgaccccgacaagugcuaccaguucgcccugggccagggcaccacccugaacaacgugcacagcaacgacaccgugcacgacagaacccccuacagaacccugcugaugaacgagcugggcgugcccuuccaccugggcaccaagcaggugugcaucgccuggagcagcagcagcugccacgacggcaaggccuggcugcacgugugcgugaccggcgacgacaagaacgccaccgccagcuucaucuacaacggcagacugguggacagcaucgugagcuggagcaaggagauccugagaacccaggagagcgagugcgugugcaucaacggcaccugcaccguggugaugaccgacggcagcgccagcggcaaggccgacaccaagauccuguucaucgaggagggcaagaucgugcacaccagcacccugagcggcagcgcccagcacguggaggagugcagcugcuaccccagauaccccggcgugagaugcgugugcagagacaacuggaagggcagcaacagacccaucguggacaucaacaucaaggacuacagcaucgugagcggcuacgugugcagcggccuggugggcgacacccccagaaagaacgacagcagcagcagcagccacugccuggaccccaacaacgaggagggcggccacggcgugaagggcugggccuucgacgacggcaacgacguguggaugggcagaaccaucagcgagaagcugagaagcggcuacgagaccuucaaggugaucgagggcuggagcaaccccaacagcaagcugcagaucaacagacaggugaucguggacagaggcaacagaagcggcuacagcggcaucuucagcguggagggcaagagcugcaucaacagaugcuucuacguggagcugaucagaggcagaaaggaggagaccgaggugcuguggaccagcaacagcaucgugguguucugcggcaccagcggcaccuacggcaccggcagcuggcccgacggcgccgacaucaaccugaugcccaucuga

SEQ ID NO: 175387 - RNA, 1410 nt, Artificial Sequence; identical to SEQ ID NO: 174387
  derived and/or modified CDS sequence (opt4) from neuraminidase__InfluenzaA__ABI21170

SEQ ID NO: 175388 - RNA, 1410 nt, Artificial Sequence; identical to SEQ ID NO: 174387
  derived and/or modified CDS sequence (opt4) from neuraminidase__InfluenzaA__ABI21181

SEQ ID NO: 175389 - RNA, 1413 nt, Artificial Sequence
  derived and/or modified CDS sequence (opt4) from neuraminidase__InfluenzaA__ABI21192
augaaccccaaccagaagaucaucaccaucggcagcaucagcaucgccaucggcaucaucagccugaugcugcagaucggcaacaucaucagcaucugggccagccacagcauccagaccggcagccagaaccacaccggcaccugcaaccagagaaucaucaccuacgagaacagcaccugggugaaccacaccuacgugaacaucaacaacaccaacgugguggccggcaaggacaagaccagcgugacccuggccggcaacagcagccugugcagcaucagcggcugggccaucuacaccaaggacaacagcaucagaaucggcagcaagggcgacguguucgugaucagagagcccuucaucagcugcagccaccuggagugcagaaccuucuuccugacccagggcgcccugcugaacgacaagcacagcaacggcaccgugaaggacagaagccccuacagagcccugaugagcugcccccugggcgaggcccccagccccuacaacagcaaguucgagagcguggccuggagcgccagcgccugccacgacggcaugggcuggcugaccaucggcaucagcggccccgacaacggcgccguggccgugcugaaguacaacggcaucaucaccgagaccaucaagagcuggagaaagagaauccugagaacccaggagagcgagugcgugugcgugaacggcagcugcuucaccaucaugaccgacggccccagcaacggcgccgccagcuacaagaucuucaagaucgagaagggcaaggugaccaagagcaucgagcugaacgcccccaacuuccacuacgaggagugcagcugcuaccccgacaccggcaccgugaugugcgugugcagagacaacuggcacggcagcaacagacccugggugagcuucaaccagaaccuggacuaccagaucggcuacaucugcagcggcguguucggcgacaaccccagacccaaggacggcaagggcagcugcaaccccgugaccguggacggcgccgacggcgugaagggcuucagcuacaaguacggcaacggcguguggaucggcagaaccaagagcaacagacugagaaagggcuucgagaugaucugggaccccaacggcuggaccgacaccgacagcgacuucagcgugaagcaggacgugguggccaucaccgacuggagcggcuacagcggcagcuucgugcagcaccccgagcugaccggccuggacugcaucagacccugcuucuggguggagcuggugagaggccugcccagagagaacaccaccaucuggaccagcggcagcagcaucagcuucugcggcguggacagcgacaccgccaacuggagcuggcccgacggcgccgagcugcccuucaucaucgacaaguga

SEQ ID NO: 175390 - RNA, 1413 nt, Artificial Sequence; identical to SEQ ID NO: 174446
  derived and/or modified CDS sequence (opt4) from neuraminidase__InfluenzaA__ABI21203

SEQ ID NO: 175391 - RNA, 1413 nt, Artificial Sequence
  derived and/or modified CDS sequence (opt4) from neuraminidase__InfluenzaA__ABI21214
augaaccccaaccagaagaucaucaccaucggcagcaucagcaucgccaucggcaucaucagccugaugcugcagaucggcaacaucaucagcaucugggccagccacagcauccagaccggcagccagaaccacaccggcaucugcaaccagagaaucaucaccuacgagaacagcaccugggugaaccacaccuacgugaacaucaacaacaccaacgugguggccggcaaggacaucaccagcgugacccuggccggcaacagcagccugugcagcaucagcggcugggccaucuacaccaaggacaacagcaucagaaucggcagcaagggcgacguguucgugaucagagagcccuucaucagcugcagccaccuggagugcagaaccuucuuccugacccagggcgcccugcugaacgacaagcacagcaacggcaccgugaaggacagaagccccuacagagcccugaugagcugcccccugggcgaggcccccagccccuacaacagcaaguucgagagcguggccuggagcgccagcgccugccacgacggcaugggcuggcugaccaucggcaucagcggccccgacaacggcgccguggccgugcugaaguacaacggcaucaucaccgagaccaucaagagcuggaagaagagaauccugagaacccaggagagcgagugcgugugcgugaacggcagcugcuucaccaucaugaccgacggccccagcaacggcgccgccagcuacaagaucuucaagaucgagaagggcaaggugaccaagagcaucgagcugaacgcccccaacuuccacuacgaggagugcagcugcuaccccgacaccggcaccgugaugugcgugugcagagacaacuggcacggcagcaacagacccugggugagcuucaaccagaaccuggacuaccagaucggcuacaucugcagcggcguguucggcgacaaccccagacccaaggacggcaagggcagcugcaaccccgugaccguggacggcgccgacggcgugaagggcuucagcuacaaguacggcaacggcguguggaucggcagaaccaagagcaacagacugagaaagggcuucgagaugaucugggaccccaacggcuggaccgacaccgacagcgacuucagcgugaagcaggacgugguggccaucaccgacuggagcggcuacagcggcagcuucgugcagcaccccgagcugaccggccuggacugcaucagacccugcuucuggguggagcuggugagaggccugcccagagagaacaccaccaucuggaccagcggcagcagcaucagcuucugcggcguggacagcgacaccgccaacuggagcuggcccgacggcgccgagcugcccuucaccaucgacaaguga

SEQ ID NO: 175392 - RNA, 1410 nt, Artificial Sequence
  derived and/or modified CDS sequence (opt4) from neuraminidase__InfluenzaA__ABI21247
augaaccccaaccagaagaucaucaccaucggcagcgugagccugaccaucgccaccaucugcuuccugaugcagaucgccauccuggugaccaccgugacccugcacuucaagcaguacgagugcaacagcccccccaacaaccaggugaugcugugcgagcccaccaucaucgagagaaacaucaccgagaucguguaccugaccaacaccaccaucgagaaggagaagugccccaagcuggccgaguacagaaacuggagcaagccccagugcaagaucaccggcuucgcccccuucagcaaggacaacagcaucagacugagcgccggcggcgacaucugggugaccagagagcccuacgugagcugcgaccccggcaagugcuaccaguucgcccugggccagggcaccacccugaacaacagacacagcaacgacaccgugcacgacagaacccccuacagaacccugcugaugaacgagcugggcgugcccuuccaccugggcaccaagcaggugugcaucgccuggagcagcagcagcugccacgacggcaaggccuggcugcacgugugcgugaccggccacgacgagaacgccaccgccagcuucaucuacgacggcagacugguggacagcaucggcagcuggagcaagaacauccugagaacccaggagagcgagugcgugugcaucaacggcaccugcaccguggugaugaccgacggcagcgccagcgagagagccgacaccaagauccuguucaucgaggagggcaagaucgugcacaucagcccccugagcggcagcgcccagcacguggaggagugcagcugcuaccccagauaccccggcgugagaugcgugugcagagacaacuggaagggcagcaacagacccaucguggacaucaacgugaaggaccacagcaucgugagcagcuacgugugcagcggccuggugggcgacacccccagaaagaacgacagcagcagcagcagcuacugcagaaaccccaacaacgagaagggcagccacggcaugaagggcugggccuucgacgacggcaacgacguguggaugggcagaaccaucagcgaggagcugagaagcggcuacgagaccuucaaggugaucggcggcuggagcaagcccaacagcaagcugcagaucaacagacaggugaucguggacagaggcaacagaagcggcuacagcggcaucuucagcguggagggcaagagcugcaucaacagaugcuucuacguggagcugaucagaggcagaaagcaggagaccgaggugugguggaccagcaacagcaucgugguguucugcggcaccagcggcaccuacggcaccggcagcuggcccgacggcgccgacaucaaccugaugcccaucuga

SEQ ID NO: 175393 - RNA, 1410 nt, Artificial Sequence; identical to SEQ ID NO: 175313
  derived and/or modified CDS sequence (opt4) from neuraminidase__InfluenzaA__ABI21258

SEQ ID NO: 175394 - RNA, 1410 nt, Artificial Sequence; identical to SEQ ID NO: 175313
  derived and/or modified CDS sequence (opt4) from neuraminidase__InfluenzaA__ABI21269

SEQ ID NO: 175395 - RNA, 1410 nt, Artificial Sequence; identical to SEQ ID NO: 175313
  derived and/or modified CDS sequence (opt4) from neuraminidase__InfluenzaA__ABI21280

SEQ ID NO: 175396 - RNA, 1410 nt, Artificial Sequence; identical to SEQ ID NO: 175245
  derived and/or modified CDS sequence (opt4) from neuraminidase__InfluenzaA__ABI21302

SEQ ID NO: 175397 - RNA, 1410 nt, Artificial Sequence; identical to SEQ ID NO: 175245
  derived and/or modified CDS sequence (opt4) from neuraminidase__InfluenzaA__ABI21313

SEQ ID NO: 175398 - RNA, 1410 nt, Artificial Sequence; identical to SEQ ID NO: 175245
  derived and/or modified CDS sequence (opt4) from neuraminidase__InfluenzaA__ABI21324

SEQ ID NO: 175399 - RNA, 1410 nt, Artificial Sequence; identical to SEQ ID NO: 175245
  derived and/or modified CDS sequence (opt4) from neuraminidase__InfluenzaA__ABI21335

SEQ ID NO: 175400 - RNA, 1410 nt, Artificial Sequence; identical to SEQ ID NO: 175313
  derived and/or modified CDS sequence (opt4) from neuraminidase__InfluenzaA__ABI21346

SEQ ID NO: 175401 - RNA, 1410 nt, Artificial Sequence
  derived and/or modified CDS sequence (opt4) from neuraminidase__InfluenzaA__ABI21357
augaaccccaaccagaagaucaucaccaucggcagcgugagccugaccaucgccaccaucugcuuccugaugcagaucgccauccuggugaccaccgugacccugcacuucaagcaguacgagugcaacagcccccccaacaaccaggugaugcugugcgagcccaccaucaucgagagaaacaucaccgagaucguguaccugaccaacaccaccaucgagaaggagaucugccccaagcuggccgaguacagaaacuggagcaagccccagugcaagaucaccggcuucgcccccuucagcaaggacaacagcaucagacugagcgccggcggcgacaucugggugaccagagagcccuacgugagcugcgaccccggcaagugcuaccaguucgcccugggccagggcaccacccugaacaacagacacagcaacgacaccgugcacgacagaacccccuacagaacccugcugaugaacgagcugggcgugcccuuccaccugggcaccaagcaggugugcaucgccuggagcagcagcagcugccacgacggcaaggccuggcugcacgugugcgugaccggccacgacgagaacgccaccgccagcuucaucuacgacggcagacugguggacagcaucggcagcuggagcaagaacauccugagaacccaggagagcgagugcgugugcaucaacggcaccugcaccguggugaugaccgacggcagcgccagcgagagagccgacaccaagauccuguucaucgaggagggcaagaucgugcacaucagcccccugagcggcagcgcccagcacguggaggagugcagcugcuaccccagauaccccggcgugagaugcgugugcagagacaacuggaagggcagcaacagacccaucguggacaucaacgugaagaacuacagcaucgugagcagcuacgugugcagcggccuggugggcgacacccccagaaagaacgacagcagcagcagcagcuacugcagaaaccccaacaacgagaagggcagccacggcgugaagggcugggccuucgacgacggcaacgacguguggaugggcagaaccaucagcgaggagcugagaagcggcuacgagaccuucaaggugaucggcggcuggagcaagcccaacagcaagcugcagaucaacagacaggugaucguggacagaggcaacagaagcggcuacagcggcaucuucagcguggagggcaagagcugcaucaacagaugcuucuacguggagcugaucagaggcagaaagcaggaggccgaggugugguggaccagcaacagcaucgugguguucugcggcaccagcggcaccuacggcaccggcagcuggcccgacggcgccgacaucaaccugaugcccaucuga

SEQ ID NO: 175402 - RNA, 1410 nt, Artificial Sequence; identical to SEQ ID NO: 175245
  derived and/or modified CDS sequence (opt4) from neuraminidase__InfluenzaA__ABI21368

SEQ ID NO: 175403 - RNA, 1410 nt, Artificial Sequence; identical to SEQ ID NO: 175245
  derived and/or modified CDS sequence (opt4) from neuraminidase__InfluenzaA__ABI21379

SEQ ID NO: 175404 - RNA, 1410 nt, Artificial Sequence; identical to SEQ ID NO: 175245
  derived and/or modified CDS sequence (opt4) from neuraminidase__InfluenzaA__ABI21390

SEQ ID NO: 175405 - RNA, 1410 nt, Artificial Sequence; identical to SEQ ID NO: 175313
  derived and/or modified CDS sequence (opt4) from neuraminidase__InfluenzaA__ABI21401

SEQ ID NO: 175406 - RNA, 1410 nt, Artificial Sequence
  derived and/or modified CDS sequence (opt4) from neuraminidase__InfluenzaA__ABI21412
augaaccccaaccagaagaucaucaccaucggcagcgugagccugaccaucgccaccaucugcuuccugaugcagaucgccauccuggugaccaccgugacccugcacuucaagcaguacgagugcaaccccccccccaacaaccaggugaugcugugcgagcccaccaucaucgagagaaacaucaccgagaucguguaccugaccaacaccaccaucgagaaggagaucugccccaagcuggccgaguacagaaacuggagcaagccccagugcaagaucaccggcuucgcccccuucagcaaggacaacagcaucagacugagcgccggcggcgacaucugggugaccagagagcccuacgugagcugcgaccccggcaagugcuaccaguucgcccugggccagggcaccacccugaacaacagacacagcaacgacaccgugcacgacagaacccccuacagaacccugcugaugaacgagcugggcgugcccuuccaccugggcaccaagcaggugugcaucgccuggagcagcagcagcugccacgacggcaaggccuggcugcacgugugcgugaccggccacgacgagaacgccaccgccagcuucaucuacgacggcagacugguggacagcaucggcagcuggagcaagaacauccugagaacccaggagagcgagugcgugugcaucaacggcaccugcaccguggugaugaccgacggcagcgccagcgagagagccgacaccaagauccuguucaucgaggagggcaagaucgugcacaucagcccccugagcggcagcgcccagcacguggaggagugcagcugcuaccccagauaccccggcgugagaugcgugugcagagacaacuggaagggcagcaacagacccaucguggacaucaacgugaaggacuacagcaucgugagcagcuacgugugcagcggccuggugggcgacacccccagaaagaacgacagcagcagcagcagcuacugcagaaaccccaacaacgagaagggcagccacggcgugaagggcugggccuucgacgacggcaacgacguguggaugggcagaaccaucagcgaggagcugagaagcggcuacgagaccuucaaggugaucggcggcuggagcaagcccaacagcaagcugcagaucaacagacaggugaucguggacagaggcaacagaagcggcuacagcggcaucuucagcguggagggcaagagcugcaucaacagaugcuucuacguggagcugaucagaggcagaaagcaggagaccgaggugugguggaccagcaacagcaucgugguguucugcggcaccagcggcaccuacggcaccggcagcuggcccgacggcgccgacaucaaccugaugcccaucuga

SEQ ID NO: 175407 - RNA, 1410 nt, Artificial Sequence; identical to SEQ ID NO: 174579
  derived and/or modified CDS sequence (opt4) from neuraminidase__InfluenzaA__ABI21423

SEQ ID NO: 175408 - RNA, 1410 nt, Artificial Sequence; identical to SEQ ID NO: 175245
  derived and/or modified CDS sequence (opt4) from neuraminidase__InfluenzaA__ABI21434

SEQ ID NO: 175409 - RNA, 1410 nt, Artificial Sequence; identical to SEQ ID NO: 175313
  derived and/or modified CDS sequence (opt4) from neuraminidase__InfluenzaA__ABI21445

SEQ ID NO: 175410 - RNA, 1410 nt, Artificial Sequence; identical to SEQ ID NO: 175313
  derived and/or modified CDS sequence (opt4) from neuraminidase__InfluenzaA__ABI21456

SEQ ID NO: 175411 - RNA, 1410 nt, Artificial Sequence; identical to SEQ ID NO: 175406
  derived and/or modified CDS sequence (opt4) from neuraminidase__InfluenzaA__ABI21467

SEQ ID NO: 175412 - RNA, 1410 nt, Artificial Sequence; identical to SEQ ID NO: 175313
  derived and/or modified CDS sequence (opt4) from neuraminidase__InfluenzaA__ABI21478

SEQ ID NO: 175413 - RNA, 1410 nt, Artificial Sequence; identical to SEQ ID NO: 175313
  derived and/or modified CDS sequence (opt4) from neuraminidase__InfluenzaA__ABI21489

SEQ ID NO: 175414 - RNA, 1410 nt, Artificial Sequence; identical to SEQ ID NO: 175313
  derived and/or modified CDS sequence (opt4) from neuraminidase__InfluenzaA__ABI21500

SEQ ID NO: 175415 - RNA, 1410 nt, Artificial Sequence
  derived and/or modified CDS sequence (opt4) from neuraminidase__InfluenzaA__ABI21511
augaaccccaaccagaagaucaucaccaucggcagcgugagccugaccaucgccaccaucugcuuccugaugcagaucgccauccuggugaccaccgugacccugcacuucaagcaguacgagugcaacagcccccccaacaaccaggugaugcugugcgagcccgccaucaucgagagaaacaucaccgagaucguguaccugaccaacaccaccaucgagaaggagaugugccccaagcuggccgaguacagaaacuggagcaagccccagugcaacaucaccggcuucgcccccuucagcaaggacaacagcaucagacugagcgccggcggcgacaucugggugaccagagagcccuacgugagcugcgaccccgacaagugcuaccaguucgcccugggccagggcaccacccugaacaacggccacagcaacgacaccgugcacgacagaacccccuacagaacccugcugaugaacgagcugggcgugcccuuccaccugggcaccagacaggugugcaucgccuggagcagcagcagcugccacgacggcaaggccuggcugcacgugugcgugaccggcgacgacgagaacgccaccgccagcuucaucuacgacggcagacugguggacagcaucggcagcuggagcaagaagauccugagaacccaggagagcgagugcgugugcaucaacggcaccugcaccguggugaugaccgacggcagcgccagcggcaaggccgacaccaagauccuguucaucgaggagggcaagaucgugaacaucagcacccugagcggcagcgcccagcacguggaggagugcagcugcuaccccagauaccccggcgugagaugcgugugcagagacaacuggaagggcagcaacagacccaucguggacaucaacgugaaggacuacagcaucgugagcagcuacgugugcagcggccuggugggcgacacccccagaaagaacgacagcuucagcagcagccacugccuggaccccaacaacgaggagggcggccacggcgugaagggcugggccuucgacgacggcaacgacguguggaugggcagaaccaucagcgagaagcugagaagcggcuacgagaccuucaaggugaucgagggcuggagcaagcccaacagcaagcugcagaucaacagacaggugaucguggagagaggcaacagaagcggcuacagcggcaucuucagcguggagggcaagagcugcaucaacagaugcuucuacguggagcugaucagaggcagaaaggaggagaccgaggugugguggaccagcaacagcaucgugguguucugcggcaccagcggcaccuacggcaccggcagcuggcccgacggcgccgacaucaaccugaugcccaucuga

SEQ ID NO: 175416 - RNA, 1413 nt, Artificial Sequence
  derived and/or modified CDS sequence (opt4) from neuraminidase__InfluenzaA__ABI21533
augaaccccaaccagaagaucaucaccaucggcagcaucagcaucgccaucggcaucaucagccugaugcugcagaucggcaacaucaucagcaucugggccagccacagcauccagaccggcagccagaaccacaccggcaucugcaaccagagaaucaucaccuacgagaacagcaccugggugaaccacaccuacgugaacaucaacaacaccaacgugguggccggcaaggacaagaccagcgugacccuggccggcaacagcagccugugcagcaucagcggcugggccaucuacaccaaggacaacagcaucagaaucggcagcaagggcgacguguucgugaugagagagcccuucaucagcugcagccaccuggagugcagaaccuucuuccugacccagggcgcccugcugaacgacaagcacagcaacggcaccgugaaggacagaagccccuacagagcccugaugagcugcccccugggcgaggcccccagccccuacaacagcaaguucgagagcguggccuggagcgccagcgccugccacgacggcaugggcuggcugaccaucggcaucagcggccccgacaacggcgccguggccgugcugaaguacaacggcaucaucaccgagaccaucaagagcuggaagaagagaauccugagaacccaggagagcgagugcgugugcgugaacggcagcugcuucaccaucaugaccgacggccccagcaacggcgccgccagcuacaagaucuucaagaucgagaagggcaaggugaucaagagcaucgagcugaacgcccccaacagccacuacgaggagugcagcugcuaccccgacaccggcaccgugaugugcgugugcagagacaacuggcacggcagcaacagacccugggugagcuucaaccagaaccuggacuaccagaucggcuacaucugcagcggcguguucggcgacaaccccagacccaaggacggcgagggcagcugcaaccccgugaccguggacggcgccgacggcgugaagggcuucagcuacaaguacggcaacggcguguggaucggcagaaccaagagcaacagacugagaaagggcuucgagaugaucugggaccccaacggcuggaccgacaccgacagcgacuucagcgugaagcaggacgugguggccaucaccgacuggagcggcuacagcggcagcuucgugcagcaccccgagcugaccggccuggacugcaucagacccugcuucuggguggagcuggugagaggcagacccagagagaacaccaccaucuggaccagcggcagcagcaucagcuucugcggcgugaacagcgacaccgccaacuggagcuggcccgacggcgccgagcugcccuucaccaucgacaaguga

SEQ ID NO: 175417 - RNA, 1413 nt, Artificial Sequence; identical to SEQ ID NO: 175416
  derived and/or modified CDS sequence (opt4) from neuraminidase__InfluenzaA__ABI21544

SEQ ID NO: 175418 - RNA, 1413 nt, Artificial Sequence; identical to SEQ ID NO: 175416
  derived and/or modified CDS sequence (opt4) from neuraminidase__InfluenzaA__ABI21555

SEQ ID NO: 175419 - RNA, 1413 nt, Artificial Sequence; identical to SEQ ID NO: 175416
  derived and/or modified CDS sequence (opt4) from neuraminidase__InfluenzaA__ABI21566

SEQ ID NO: 175420 - RNA, 1413 nt, Artificial Sequence; identical to SEQ ID NO: 175416
  derived and/or modified CDS sequence (opt4) from neuraminidase__InfluenzaA__ABI21577

SEQ ID NO: 175421 - RNA, 1413 nt, Artificial Sequence
  derived and/or modified CDS sequence (opt4) from neuraminidase__InfluenzaA__ABI22112
augaaccccaaccagaagaucaucaccaucggcagcaucagcaucgccaucggcaucaucagccugaugcugcagaucggcaacaucaucagcaucugggccagccacagcauccagaccggcagccagaaccacaccggcaucugcaaccagagaaucaucaccuacgagaacagcaccugggugaaccacaccuacgugaacaucaacaacaccaacgugguggccggcaaggacaagaccagcgugacccuggccggcaacagcagccugugcagcaucagcggcugggccaucuacaccaaggacaacagcaucagaaucggcagcaagggcgacguguucgugaucagagagcccuucaucagcugcagccaccuggagugcagaaccuucuuccugacccagggcgcccugcugaacgacaagcacagcaacggcaccgugaaggacagaagccccuacagagcccugaugagcugcccccugggcgaggcccccagccccuacaacagcaaguucgagagcguggccuggagcgccagcgccugccacgacggcaugggcuggcugaccaucggcaucagcggccccgacaacggcgccguggccgugcugaaguacaacgagaucaucaccgagaccaucaagagcuggaagaagagaauccugagaacccaggagagcgagugcgugugcgugaacggcagcugcuucaccaucaugaccgacggccccagcaacggcgccgccagcuacaagaucuucaagaucgagaagggcaaggugaccaagagcaucgagcugaacgcccccaacuuccacuacgaggagugcagcugcuaccccgacaccggcaccgugaugugcgugugcagagacaacuggcacggcagcaacagacccugggugagcuucaaccagaaccuggacuaccagaucggcuacaucugcagcggcguguucggcgacaaccccagacccaaggacggcaagggcagcugcaaccccgugaccguggacggcgccgacggcgugaagggcuucagcuacaaguacggcaacggcguguggaucggcagaaccaagagcaacagacugagaaagggcuucgagaugaucugggaccccaacggcuggaccgacaccgacagcgacuucagcgugaagcaggacgugguggccaucaccgacuggagcggcuacagcggcagcuucgugcagcaccccgagcugaccggccuggacugcaucagacccugcuucuggguggagcuggugagaggccugcccagagagaacaccaccaucuggaccagcggcagcagcaucagcuucugcggcguggacagcgacaccgccaacuggagcuggcccgacggcgccgagcugcccuucaccaucgacaaguga

SEQ ID NO: 175422 - RNA, 1410 nt, Artificial Sequence
  derived and/or modified CDS sequence (opt4) from neuraminidase__InfluenzaA__ABI22162
augaaccccaaccagaagaucaucaccaucggcagcgugagccugaccaucagcaccaucugcuucuucaugcagaucgccauccugaucaccaccgugacccugcacuucaagcaguacgaguucaacagcccccccaacaaccaggugaugcugugcgagcccaccaucaucgagagaaacaucaccgagaucguguaccugaccaacaccaccaucgagaaggagaucugccccaagcuggccgaguacagaaacuggagcaagccccagugcaacaucaccggcuucgcccccuucagcaaggacaacagcaucagacugagcgccggcggcgacaucugggugaccagagagcccuacgugagcugcgaccccgacaagugcuaccaguucgcccugggccagggcaccacccugaacaacgugcacagcaacgacaccgugcacgacagaacccccuacagaacccugcugaugaacgagcugggcgugcccuuccaccugggcaccaagcaggugugcaucgccuggagcagcagcagcugccacgacggcaaggccuggcugcacgugugcgugaccggcgacgacaagaacgccaccgccagcuucaucuacaacggcagacugguggacagcaucgugagcuggagcaaggagauccugagaacccaggagagcgagugcgugugcaucaacggcaccugcaccguggugaugaccgacggcagcgccagcggcaaggccgacaccaagauccuguucaucgaggagggcaagaucgugcacaccagcacccugagcggcagcgcccagcacguggaggagugcagcugcuaccccagauaccccggcgugagaugcgugugcagagacaacuggaagggcagcaacagacccaucguggacaucaacaucaaggacuacagcaucgugagcagcuacgugugcagcggccuggugggcgacacccccagaaagaacgacagcagcagcagcagccacugccuggaccccaacaacgaggagggcggccacggcgugaagggcugggccuucgacgacggcaacgacguguggaugggcagaaccaucagcgagaagcugagaagcggcuacgagaccuucaaggugaucgagggcuggagcaaccccaacagcaagcugcagaccaacagacaggugaucguggacagaggcaacagaagcggcuacagcggcaucuucagcguggagggcaagagcugcaucaacagaugcuucuacguggagcugaucagaggcagaaaggaggagaccgaggugcuguggaccagcaacagcaucgugguguucugcggcaccagcggcaccuacggcaccggcagcuggcccgacggcgccgacaucgaccugaugcccaucuga

SEQ ID NO: 175423 - RNA, 1350 nt, Artificial Sequence
  derived and/or modified CDS sequence (opt4) from neuraminidase__InfluenzaA__ABI23981
augaaccccaaccagaagaucaucaccaucggcagcaucugcauggugaucggcaucgugagccugaugcugcagaucggcaacaugaucagcaucugggugagccacagcauccagaccggcaaccagagacaggccgagagcaucagcaacaccaaguuccugaccgagaaggccguggccagcgugacccuggccggcaacagcagccugugccccaucagcggcugggccguguacagcaaggacaacagcaucagaaucggcagcagaggcgacguguucgugaucagagagcccuucaucagcugcagccaccuggagugcagaaccuucuuccugacccagggcgcccugcugaacgacaagcacagcaacggcaccgugaaggacagaagccccuacagaacccugaugagcagccccgugggcgaggcccccagccccuacaacagcagauucgagagcguggccuggagcgccagcgccugccacgacggcaccagcuggcugaccaucggcaucagcggccccgacaacggcgccguggccgugcugaaguacaacggcaucaucaccgacaccaucaagagcuggagaaacaacauccugagaacccaggagagcgagugcgccugcgugaacggcagcugcuucaccgugaugaccgacggccccagcaacggccaggccagcuacaagaucuucaagauggagaagggcaagguggugaagagcguggagcuggacgcccccaacuaccacuacgaggagugcagcugcuaccccgacgccggcgagaucaccugcgugugcagagacaacuggcacggcagcaacagacccugggugagcuucaaccagaaccuggaguaccagaucggcuacaucugcagcggcguguucggcgacaaccccagacccaacgacggcaccggcagcugcggccccgugagccugaacggcgccuacggcgugaagggcuucagcuucaaguacggcaacggcguguggaucggcagaaccaagagcaccaacagcagaagcggcuucgagaugaucugggaccccaacggcuggaccggcaccgacagcagcuucagcgugaagcaggacaucguggccaucaccgacuggagcggcuacagcggcagcuucgugcagcaccccgagcugaccggccuggacugcaucagacccugcuucuggguggagcugaucagaggcagacccaaggagagcaccaucuggaccagcggcagcagcaucagcuucugcggcgugaacagcgacaccgugagcuggagcuggcccgacggcgccgagcugcccuucaccaucgacaaguga

SEQ ID NO: 175424 - RNA, 1410 nt, Artificial Sequence; identical to SEQ ID NO: 174387
  derived and/or modified CDS sequence (opt4) from neuraminidase__InfluenzaA__ABI26649

SEQ ID NO: 175425 - RNA, 1413 nt, Artificial Sequence; identical to SEQ ID NO: 175110
  derived and/or modified CDS sequence (opt4) from neuraminidase__InfluenzaA__ABI30370

SEQ ID NO: 175426 - RNA, 1410 nt, Artificial Sequence; identical to SEQ ID NO: 175161
  derived and/or modified CDS sequence (opt4) from neuraminidase__InfluenzaA__ABI30392

SEQ ID NO: 175427 - RNA, 1410 nt, Artificial Sequence; identical to SEQ ID NO: 174790
  derived and/or modified CDS sequence (opt4) from neuraminidase__InfluenzaA__ABI30403

SEQ ID NO: 175428 - RNA, 1410 nt, Artificial Sequence; identical to SEQ ID NO: 174790
  derived and/or modified CDS sequence (opt4) from neuraminidase__InfluenzaA__ABI30414

SEQ ID NO: 175429 - RNA, 1410 nt, Artificial Sequence; identical to SEQ ID NO: 174387
  derived and/or modified CDS sequence (opt4) from neuraminidase__InfluenzaA__ABI30425

SEQ ID NO: 175430 - RNA, 1410 nt, Artificial Sequence; identical to SEQ ID NO: 174387
  derived and/or modified CDS sequence (opt4) from neuraminidase__InfluenzaA__ABI30436

SEQ ID NO: 175431 - RNA, 1410 nt, Artificial Sequence; identical to SEQ ID NO: 174387
  derived and/or modified CDS sequence (opt4) from neuraminidase__InfluenzaA__ABI30447

SEQ ID NO: 175432 - RNA, 1410 nt, Artificial Sequence; identical to SEQ ID NO: 174387
  derived and/or modified CDS sequence (opt4) from neuraminidase__InfluenzaA__ABI30458

SEQ ID NO: 175433 - RNA, 1410 nt, Artificial Sequence; identical to SEQ ID NO: 174387
  derived and/or modified CDS sequence (opt4) from neuraminidase__InfluenzaA__ABI30469

SEQ ID NO: 175434 - RNA, 1410 nt, Artificial Sequence; identical to SEQ ID NO: 174387
  derived and/or modified CDS sequence (opt4) from neuraminidase__InfluenzaA__ABI30480

SEQ ID NO: 175435 - RNA, 1410 nt, Artificial Sequence
  derived and/or modified CDS sequence (opt4) from neuraminidase__InfluenzaA__ABI30491
augaaccccaaccagaagaucaucaccaucggcagcgugagccugaccaucagcaccaucugcuucuucaugcagaucgccauccugaucaccaccgugacccugcacuucaagcaguacgaguucaacagcccccccaacaaccaggugaugcugugcgagcccaccaucaucgagagaaacaucaccaagaucguguaccugaccaacaccaccaucgagaaggagaucugccccaagcuggccgaguacagaaacuggagcaagccccagugcgacaucaccggcuucgcccccuucagcaaggacaacagcaucagacugagcgccggcggcgacaucugggugaccagagagcccuacgugagcugcgaccccgacaagugcuaccaguucgcccugggccagggcaccacccugaacaacgugcacagcaacgacaccgugcacgacagaacccccuacagaacccugcugaugaacgagcugggcgugcccuuccaccugggcaccaagcaggugugcaucgccuggagcagcagcagcugccacgacggcaaggccuggcugcacgugugcgugaccggcgacgacaagaacgccaccgccagcuucaucuacaacggcagacugguggacagcaucgugagcuggagcaaggagauccugagaacccaggagagcgagugcgugugcaucaacggcaccugcaccguggugaugaccgacggcagcgccagcggcaaggccgacaccaagauccuguucaucgaggagggcaagaucgugcacaccagcacccugagcggcagcgcccagcacguggaggagugcagcugcuaccccagauaccccggcgugagaugcgugugcagagacaacuggaagggcagcaacagacccaucguggacaucaacaucaaggacuacagcaucgugagcagcuacgugugcagcggccuggugggcgacacccccagaaagaacgacagcagcagcagcagccacugccuggaccccaacaacgaggagggcggccacggcgugaagggcugggccuucgacgacggcaacgacguguggaugggcagaaccaucagcgagaagcugagaagcggcuacgagaccuucaaggugaucgagggcuggagcaaccccaacagcaagcugcagaucaacagacaggugaucguggacagaggcaacagaagcggcuacagcggcaucuucagcguggagggcaagagcugcaucaacagaugcuucuacguggagcugaucagaggcagaaaggaggagaccgaggugcuguggaccagcaacagcaucgugguguucugcggcaccagcggcaccuacggcaccggcagcuggcccgacggcgccgacaucaaccugaugcccaucuga

SEQ ID NO: 175436 - RNA, 1410 nt, Artificial Sequence; identical to SEQ ID NO: 174387
  derived and/or modified CDS sequence (opt4) from neuraminidase__InfluenzaA__ABI30502

SEQ ID NO: 175437 - RNA, 1410 nt, Artificial Sequence
  derived and/or modified CDS sequence (opt4) from neuraminidase__InfluenzaA__ABI30513
augaaccccaaccagaagaucaucaccaucggcagcgugagccugaccaucagcaccaucugcuucuucaugcagaucgccauccugaucaccaccgugacccugcacuucaagcaguacgaguucaacagcccccccaacaaccaggugaugcugugcgagcccaccaucaucgagagaaacaucaccgagaucguguaccugaccaacaccaccaucgagaaggagaucugccccaagcuggccgaguacagaaacuggagcaagccccagugcgacaucaccggcuucgcccccuucagcaaggacaacagcaucagacugagcgccggcggcgacaucugggugaccagagagcccuacgugagcugcgaccccgacaagugcuaccaguucgcccugggccagggcaccacccugaacaacgugcacagcaacgacaccgugcacgacagaacccccuacagaacccugcugaugaacgagcugggcgugcccuuccaccugggcaccaagcaggugugcaucgccuggagcagcagcagcugccacgacggcaaggccuggcugcacgugugcgugaccggcgacgacaagaacgccaccgccagcuucaucuacaacggcagacugguggacagcaucgugagcuggagcaaggagauccugagaacccaggagagcgagugcgugugcaucaacggcaccugcaccguggugaugaccgacggcagcgccagcggcaaggccgacaccaagauccuguucaucgaggagggcaagaucgugcacaccagcacccugagcggcagcgcccagcacguggaggagugcagcugcuaccccagauaccccggcgugagaugcgugugcagagacaacuggaagggcagcaacagacccaucguggacaucaacaucaaggacuacagcaucgugagcagcuacgugugcagcggccuggugggcgacacccccagaaagaacgacagcagcagcagcagccacugccuggaccccaacaacgaggagggcggccacggcgugaagggcugggccuucgacgacggcaacgacguguggaugggcagaaccaucagcgagaagcugagaagcggcuacgagaccuucaaggugaucgagggcuggagcaaccccaacagcaagcugcagaccaacagacaggugaucguggacagaggcaacagaagcggcuacagcggcaucuucagcguggagggcaagagcugcaucaacagaugcuucuacguggagcugaucagaggcagaaaggaggagaccgaggugcuguggaccagcaacagcaucgugguguucugcggcaccagcggcaccuacggcaccggcagcuggcccgacggcgccgacaucaaccugaugcccaucuga

SEQ ID NO: 175438 - RNA, 1410 nt, Artificial Sequence; identical to SEQ ID NO: 174387
  derived and/or modified CDS sequence (opt4) from neuraminidase__InfluenzaA__ABI30524

SEQ ID NO: 175439 - RNA, 1410 nt, Artificial Sequence; identical to SEQ ID NO: 174387
  derived and/or modified CDS sequence (opt4) from neuraminidase__InfluenzaA__ABI30535

SEQ ID NO: 175440 - RNA, 1410 nt, Artificial Sequence
  derived and/or modified CDS sequence (opt4) from neuraminidase__InfluenzaA__ABI30546
augaaccccaaccagaagaucaucaccaucggcagcgugagccugaccaucagcaccaucugcuucuucaugcagaucgccauccugaucaccaccgugacccugcacuucaagcaguacgaguucaacagcccccccaacaaccaggugaugcugugcgagcccaccaucaucgagagaaacaucaccgagaucguguaccugaccaacaccaccaucgagaaggagaucugccccaagcuggccgaguacagaaacuggagcaagccccagugcgacaucaccggcuucgcccccuucagcaaggacaacagcaucagacugagcgccggcggcgacaucugggugaccagagagcccuacgugagcugcgaccccgacaagugcuaccaguucgcccugggccagggcaccacccugaacaaccugcacagcaacgacaccgugcacgacagaacccccuacagaacccugcugaugagcgagcugggcgugcccuuccaccugggcaccaagcaggugugcaucgccuggagcagcagcagcugccacgacggcaaggccuggaugcacgugugcgugaccggcgacgacaagaacgccaccgccagcuucaucuacaacggcagacugguggacagcaucgugagcuggagcaaggagauccugagaacccaggagagcgagugcgugugcaucaacggcaccugcaccguggugaugaccgacggcagcgccagcggcaaggccgacaccaagauccuguucaucgaggagggcaagaucgugcacaccagcacccugagcggcagcgcccagcacguggaggagugcagcugcuaccccagauaccccggcgugagaugcgugugcagagacaacuggaagggcagcaacagacccaucguggacaucaacaucaaggacuacagcaucgugagcagcuacgugugcagcggccuggugggcgacacccccagaaagaacgacagcagcagcagcagccacugccuggaccccaacaacgaggagggcggccacggcgugaagggcugggccuucgacgacggcaacgacguguggaugggcagaaccaucagcgagaagcugagaagcggcuacgagaccuucaaggugaucgagggcuggagcaaccccaacagcaagcugcagaucaacagacaggugaucguggacagaggcaacagaagcggcuacagcggcaucuucagcguggagggcaagaacugcaucaacagaugcuucuacguggagcugaucagaggcagaaaggaggagaccgaggugcuguggaccagcaacagcaucgugguguucugcggcaccagcggcaccuacggcaccggcagcuggcccgacggcgccgacaucaaccugaugcccaucuga

SEQ ID NO: 175441 - RNA, 1410 nt, Artificial Sequence; identical to SEQ ID NO: 174387
  derived and/or modified CDS sequence (opt4) from neuraminidase__InfluenzaA__ABI30557

SEQ ID NO: 175442 - RNA, 1410 nt, Artificial Sequence; identical to SEQ ID NO: 174774
  derived and/or modified CDS sequence (opt4) from neuraminidase__InfluenzaA__ABI30579

SEQ ID NO: 175443 - RNA, 1410 nt, Artificial Sequence
  derived and/or modified CDS sequence (opt4) from neuraminidase__InfluenzaA__ABI30590
augaaccccaaccagaagaucaucaccaucggcagcgugagccugaccaucagcaccaucugcuucuucaugcagaucgccauccugaucaccaccgugacccugcacuucaagcaguacgaguucaacagcccccccaacaaccaggugaugcugugcgagcccaccaucaucgagagaaacaucaccgagaucguguaccugaccaacaccaccaucgagaaggagaucugccccaagcuggccgaguacagaaacuggagcaagccccagugcgacaucaccggcuucgcccccuucagcaaggacaacagcaucagacugagcgccggcggcgacaucugggugaccagagagcccuacgugagcugcgaccccgacaagugcuaccaguucgcccugggccagggcaccacccugaacaacgugcacagcaacgacaccgugcacgacagaacccccuacagaacccugcugaugaacgagcugggcgugcccuuccaccugggcaccaagcaggugugcaucgccuggagcagcagcagcugccacgacggcaaggccuggcugcacgugugcgugaccggcgacgacaagaacgccaccgccagcuucaucuacaacggcagacugguggacagcaucgugagcuggagcaagaagauccugagaacccaggagagcgagugcgugugcaucaacggcaccugcaccguggugaugaccgacggcagcgccagcggcaaggccgacaccaagauccuguucaucgaggagggcaagaucgugcacaccagcacccugagcggcagcgcccagcacguggaggagugcagcugcuaccccagauaccccggcgugagaugcgugugcagagacaacuggaagggcagcaacagacccaucguggacaucaacaucaaggacuacagcaucgugagcagcuacgugugcagcggccuggugggcgacacccccagaaagaacgacagcagcagcagcagccacugccuggaccccaacaacgaggagggcggccacggcgugaagggcugggccuucgacgacggcaacgacguguggaugggcagaaccaucagcgagaagcugagaagcggcuacgagaccuucaaggugaucgagggcuggagcaaccccaacagcaagcugcagaucaacagacaggugaucguggacagaggcaacagaagcggcuacagcggcaucuucagcguggagggcaagggcugcaucaacagaugcuucuacguggagcugaucagaggcagaaaggaggagaccgaggugcuguggaccagcaacagcaucgugguguucugcggcaccagcggcaccuacggcaccggcagcuggcccgacggcgccgacaucaaccugaugcccaucuga

SEQ ID NO: 175444 - RNA, 1410 nt, Artificial Sequence; identical to SEQ ID NO: 174867
  derived and/or modified CDS sequence (opt4) from neuraminidase__InfluenzaA__ABI30601

SEQ ID NO: 175445 - RNA, 1410 nt, Artificial Sequence
  derived and/or modified CDS sequence (opt4) from neuraminidase__InfluenzaA__ABI30612
augaaccccaaccagaagaucaucaccaucggcagcgugagccugaccaucagcaccaucugcuucuucaugcagaucgccauccugaucaccaccgugacccugcacuucaagcaguacgaguucaacagcccccccaacaaccaggugaugcugugcgagcccaccaucaucgagagaaacaucaccgagaucguguaccugaccaacaccaccaucgagaaggagaucugccccaagcuggccgaguacagaaacuggagcaagccccagugcaacaucaccggcuucgcccccuucagcaaggacaacagcaucagacugagcgccggcggcgacaucugggugaccagagagcccuacgugagcugcgaccccgacaagugcuaccaguucgcccugggccagggcaccacccugaacaacgugcacagcaacgacaccgugcacgacagaacccccuacagaacccugcugaugaacgagcugggcgugcccuuccaccugggcaccaagcaggugugcaucgccuggagcagcagcagcugccacgacggcaaggccuggcugcacgugugcgugaccggcgacgacaagaacgccaccgccagcuucaucuacaacggcagacugguggacagcaucgugagcuggagcaaggagauccugagaacccaggagagcgagugcgugugcaucaacggcaccugcaccguggugaugaccgacggcagcgccagcggcaaggccgacaccaagauccuguucaucgaggagggcaagaucauccacaccagcacccugagcggcagcgcccagcacguggaggagugcagcugcuaccccagauaccccggcgugagaugcgugugcagagacaacuggaagggcagcaacagacccaucguggacaucaacaucaaggacuacagcaucgugagcagcuacgugugcagcggccuggugggcgacacccccagaaagaacgacagcagcagcagcagccacugccuggaccccaacaacgaggagggcggccacggcgugaagggcugggccuucgacgacggcaacgacguguggaugggcagaaccaucagcgagaagcugagaagcggcuacgagaccuucaaggugaucgagggcuggagcaaccccaacagcaagcugcagaucaacagacaggugaucguggacagaggcaacagaagcggcuacagcggcaucuucagcguggagggcaagagcugcaucaacagaugcuucuacguggagcugaucagaggcagaaaggaggagaccgaggugcuguggaccagcaacagcaucgugguguucugcggcaccagcggcaccuacggcaccggcagcuggcccgacggcgccgacaucaaccugaugcccaucuga

SEQ ID NO: 175446 - RNA, 1410 nt, Artificial Sequence; identical to SEQ ID NO: 174867
  derived and/or modified CDS sequence (opt4) from neuraminidase__InfluenzaA__ABI30623

SEQ ID NO: 175447 - RNA, 1410 nt, Artificial Sequence
  derived and/or modified CDS sequence (opt4) from neuraminidase__InfluenzaA__ABI30736
augaaccccaaccagaagaucaucaccaucggcagcgugagccugaccaucagcaccaucugcuucuucaugcagaucgccauccugaucaccaccgugacccugcacuucaagcaguacgaguucaacagcccccccaacaaccaggugaugcugugcgagcccaccaucaucgagagaaacaucaccgagaucguguaccugaccaacaccaccaucgagaaggagaucugccccaagcuggccgaguacagaaacuggagcaagccccagugcgacaucaccggcuucgcccccuucagcaaggacaacagcaucagacugagcgccggcggcgacaucugggugaccagagagcccuacgugagcugcgaccccgacaagugcuaccaguucgcccugggccagggcaccacccugaacaacgugcacagcaacgacaccgugcacgacagaacccccuacagaacccugcugaugaacgagcugggcgugcccuuccaccugggcaccaagcaggugugcaucgccuggagcagcagcagcugccacgacggcaaggccuggcugcacgugugcgugaccggcgacgacaagaacgccaccgccagcuucaucuacaacggcagacugguggacagcaucgugagcuggagcaagaagauccugagaacccaggagagcgagugcgugugcaucaacggcaccugcaccguggugaugaccgacggcagcgccagcggcaaggccgacaccaagauccuguucaucgaggagggcaagaucgugcacaccagcacccugagcggcagcgcccagcacguggaggagugcagcugcuaccccagauaccccggcgugagaugcgugugcagagacaacuggaagggcagcaacagacccaucguggacaucaacaucaaggacuacagcguggugagcagcuacgugugcagcggccuggugggcgacacccccagaaagaacgacagcagcagcagcagccacugccuggaccccaacaacgaggagggcggccacggcgugaagggcugggccuucgacgacggcaacgacguguggaugggcagaaccaucagcgagaagcugagaagcggcuacgagaccuucaaggugaucgagggcuggagcaaccccaacagcaagcugcagaucaacagacaggugaucguggacagaggcaacagaagcggcuacagcggcaucuucagcguggagggcaagagcugcaucaacagaugcuucuacguggagcugaucagaggcagaaaggaggagaccgaggugcuguggaccagcaacagcaucgugguguucugcggcaccagcggcaccuacggcaccggcagcuggcccgacggcgccgacaucaaccugaugcccaucuga

SEQ ID NO: 175448 - RNA, 1410 nt, Artificial Sequence
  derived and/or modified CDS sequence (opt4) from neuraminidase__InfluenzaA__ABI30758
augaaccccaaccagaagaucaucaccaucggcagcgugagccugaccaucagcaccaucugcuucuucaugcagaucgccauccugaucaccaccgugacccugcacuucaagcaguacgaguucaacagcccccccaacaaccaggugaugcuguacgagcccaccaucaucgagagaaacaucaccgagaucguguaccugaccaacaccaccaucgagaaggagaucugccccaagcuggccgaguacagaaacuggagcaagccccagugcgacaucaccggcuucgcccccuucagcaaggacaacagcaucagacugagcgccggcggcgacaucugggugaccagagagcccuacgugagcugcgaccccgacaagugcuaccaguucgcccugggccagggcaccacccugaacaacgugcacagcaacgacaccgugcacgacagaacccccuacagaacccugcugaugaacgagcugggcgugcccuuccaccugggcaccaagcaggugugcaucgccuggagcagcagcagcugccacgacggcaaggccuggcugcacgugugcgugaccggcgacgacaagaacgccaccgccagcuucaucuacaacggcagacugguggacagcaucgugagcuggagcaagaagauccugagaacccaggagagcgagugcgugugcaucaacggcaccugcaccguggugaugaccgacggcagcgccagcggcaaggccgacaccaagauccuguucaucgaggagggcaagaucgugcacaccagcacccugagcggcagcgcccagcacguggaggagugcagcugcuaccccagauaccccggcgugagaugcgugugcagagacaacuggaagggcagcaacagacccaucguggacaucaacaucaaggacuacagcaucgugagcagcuacgugugcagcggccuggugggcgacacccccagaaagaacgacagcagcagcagcagccacugccuggaccccaacaacgaggagggcggccacggcgugaagggcugggccuucgacgacggcaacgacguguggaugggcagaaccaucagcgagaagcugagaagcggcuacgagaccuucaaggugaucgagggcuggagcaaccccaacagcaagcugcagaucaacagacaggugaucguggacagaggcaacagaagcggcuacagcggcaucuucagcguggagggcaagagcugcaucaacagaugcuucuacguggagcugaucagaggcagaaaggaggagaccgaggugcuguggaccagcaacagcaucgugguguucugcggcaccagcggcaccuacggcaccggcagcuggcccgacggcgccgacaucaaccugaugcccaucuga

SEQ ID NO: 175449 - RNA, 1410 nt, Artificial Sequence; identical to SEQ ID NO: 174774
  derived and/or modified CDS sequence (opt4) from neuraminidase__InfluenzaA__ABI30769

SEQ ID NO: 175450 - RNA, 1410 nt, Artificial Sequence; identical to SEQ ID NO: 174774
  derived and/or modified CDS sequence (opt4) from neuraminidase__InfluenzaA__ABI30780

SEQ ID NO: 175451 - RNA, 1410 nt, Artificial Sequence; identical to SEQ ID NO: 174774
  derived and/or modified CDS sequence (opt4) from neuraminidase__InfluenzaA__ABI30791

SEQ ID NO: 175452 - RNA, 1410 nt, Artificial Sequence; identical to SEQ ID NO: 174774
  derived and/or modified CDS sequence (opt4) from neuraminidase__InfluenzaA__ABI30802

SEQ ID NO: 175453 - RNA, 1410 nt, Artificial Sequence; identical to SEQ ID NO: 174774
  derived and/or modified CDS sequence (opt4) from neuraminidase__InfluenzaA__ABI30813

SEQ ID NO: 175454 - RNA, 1410 nt, Artificial Sequence; identical to SEQ ID NO: 174774
  derived and/or modified CDS sequence (opt4) from neuraminidase__InfluenzaA__ABI30824

SEQ ID NO: 175455 - RNA, 1410 nt, Artificial Sequence; identical to SEQ ID NO: 174774
  derived and/or modified CDS sequence (opt4) from neuraminidase__InfluenzaA__ABI30835

SEQ ID NO: 175456 - RNA, 1410 nt, Artificial Sequence; identical to SEQ ID NO: 174774
  derived and/or modified CDS sequence (opt4) from neuraminidase__InfluenzaA__ABI30846

SEQ ID NO: 175457 - RNA, 1410 nt, Artificial Sequence; identical to SEQ ID NO: 175245
  derived and/or modified CDS sequence (opt4) from neuraminidase__InfluenzaA__ABI30857

SEQ ID NO: 175458 - RNA, 1410 nt, Artificial Sequence; identical to SEQ ID NO: 175245
  derived and/or modified CDS sequence (opt4) from neuraminidase__InfluenzaA__ABI30868

SEQ ID NO: 175459 - RNA, 1350 nt, Artificial Sequence
  derived and/or modified CDS sequence (opt4) from neuraminidase__InfluenzaA__ABI36157
augaaccccaaccagaagaucaucaccaucggcagcaucugcauggccaucggcaccgugagccugaugcugcagaucggcaacaugaucagcaucugggugagccacagcauccagaccggcaaccagcaccaggccgagagcaucagcaacaccaacccccugaccgagaaggccguggccagcgugacccuggccggcaacagcagccugugccccaucagaggcugggccgugcacagcaaggacaacagcaucagaaucggcagcaagggcgacguguucgugaucagagagcccuucaucagcugcagccacagcgagugcagaaccuucuuccugacccagggcgcccugcugaacgacaagcacagcaacgagaccgugaaggacagaagcccccacagaacccugaugagcugccccgugggcgaggcccccagccccuacaacagcagauucgagagcguggccuggagcgccagcgccugccacgacggcaccagcuggcugaccaucggcaucagcggccccgacaacggcgccguggccgugcugaaguacaacggcaucaucaccgacaccaucaagagcuggagaaacaacauccugagaacccaggagagcgagugcgccugcgugaacggcagcugcuucaccgugaugaccgacggccccagcaacggccaggccagcuacaagaucuucaagauggagaagggcaagguggugaagagcguggagcuggacgcccccaacuaccacuacgaggagugcagcugcuaccccgacgccggcgagaucaccugcgugugcagagacaacuggcacggcagcaacagacccugggugagcuucaaccagaaccuggaguaccagaucggcuacaucugcagcggcguguucggcgacaaccccagacccaacgacggcaccggcagcugcggccccaugagcagcaacggcgccuacggcgugaagggcuucagcuucaaguacggcaacggcguguggaucggcagaaccaagagcaccaacagcagaagcggcuucgagaugaucugggaccccaacggcuggaccggcaccgacagcagcuucagcgugaagcaggacaucguggccaucaccgacuggagcggcuacagcggcagcuucgugcagcaccccgagcugaccggccuggacugcaucagacccugcuucuggguggagcugaucagaggcagacccaaggagagcaccaucuggaccagcggcagcagcaucagcuucugcggcgugaacagcgacaccgugagcuggagcuggcccgacggcgccgagcugcccuucaccaucgacaaguga

SEQ ID NO: 175460 - RNA, 1350 nt, Artificial Sequence; identical to SEQ ID NO: 175459
  derived and/or modified CDS sequence (opt4) from neuraminidase__InfluenzaA__ABI36168

SEQ ID NO: 175461 - RNA, 1350 nt, Artificial Sequence; identical to SEQ ID NO: 175459
  derived and/or modified CDS sequence (opt4) from neuraminidase__InfluenzaA__ABI36179

SEQ ID NO: 175462 - RNA, 1350 nt, Artificial Sequence; identical to SEQ ID NO: 175459
  derived and/or modified CDS sequence (opt4) from neuraminidase__InfluenzaA__ABI36189

SEQ ID NO: 175463 - RNA, 1350 nt, Artificial Sequence
  derived and/or modified CDS sequence (opt4) from neuraminidase__InfluenzaA__ABI36278
augaaccccaaccagaagaucaucaccaucggcagcaucugcauggugaucggcaucgugagccugaugcugcagaucggcaacaugaucagcaucugggugagccacagcauccagaagggcaaccagcaccaggccgagagcaucagcaacaccaacccccugaccgagaaggccguggccagcgugacccuggccggcaacagcagccugugccccaucagaggcugggccgugcacagcaaggacaacaacaucagaaucggcagcaagggcgacguguucgugaucagagagcccuucaucagcugcagccaccuggagugcagaaccuucuuccugacccagggcgcccugcugaacgacaagcacagcaacggcaccgugaaggacagaagcccccacagaacccugaugagcugccccgugggcgaggcccccagccccuacaacagcagauucgagagcguggccuggagcgccagcgccugccacgacggcaccagcuggcugaccaucggcaucagcggccccgacaacgaggccguggccgugcugaaguacaacggcaucaucaccgacaccaucaagagcuggagaaacaacauccugagaacccaggagagcgagugcgccugcgugaacggcagcugcuucaccgugaugaccgacggccccagcaacggccaggccagcuacaagaucuucaagauggagaagggcaagguggugaagagcguggagcuggacgcccccaacuaccacuacgaggagugcagcugcuaccccgacgccggcgagaucaccugcgugugcagagacaacuggcacggcagcaacagacccugggugagcuucaaccagaaccuggaguaccagaucggcuacaucugcagcggcguguucggcgacaaccccagacccaacgacggcaccggcagcugcggccccaugagccccaacggcgccuacggcgugaagggcuucagcuucaaguacggcaacggcguguggaucggcagaaccaagagcaccaacagcagaagcggcuucgagaugaucugggaccccaacggcuggaccggcaccgacagcagcuucagcgugaagcaggacaucguggccaucaccgacuggagcggcuacagcggcagcuucgugcagcaccccgagcugaccggccuggacugcaucagacccugcuucuggguggagcugaucagaggcagacccaaggagagcaccaucuggaccagcggcagcagcaucagcuucugcggcgugaacagcgacaccgugagcuggagcuggcccgacggcgccgagcugcccuucaccaucgacaaguga

SEQ ID NO: 175464 - RNA, 1350 nt, Artificial Sequence; identical to SEQ ID NO: 175463
  derived and/or modified CDS sequence (opt4) from neuraminidase__InfluenzaA__ABI36287

SEQ ID NO: 175465 - RNA, 1350 nt, Artificial Sequence; identical to SEQ ID NO: 175463
  derived and/or modified CDS sequence (opt4) from neuraminidase__InfluenzaA__ABI36298

SEQ ID NO: 175466 - RNA, 1350 nt, Artificial Sequence
  derived and/or modified CDS sequence (opt4) from neuraminidase__InfluenzaA__ABI36314
augaaccccaaccagaagaucaucaccaucggcagcaucugcauggugaucggcaucgugagccugaugcugcagaucggcaacaugaucagcaucugggugagccacagcauccagaccggcaaccagcaccaggccgagagcaucagcaacaccaacccccugaccgagaaggccguggccagcgugacccuggccggcaacagcagccugugccccaucagaggcugggccgugcacagcaaggacaacaacaucagaaucggcagcaagggcgacguguucgugaucagagagcccuucaucagcugcagccaccuggagugcagaaccuucuuccugacccagggcgcccugcugaacgacaagcacagcaacggcaccgugaaggacagaagcccccacagaacccugaugagcugccccgugggcgaggcccccagccccuacaacagcagauucgagagcguggccuggagcgccagcgccugccacgacggcaacagcuggcugaccaucggcaucagcggccccgacaacgaggccguggccgugcugaaguacaacggcaucaucaccgacaccaucaagagcuggagaaacaacauccugagaacccaggagagcgagugcgccugcgugaacggcagcugcuucaccgugaugaccgacggccccagcaacggccaggccagcuacaagaucuucaagauggagaagggcaagguggugaagagcguggagcuggacgcccccaacuaccacuacgaggagugcagcugcuaccccgacgccggcgagaucaccugcgugugcagagacaacuggcacggcagcaacagacccugggugagcuucaaccagaaccuggaguaccagaucggcuacaucugcagcggcguguucggcgacaaccccagacccaacgacggcaccggcagcugcggccccaugagccccaacggcgccuacggcgugaagggcuucagcuucaaguacggcaacggcguguggaucggcagaaccaagagcaccaacagcagaagcggcuucgagaugaucugggaccccaacggcuggaccggcaccgacagcagcuucagcgugaagcaggacaucguggccaucaccgacuggagcggcuacagcggcagcuucgugcagcaccccgagcugaccggccuggacugcaucagacccugcuucuggguggagcugaucagaggcagacccaaggagagcaccaucuggaccagcggcagcagcaucagcuucugcggcgugaacagcgacaccgugagcuggagcuggcccgacggcgccgagcugcccuucaccaucgacaaguga

SEQ ID NO: 175467 - RNA, 1350 nt, Artificial Sequence
  derived and/or modified CDS sequence (opt4) from neuraminidase__InfluenzaA__ABI36336
augaaccccaaccagaagaucaucaccaucggcagcaucugcauggugaucggcaucgugagccugaugcugcagaucggcaacaugaucagcaucugggugagccacagcgugcagaccggcaaccagcaccaggccgagagcaucagcaacaccaacccccugaccgagaaggccguggccagcgugacccuggccggcaacagcagccugugccccaucagaggcugggccgugcacagcaaggacaacaacaucagaaucggcagcaagggcgacguguucgugaucagagagcccuucaucagcugcagccaccuggagugcagaaccuucuuccugacccagggcgcccugcugaacgacaagcacagcaacggcaccgugaaggacagaagcccccacagaacccugaugagcugcccccugggcgaggcccccagccccuacaacagcagauucgagagcgugagcuggagcgccagcgccugccacgacggcaccagcuggcugaccaucggcaucagcggccccgacaacgaggccguggccgugcugaaguacaacggcaucaucaccgacaccaucaagagcuggagaaacaacauccugagaacccaggagagcgagugcgccugcgugaacggcagcugcuucaccgugaugaccgacggccccagcaacggccaggccagcuacaagaucuucaagauggagaagggcaagguggugaagagcguggagcuggacgcccccaacuaccacuacgaggagugcagcugcuaccccgacgccggcgagaucaccugcgugugcagagacaacuggcacggcagcaacagacccugggugagcuucaaccagaaccuggaguaccagaucggcuacaucugcagcggcguguucggcgacaaccccagacccaacgacggcaccggcagcugcggccccaugagccccaacggcgccuacggcgugaagggcuucagcuucaaguacggcaacggcguguggaucggcagaaccaagagcaccaacagcagaagcggcuucgagaugaucugggaccccaacggcuggaccggcaccgacagcagcuucagcgugaagcaggacaucguggccaucaccgacuggagcggcuacagcggcagcuucgugcagcaccccgagcugaccggccuggacugcaucagacccugcuucuggguggagcugaucagaggcagacccaaggagagcaccaucuggaccagcggcagcaucaucagcuucugcggcgugaacagcgacaccgugagcuggagcuggcccgacggcgccgagcugcccuucaccaucgacaaguga

SEQ ID NO: 175468 - RNA, 1350 nt, Artificial Sequence
  derived and/or modified CDS sequence (opt4) from neuraminidase__InfluenzaA__ABI36358
augaaccccaaccagaagaucaucaccaucggcagcaucugcauggugaucggcaucgugagccugaugcugcagaucggcaacaugaucagcaucugggugagccacagcgugcagaccggcaaccagcaccaggccgagagcaucagcaacaccaacccccugaccgagaaggccguggccagcgugacccuggccggcaacagcagccugugccccaucagaggcugggccgugcacagcaaggacaacaacaucagaaucggcagcaagggcgacguguucgugaucagagagcccuucaucagcugcagccaccuggagugcagaaccuucuuccugacccagggcgcccugcugaacgacaagcacagcaacggcaccgugaaggacagaagcccccacagaacccugaugagcugccccgugggcgaggcccccagccccuacaacagcagauucgagagcguggccuggagcgccagcgccugccacgacggcaccagcuggcugaccaucggcaucagcggccccgacaacgaggccguggccgugcugaaguacaacggcaucaucaccgacaccaucaagagcuggagaaacaacauccugagaacccaggagagcgagugcgccugcgugaacggcagcugcuucaccgugaugaccgacggccccagcaacggccaggccagcuacaagaucuucaagauggagaagggcaagguggugaagagcguggagcuggacgcccccaacuaccacuacgaggagugcagcugcuaccccgacgccggcgagaucaccugcgugugcagagacaacuggcacggcagcaacagacccugggugagcuucaaccagaaccuggaguaccagaucggcuacaucugcagcggcguguucggcgacaaccccagacccaacgacggcaccggcagcugcggccccaugagccccaacggcgccuacggcgugaagggcuucagcuucaaguacggcaacggcguguggaucggcagaaccaagagcaccaacagcagaagcggcuucgagaugaucugggaccccaacggcuggaccggcaccgacagcagcuucagcgugaagcaggacaucguggccaucaccgacuggagcggcuacagcggcagcuucgugcagcaccccgagcugaccggccuggacugcaucagacccugcuucuggguggagcugaucagaggcagacccaaggagagcaccaucuggaccagcggcagcagcaucagcuucugcggcgugaacagcgacaccgugagcuggagcuggcccgacggcgccgagcugcccuucaccaucgacaaguga

SEQ ID NO: 175469 - RNA, 1350 nt, Artificial Sequence; identical to SEQ ID NO: 175459
  derived and/or modified CDS sequence (opt4) from neuraminidase__InfluenzaA__ABI36369

SEQ ID NO: 175470 - RNA, 1350 nt, Artificial Sequence
  derived and/or modified CDS sequence (opt4) from neuraminidase__InfluenzaA__ABI36391
augaaccccaaccagaagaucaucaccaucggcagcaucugcauggugaucggcaucgugagccugaugcugcagaucggcaacaugaucagcaucugggugagccacagcacccagaagggcaaccagcaccaggccgagagcaucagcaacaccaacccccugaccgagaaggccguggccagcgugacccuggccggcaacagcagccugugccccaucagaggcugggccgugcacagcaaggacaacaacaucagaaucggcagcaagggcgacguguucgugaucagagagcccuucaucagcugcagccaccuggagugcagaaccuucuuccugacccagggcgcccugcugaacgacaagcacagcaacggcaccgugaaggacagaagcccccacagaacccugaugagcugccccgugggcgaggcccccagccccuacaacagcagauucgagagcguggccuggagcgccagcgccugccacgacggcaccagcuggcugaccaucggcaucagcggccccgacaacgaggccguggccgugcugaaguacaacggcaucaucaccgacaccaucaagagcuggagaaacaacauccugagaacccaggagagcgagugcgccugcgugaacggcagcugcuucaccgugaugaccgacggccccagcaacggccaggccagcuacaagaucuucaagauggagaagggcaagguggugaagagcguggagcuggacgcccccaacuaccacuacgaggagugcagcugcuaccccgacgccggcgagaucaccugcgugugcagagacaacuggcacggcagcaacagacccugggugagcuucaaccagaaccuggaguaccagaucggcuacaucugcagcggcaucuucggcgacaaccccagacccaacgacggcaccggcagcugcggccccauguuccccaacggcgccuacggcgugaagggcuucagcuucaaguacggcaacggcguguggaucggcagaaccaagagcaccaacagcagaagcggcuucgagaugaucugggaccccaacggcuggaccggcaccgacagcagcuucagcgugaagcaggacaucguggccaucaccgacuggagcggcuacagcggcagcuucgugcagcaccccgagcugaccggccuggacugcaucagacccugcuucuggguggagcugaucagaggcagacccaaggagagcaccaucuggaccagcggcagcagcaucagcuucugcggcgugaacagcgacaccgugagcuggagcuggcccgacggcgccgagcugcccuucaccaucgacaaguga

SEQ ID NO: 175471 - RNA, 1350 nt, Artificial Sequence; identical to SEQ ID NO: 175470
  derived and/or modified CDS sequence (opt4) from neuraminidase__InfluenzaA__ABI36402

SEQ ID NO: 175472 - RNA, 1350 nt, Artificial Sequence; identical to SEQ ID NO: 175459
  derived and/or modified CDS sequence (opt4) from neuraminidase__InfluenzaA__ABI36413

SEQ ID NO: 175473 - RNA, 1350 nt, Artificial Sequence
  derived and/or modified CDS sequence (opt4) from neuraminidase__InfluenzaA__ABI36446
augaaccccaaccagaagaucaucaccaucggcagcaucugcauggugaucggcaucgugagccugaugcugcagaucggcaacaugaucagcaucugggugagccacagcauccagaccggcaaccagcaccaggccgagagcaucagcaacaccaacccccugaccgagaaggccguggccagcgugacccuggccggcaacagcagccugugccccaucagaggcugggccgugcacagcaaggacaacaacaucagaaucggcagcaagggcgacguguucgugaucagagagcccuucaucagcugcagccaccuggagugcagaaccuucuuccugacccagggcgcccugcugaacgacaagcacagcaacggcaccgugaaggacagaagcccccacagaacccugaugagcugccccgugggcgaggcccccagccccuacaacagcagauucgagagcguggccuggagcgccagcgccugccacgacggcaccagcuggcugaccaucggcaucagcggccccgacaacgaggccguggccgugcugaaguacaacggcaucaucaccgacaccaucaagagcuggagaaacaacauccugagaacccaggagagcgagugcgccugcgugaacggcagcugcuucaccgugaugaccgacggccccagcaacggccaggccagcuacaagaucuucaagauggagaagggcaagguggugaagagcguggagcuggacgcccccaacuaccacuacgaggagugcagcugcuaccccgacgccggcgagaucaccugcgugugcagagacaacuggcacggcagcaacagacccuggaucagcuucaaccagaaccuggaguaccagaucggcuacaucugcagcggcguguucggcgacaaccccagacccaacgacggcaccggcagcugcggccccaugagccccaacggcgccuacggcgugaagggcuucagcuucaaguacggcaacggcguguggaucggcagaaccaagagcaccaacagcagaagcggcuucgagaugaucugggaccccaacggcuggaccggcaccgacagcagcuucagcgugaagcaggacaucguggccaucaccgacuggagcggcuacagcggcagcuucgugcagcaccccgagcugaccggccuggacugcaucagacccugcuucuggguggagcugaucagaggcagacccaaggagagcaccaucuggaccagcggcagcagcaucagcuucugcggcgugaacagcgacaccgugagcuggagcuggcccgacggcgccgagcugcccuucaccaucgacaaguga

SEQ ID NO: 175474 - RNA, 1350 nt, Artificial Sequence; identical to SEQ ID NO: 175463
  derived and/or modified CDS sequence (opt4) from neuraminidase__InfluenzaA__ABI36457

SEQ ID NO: 175475 - RNA, 1350 nt, Artificial Sequence
  derived and/or modified CDS sequence (opt4) from neuraminidase__InfluenzaA__ABI36476
augaaccccaaccagaagaucaucaccaucggcagcaucugcauggugaucggcaucgugagccugaugcugcagaucggcaacaugaucagcaucugggugagccacagcacccagaagggcaaccagcaccaggccgagagcaucagcaacaccaacccccugaccgagaaggccguggccagcgugacccuggccggcaacagcagccugugccccaucagaggcugggccgugcacagcaaggacaacaacaucagaaucggcagcaagggcgacguguucgugaucagagagcccuucaucagcugcagccaccuggagugcagaaccuucuuccugacccagggcgcccugcugaacgacaagcacagcaacggcaccgugaaggacagaagcccccacagaacccugaugagcugccccgugggcgaggcccccagccccuacaacagcagauucgagagcguggccuggagcgccagcgccugccacgacggcaccagcuggcugaccaucggcaucagcggccccgacaacgaggccguggccgugcugaaguacaacggcaucaucaccgacaccaucaagagcuggagaaacaacauccugagaacccaggagagcgagugcgccugcgugaacggcagcugcuucaccgugaugaccgacggccccagcaacggccaggccagcuacaagaucuucaagauggagaagggcaagguggugaagagcguggagcuggacgcccccaacuaccacuacgaggagugcagcugcuaccccgacgccggcgagaucaccugcgugugcagagacaacuggcacggcagcaacagacccugggugagcuucaaccagaaccuggaguaccagaucggcuacaucugcagcggcguguucggcgacaaccccagacccaacgacggcaccggcagcugcggccccaugagccccaacggcgccuacggcgugaagggcuucagcuucaaguacggcaacggcguguggaucggcagaaccaagagcaccaacagcagaagcggcuucgagaugaucugggaccccaacggcuggaccggcaccgacagcagcuucagcgugaagcaggacaucguggccaucaccgacuggagcggcuacagcggcagcuucgugcagcaccccgagcugaccggccuggacugcaucagacccugcuucuggguggagcugaucagaggcagacccaaggagagcaccaucuggaccagcggcagcagcaucagcuucugcggcgugaacagcgacaccgugagcuggagcuggcccgacggcgccgagcugcccuucaccaucgacaaguga

SEQ ID NO: 175476 - RNA, 1350 nt, Artificial Sequence
  derived and/or modified CDS sequence (opt4) from neuraminidase__InfluenzaA__ABI49409
augaaccccaacagaaagaucaucaccaucggcagcaucugcauggugaucggcauggugagccugaugcugcagaucggcaacaugaucagcaucugggugagccacagcauccagaccggcaaccagcaccaggccgagagcaucagcaacaccaacccccugaccgagaaggccguggccagcgugacccuggccggcaacagcagccugugccccaucagaggcugggccgugcacagcaaggacaacaacaucagaaucggcagcaagggcgacguguucgugaucagagagcccuucaucagcugcagccaccuggagugcagaaccuucuuccugacccagggcgcccugcugaacgacaagcacagcaacggcaccgugaaggacagaagcccccacagaacccugaugagcugccccgugggcgaggcccccagccccuacaacagcagauucgagagcguggccuggagcgccagcgccugccacgacggcaccagcuggcugaccaucggcaucagcggccccgacaacgaggccguggccgugcugaaguacaacggcaucaucaccgacaccaucaagagcuggagaaacaacauccugagaacccaggagagcgagugcgccugcgugaacggcagcugcuucaccgugaugaccgacggccccagcaacggccaggccagcuacaagaucuucaagauggagaagggcaagguggugaagagcguggagcugguggcccccaacuaccacuacgaggagugcagcugcuaccccgacgccggcgagaucaccugcgugugcagagacaacuggcacggcagcaacagacccugggugagcuucaaccagaaccuggaguaccagaucggcuacaucugcagcggcguguucggcgacaaccccagacccaacgacggcaccggcagcugcggccccaugagccccaacggcgccuacggcgugaagggcuucagcuucaaguacggcaacggcguguggaucggcagaaccaagagcaccaacagcagaagcggcuucgagaugaucugggaccccaacggcuggaccggcaccgacagcagcuucagcgugaagcaggacaucguggccaucaccgacuggagcggcuacagcggcagcuucgugcagcaccccgagcugaccggccuggacugcaucagacccugcuucuggguggagcugaucagaggcagacccaaggagagcaccaucuggaccagcggcagcagcaucagcuucugcggcgugaacagcgacaccgccagcuggagcuggcccgacggcgccgagcugcccuucaccaucgacaaguga

SEQ ID NO: 175477 - RNA, 1350 nt, Artificial Sequence
  derived and/or modified CDS sequence (opt4) from neuraminidase__InfluenzaA__ABI49417
augaaccccaaccagaagaucaucaccaucggcagcaucugcauggugaucggcaucgugagccugaugcugcagaucggcaacaugaucagcaucugggugagccacagcauccagaccggcaaccagcaccaggccgagagcaucagcaacaccaacccccugaccgagaaggccguggccagcgugacccuggccggcaacagcagccugugccccaucagaggcugggccgugcacagcaaggacaacaacaucagaaucggcagcaagggcgacguguucgugaucagagagcccuucaucagcugcagccaccuggagugcagaaccuucuuccugaccagaggcgcccugcugaacgacaagcacagcaacggcaccgugaaggacagaagcccccacagaacccugaugagcugccccgugggcgaggcccccagccccuacaacagcagauucgagagcguggccuggagcgccagcgccugccacgacggcaccagcuggcugaccaucggcaucagcggccccgacaacgaggccguggccgugcugaaguacaacggcaucaucaccgacaccaucaagagcuggagaaacaacauccugagaacccaggagagcgagugcgccugcgugaacggcagcugcuucaccgugaugaccgacggccccagcaacggccaggccagcuacaagaucuucaagauggagaagggcaagguggugaagagcguggagcuggacgcccccaacuaccacuacgaggagugcagcugcuaccccgacgccggcgagaucaccugcgugugcagagacaacuggcacggcagcaacagacccugggugagcuucaaccagaaccuggaguaccagaucggcuacaucugcagcggcguguucggcgacaaccccagacccaacgacggcaccggcagcugcggccccaugagccccaacggcgccuacggcgugaagggcuucagcuucaaguacggcaacggcguguggaucggcagaaccaagagcaccaacagcagaagcggcuucgagaugaucugggaccccaacggcuggaccggcaccgacagcagcuucagcgugaagcaggacaucguggccaucaccgacuggagcggcuacagcggcagcuucgugcagcaccccgagcugaccggccuggacugcaucagacccugcuucuggguggagcugaucagaggccagcccaaggagagcaccaucuggaccagcggcagcagcaucagcuucugcggcgugaacagcgacaccgugagcuggagcuggcccgacggcgccgagcugcccuucaccaucgacaaguga

SEQ ID NO: 175478 - RNA, 1410 nt, Artificial Sequence
  derived and/or modified CDS sequence (opt4) from neuraminidase__InfluenzaA__ABI84962
augaaccccaaccagaagaucaucaccaucggcagcgugagccugaccaucgccaccgugugcuuccugaugcagaucgccauccuggccaccaccgugacccugcacuucaagcagcacgagugcgacagccccgccagcaaccaggugaugcccugcgagcccaucaucaucgagagaaacaucaccgagaucguguaccugaacaacaccaccaucgagaaggagaucugccccgaggugguggaguacagaaacuggagcaagccccagugccagaucaccggcuucgcccccuucagcaaggacaacagcaucagacugagcgccggcggcgacaucugggugaccagagagcccuacgugagcugcgaccccggcaagugcuaccaguucgcccugggccagggcaccacccuggacaacaagcacagcaacggcaccauccacgacagaaucccccacagaacccugcugaugaacgagcugggcgugcccuuccaccugggcaccaagcaggugugcguggccuggagcagcagcagcugccacgacggcaaggccuggcugcacgugugcgugaccggcgacgacagaaacgccaccgccagcuucaucuacgacggcagacugguggacagcaucggcagcuggagccagaacauccugagaacccaggagagcgagugcgugugcaucaacggcaccugcaccguggugaugaccgacggcagcgccagcggcagagccgacaccagaauccuguucaucaaggagggcaagaucgugcacaucagcccccugagcggcagcgcccagcacaucgaggagugcagcugcuaccccagauaccccgacgugagaugcaucugcagagacaacuggaagggcagcaacagacccgugaucgacaucaacauggaggacuacagcaucgacagcagcuacgugugcagcggccuggugggcgacacccccagaaacgacgacagcagcagcaacagcaacugcagagaccccaacaacgagagaggcaaccccggcgugaagggcugggccuucgacaacggcgacgacguguggaugggcagaaccaucagcaaggacagcagaagcggcuacgagaccuucaaggugaucggcggcuggagcacccccaacagcaagagccaggugaacagacaggugaucguggacaacaacaacuggagcggcuacagcggcaucuucagcguggagggcaagagcugcaucaacagaugcuucuacguggagcugaucagaggcagaccccaggagaccagagugugguggaccagcaacagcaucgugguguucugcggcaccagcggcaccuacggcaccggcagcuggcccgacggcgccaacaucaacuucaugcccaucuga

SEQ ID NO: 175479 - RNA, 1410 nt, Artificial Sequence
  derived and/or modified CDS sequence (opt4) from neuraminidase__InfluenzaA__ABI85003
augaaccccaaccagaagaucaucaccaucggcguggugaacaccacccugagcaccaucgcccugcugaucggcgugggcaaccugguguucaacaccgugauccacgagaagaucggcgaccaccagaucgugacccaccccaccaucaugacccccgaggugcccaacugcagcgacaccaucaucaccuacaacaacaccgugaucaacaacaucaccaccaccaucaucaccgaggccgagagacccuucaagagcccccugccccugugccccuucagaggcuucuuccccuuccacaaggacaacgccaucagacugggcgagaacaaggacgugaucgugaccagagagcccuacgugagcugcgacaacgacaacugcuggagcuucgcccuggcccagggcgcccugcugggcaccaagcacagcaacggcaccaucaaggacagaacccccuacagaagccugaucagauuccccaucggcaccgcccccgugcugggcaacuacaaggagaucugcaucgccuggagcagcagcagcugcuucgacggcaaggaguggaugcacgugugcaugaccggcaacgacaacgacgccagcgcccagaucaucuacggcggcagaaugaccgacagcaucaagagcuggagaaaggacauccugagaacccaggagagcgagugccagugcaucgacggcaccugcgugguggccgugaccgacggccccgccgccaacagcgccgaccacagaguguacuggaucagagagggcagaaucaucaaguacgagaacgugcccaagaccaagauccagcaccuggaggagugcagcugcuacguggacaucgacguguacugcaucugcagagacaacuggaagggcagcaacagacccuggaugagaaucaacaacgagaccauccuggagaccggcuacgugugcagcaaguuccacagcgacacccccagacccgccgaccccagcaucaugagcugcgacagccccagcaacgugaacggcggccccggcgugaagggcuucggcuucaaggccggcaacgacguguggcugggcagaaccgugagcaccagcggcagaagcggcuucgagaucaucaaggugaccgagggcuggaucaacagccccaaccacgugaagagcaucacccagacccuggugagcaacaacgacuggagcggcuacagcggcagcuucaucgugaaggccaaggacugcuuccagcccugcuucuacguggagcugaucagaggcagacccaacaagaacgacgacgugagcuggaccagcaacagcaucgugaccuucugcggccuggacaacgagcccggcagcggcaacuggcccgacggcagcaacaucggcuucaugcccaaguga

SEQ ID NO: 175480 - RNA, 1410 nt, Artificial Sequence; identical to SEQ ID NO: 175150
  derived and/or modified CDS sequence (opt4) from neuraminidase__InfluenzaA__ABI92294

SEQ ID NO: 175481 - RNA, 1413 nt, Artificial Sequence
  derived and/or modified CDS sequence (opt4) from neuraminidase__InfluenzaA__ABI92305
augaaccccaaccagaagaucaucaccaucggcagcaucugcauggccaucggcaucaucagccugauccugcagaucggcaacaucaucagcaucugggugagccaccugauccagaccggcagccagaaccacaccggcaucugcaaccagagaaucaucaccuacgagaacagcaccugggugaaccagaccuacgugaacaucaacaacaccaacgugguggccggcaaggacaccaccagcgugacccuggccggcaacagcagccugugccccgugagaggcugggccaucuacagcaaggacaacagcaucagaaucggcagcaagggcgacguguucgugaucagagagcccuucaucagcugcagccaccuggagugcagaaccuucuuccugacccagggcgcccugcugaacgacaagcacagcaacggcaccgugaaggacagaagccccuacagagcccugaugagcugccccaucggcgaggcccccagccccuacaacagcagauucgagagcguggccuggagcgccagcgccugccacgacggcaugggcuggcugaccaucggcaucagcggccccgacgacggcgccguggccgugcugaaguacaacggcaucaucaccgagaccaucaagagcuggagaaagagaauccugagaacccaggagagcgagugcgugugcaucaacggcagcugcuucaccaucaugaccgacggccccagcaacggccccgccagcuacagaaucuucaagaucgagaagggcaagaucaccaagagcaucgagcuggacgcccccaacagccacuacgaggagugcagcugcuaccccgacaccggcaccgugaugugcgugugcagagacaacuggcacggcagcaacagacccugggugagcuucaaccagaaccuggacuaccagaucggcuacaucugcagcggcguguucggcgacaaccccagacccaaggacggcaagggcagcugcggccccgugaccguggacggcgccgacggcgugaagggcuucagcuacagauacggcaacggcguguggaucggcagaaccaagagcaacagcagcagaaagggcuucgagaugaucugggaccccaacggcuggaccgacaccgacagcaacuuccuggugaagcaggacgugguggccaugaccgacuggagcggcuacagcggcagcuucgugcagcaccccgagcugaccggccuggacugcaugagacccugcuucuggguggagcugaucagaggcagacccagagagaagaccaccaucuggaccagcggcagcagcaucagcuucugcggcgugaacagcgacaccgugaacuggagcuggcccgacggcgccgagcugcccuucaccaucgacaaguga

SEQ ID NO: 175482 - RNA, 1413 nt, Artificial Sequence
  derived and/or modified CDS sequence (opt4) from neuraminidase__InfluenzaA__ABI92316
augaaccccaaccagaagaucaucaccaucggcagcaucagcaucgccaucggcgugaucagccugauccugcagaucggcaacaucaucagcaucugggccagccacagcauccagaccggcagccagaaccacaccggcaucugcaaccagagaaucaucaccuacgagaacagcaccugggugaaccagaccuacgugaacaucaacaacaccaacgugguggccggcaaggacaagaccagcaugacccuggccggcaacagcagccugugccccaucagaggcugggccaucuacaccaaggacaacagcaucagaaucggcagcaagggcgacguguucgugaucagagagcccuucaucagcugcagccaccuggagugcagaaccuucuuccugacccagggcgcccugcugaacgacaagcacagcaacggcaccgugaaggacagaagccccuacagagcccugaugagcugcccccugggcgaggcccccagccccuacaacagcagauucgagagcguggccuggagcgccagcgccugccacgacggccugggcuggcugaccaucggcaucagcggccccgacaacggcgccguggccgugcugaaguacaacggcaucaucaccgagaccaucaagagcuggaagaagagaauccugagaacccaggagagcgagugcgugugcgugaacggcagcugcuucaccaucaugaccgacggccccagcaacggcgccgccagcuacagaaucuucaagaucgagaagggcagagugaccaagagcaucgagcuggacgcccccaacuaccacuacgaggagugcagcugcuaccccgacaccggcaccgugaugugcgugugcagagacaacuggcacggcagcaacagacccugggugagcuucaaccagaaccuggacuaccagaucggcuacaucugcagcggcguguucggcgacaaccccagacccaaggacggcgagggcagcugcaaccccgugaccguggacggcgccgacggcgugaagggcuucagcuacagauacggcaacggcguguggaucggcagaaccaagagcaacagacugagaaagggcuucgagaugaucugggaccccaacggcuggaccgacaccgacagcgacuucagcaugaagcaggacaucguggccaugaccgacuggagcggcuacagcggcagcuucgugcagcaccccgagcugaccggccuggacugcaugagacccugcuucuggguggagcuggugagaggccugcccagagagaacaccaccaucuggaccagcggcagcagcaucagcuucugcggcgugaacagcgacaccgccaacuggagcuggcccgacggcgccgagcugcccuucaccaucgacaaguga

SEQ ID NO: 175483 - RNA, 1410 nt, Artificial Sequence; identical to SEQ ID NO: 175161
  derived and/or modified CDS sequence (opt4) from neuraminidase__InfluenzaA__ABI92327

SEQ ID NO: 175484 - RNA, 1410 nt, Artificial Sequence
  derived and/or modified CDS sequence (opt4) from neuraminidase__InfluenzaA__ABI92338
augaaccccaaccagaagaucaucaccaucggcagcgugagccugaccaucgccaccaucugcuuccugaugcagaucgccauccuggugaccaccgugacccugcacuucaagcaguacgagugcaacagcccccccaacaaccaggugaugcugugcgagcccgccaucaucgagagaaacaucaccgagaucguguaccugaccaacaccaccaucgagaaggagaucugccccaagcuggccgaguacagaaacuggagcaagccccagugcaacaucaccggcuucgcccccuucagcaaggacaacagcaucagacugagcgccggcggcgacaucugggugaccagagagcccuacgugagcugcgaccccgacaagugcuaccaguucgcccugggccagggcaccacccugaacaacggccacagcaacgacaccgugcacgacagaacccccuacagaacccugcugaugaacgagcugggcgugcccuuccaccugggcaccagacaggugugcaucgccuggagcagcagcagcugccacgacggcaaggccuggcugcacgugugcgugaccggcgacgacgagaacgccaccgccagcuucaucuacaacggcagacugguggacagcaucggcagcuggagcaagaagauccugagaacccaggagagcgagugcgugugcaucaacggcaccugcaccguggugaugaccgacggcagcgccagcggcaaggccgacaccaagauccuguucaucgaggagggcaagaucgugaacaucagcacccugagcggcagcgcccagcacguggaggagugcagcugcuaccccagauaccccggcgugagaugcgugugcagagacaacuggaagggcagcaacagacccaucaucgacaucaacgugaaggacuacagcaucgugagcagcuacgugugcagcggccuggugggcgacacccccagaaagaacgacagcuucagcagcagccacugccuggaccccaacaacgaggagggcggccacggcgugaagggcugggccuucgacgacggcaacgacguguggaugggcagaaccaucagcgagaagcugagaagcggcuacgagaccuucaaggugaucgagggcuggagcaagcccaacagcaagcugcagaucaacagacaggugaucguggagagaggcaacagaagcggcuacagcggcaucuucagcguggagggcaagagcugcaucaacagaugcuucuacguggagcugaucagaggcagaaaggaggagaccgaggugugguggaccagcaacagcaucgugguguucugcggcaccagcggcaccuacggcaccggcagcuggcccgacggcgccgacaucaaccugaugcccaucuga

SEQ ID NO: 175485 - RNA, 1410 nt, Artificial Sequence
  derived and/or modified CDS sequence (opt4) from neuraminidase__InfluenzaA__ABI92349
augaaccccaaccagaagaucaucaccaucggcagcgugagccugaccaucgccaccaucugcuuccugaugcagaucgccauccuggugaccaccgugacccugcacuucaagcaguacgagugcaacagcccccccaacaaccaggugaugcugugcgagcccaccaucaucgagagaaacaucaccgagaucguguaccugaccaacaccaccaucgagaaggagaucugccccaagcuggccaaguacagaaacuggagcaagccccagugcaacaucaccggcuucgcccccuucagcaaggacaacagcaucagacugagcgccggcggcgacaucugggugaccagagagcccuacgugagcugcgaccccgacaagugcuaccaguucgcccugggccagggcaccacccugaacaacggccacagcaacgacaccgugcacgacagaacccccuacagaacccugcugaugaacgagcugggcgugcccuuccaccugggcaccagacaggugugcaucgccuggagcagcagcagcugccacgacggcaaggccuggcugcacgugugcgugaccggcgacgacgagaacgccaccgccagcuucaucuacaacggcagacugguggacagcaucggcagcuggagcaagaagauccugagaacccaggagagcgagugcgugugcaucaacggcaccugcaccguggugaugaccgacggcagcgccagcggcaaggccgacaccaagauccuguucaucgaggagggcaagaucgugcacaucagcacccugagcggcagcgcccagcacguggaggagugcagcugcuaccccagauaccccggcgugagaugcgugugcagagacaacuggaagggcagcaacagacccaucguggacaucaacgugaaggacuacagcaucgugagcagcuacgugugcagcggccuggugggcgacacccccagaaagaacgacagcuucagcagcagccacugccuggaccccaacaacgaggagggcggccacggcgugaagggcugggccuucgacgacggcaacgacguguggaucggcagaaccaucagcgagaagcugagaagcggcuacgagaccuucaaggugaucgagggcuggagcaagcccaacagcaagcugcagaccaacagacaggugaucguggagagaggcaacagaagcggcuacagcggcaucuucagcguggagggcaagagcugcaucaacagaugcuucuacguggagcugaucagaggcagaaaggaggagaccgaggugugguggaccagcaacagcaucgugguguucugcggcaccagcggcaccuacggcaccggcagcuggcccgacggcgccgacaucaaccugaugcccaucuga

SEQ ID NO: 175486 - RNA, 1410 nt, Artificial Sequence; identical to SEQ ID NO: 174387
  derived and/or modified CDS sequence (opt4) from neuraminidase__InfluenzaA__ABI92360

SEQ ID NO: 175487 - RNA, 1410 nt, Artificial Sequence; identical to SEQ ID NO: 174387
  derived and/or modified CDS sequence (opt4) from neuraminidase__InfluenzaA__ABI92371

SEQ ID NO: 175488 - RNA, 1413 nt, Artificial Sequence; identical to SEQ ID NO: 174446
  derived and/or modified CDS sequence (opt4) from neuraminidase__InfluenzaA__ABI92382

SEQ ID NO: 175489 - RNA, 1410 nt, Artificial Sequence; identical to SEQ ID NO: 174774
  derived and/or modified CDS sequence (opt4) from neuraminidase__InfluenzaA__ABI92393

SEQ ID NO: 175490 - RNA, 1410 nt, Artificial Sequence; identical to SEQ ID NO: 174387
  derived and/or modified CDS sequence (opt4) from neuraminidase__InfluenzaA__ABI92404

SEQ ID NO: 175491 - RNA, 1410 nt, Artificial Sequence
  derived and/or modified CDS sequence (opt4) from neuraminidase__InfluenzaA__ABI92415
augaaccccaaccagaagaucaucaccaucggcagcgugagccugaccaucagcaccaucugcuucuucaugcagaucgccauccugaucaccaccgugacccugcacuucaagcaguacgaguucaacagcccccccaacaaccaggugaugcugugcgagcccaccaucaucgagagaaacaucaccgagaucguguaccugaccaacaccaccaucgagaaggagaucugccccaagcuggccgaguacagaaacuggagcaagccccagugcgacaucaccggcuucgcccccuucagcaaggacaacagcaucagacugagcgccggcggcgacaucugggugaccagagagcccuacgugagcugcgaccccgacaagugcuaccaguucgcccugggccagggcaccacccugaacaacgugcacagcaacgacaccgugcacgacagaacccccuacagaacccugcugaugaacgagcugggcgugcccuuccaccugggcaccaagcaggugugcaucgccuggagcagcagcagcugccacgacggcaaggccuggcugcacgugugcgugaccggcgacgacaagaacgccaccgccagcuucaucuacaacggcagacugguggacagcaucgugagcuggagcaagaagauccugagaacccaggagagcgagugcgugugcaucaacggcaccugcaccguggugaugaccgacggcagcgccagcggcaaggccgacaccaagauccuguucaucgaggagggcaagaucgugcacaccagcacccugagcggcagcgcccagcacguggaggagugcagcugcuaccccagauaccccggcgugagaugcgugugcagagacaacuggaagggcagcaacagacccaucguggacaucaacaucaaggacuacagcaucgugagcagcuacgugugcagcggccuggugggcgacacccccagaaagaacgacagcagcagcagcagccacugccuggaccccaacaacgaggagggcggccacggcgugaagggcugggccuucgacgacggcaacgacguguggaugggcagaaccaucagcgagaagcugagaagcggcuacgagaccuucaaggugaucgagggcuggagcaaccccaacagcaagcugcagaucaacagacaggugaucguggacagaggcaacagaagcggcuacagcggcaucuucagcguggagggcaagagcugcaucaacagaugcuucuacguggagcugaucagaggcagaaaggaggagaccgaggugcuguggaccagcaacagcaucgugguguucugcggcaccagcggcaccuacggcaccggcagcuggcccgacggcgccgacaucaacuucaugcccaucuga

SEQ ID NO: 175492 - RNA, 1410 nt, Artificial Sequence; identical to SEQ ID NO: 174774
  derived and/or modified CDS sequence (opt4) from neuraminidase__InfluenzaA__ABI92426

SEQ ID NO: 175493 - RNA, 1410 nt, Artificial Sequence; identical to SEQ ID NO: 174774
  derived and/or modified CDS sequence (opt4) from neuraminidase__InfluenzaA__ABI92437

SEQ ID NO: 175494 - RNA, 1410 nt, Artificial Sequence; identical to SEQ ID NO: 174774
  derived and/or modified CDS sequence (opt4) from neuraminidase__InfluenzaA__ABI92448

SEQ ID NO: 175495 - RNA, 1410 nt, Artificial Sequence; identical to SEQ ID NO: 174774
  derived and/or modified CDS sequence (opt4) from neuraminidase__InfluenzaA__ABI92459

SEQ ID NO: 175496 - RNA, 1410 nt, Artificial Sequence
  derived and/or modified CDS sequence (opt4) from neuraminidase__InfluenzaA__ABI92470
augaaccccaaccagaagaucaucaccaucggcagcgugagccugaccaucgccaccaucugcuuccugaugcagaucgccauccuggugaccaccgugacccugcacuucaagcaguacgagugcaacagcccccccaacaaccaggugaugcugugcgagcccaccaucaucgagagaaacaucaccgagaucguguaccugaccaacaccaccaucgagaaggagaucugccccaagcuggccgaguacagaaacuggagcaagccccagugcaacaucaccggcuucgcccccuucagcaaggacaacagcaucagacugagcgccggcggcgacaucugggugaccagagagcccuacgugagcugcgaccccgacaagugcuaccaguucgcccugggccagggcaccacccugaacaacggccacagcaacgacaccgugcacgacagaacccccuacagaacccugcugaugaacgagcugggcgugcccuuccaccugggcaccaagcaggugugcaucgccuggagcagcagcagcugccacgacggcaaggccuggcugcacgugugcgugaccggcgacgacgagaacgccaccgccagcuucaucuacaacggcagacugguggacagcaucggcagcuggagcaagaagauccugagaacccaggagagcgagugcgugugcaucaacggcaccugcaccguggugaugaccgacggcagcgccagcgagaaggccgacaccaagauccuguucaucgaggagggcaagaucgugcacaccagcagccugagcggcagcgcccagcacguggaggagugcagcugcuaccccagauaccccggcgugagaugcgugugcagagacaacuggaagggcagcaacagacccaucguggacaucaacgugaaggacuacagcaucgugagcagcuacgugugcagcggccuggugggcgacacccccagaaagaacgacagcagcagcagcagccacugccuggaccccaacaacgaggagggcggccacggcgugaagggcugggccuucgacgacggcaacgacguguggaugggcagaaccaucagcgagaagcugagaagcggcuacgagaccuucaaggugaucgagggcuggagcaagcccaacagcaagcugcagaucaacagacaggugaucguggacagaggcaacagaagcggcuacagcggcaucuucagcguggagagcaagagcugcaucaacagaugcuucuacguggagcugaucagaggcagaaagcaggagaccgaggugcuguggaccagcaacagcaucgugguguucugcggcaccagcggcaccuacggcaccggcagcuggcccgacggcgccgacaucaaccugaugcccaucuga

SEQ ID NO: 175497 - RNA, 1410 nt, Artificial Sequence; identical to SEQ ID NO: 174790
  derived and/or modified CDS sequence (opt4) from neuraminidase__InfluenzaA__ABI92481

SEQ ID NO: 175498 - RNA, 1410 nt, Artificial Sequence; identical to SEQ ID NO: 174790
  derived and/or modified CDS sequence (opt4) from neuraminidase__InfluenzaA__ABI92492

SEQ ID NO: 175499 - RNA, 1410 nt, Artificial Sequence
  derived and/or modified CDS sequence (opt4) from neuraminidase__InfluenzaA__ABI92503
augaaccccaaccagaagaucaucaccaucggcagcgugagccugaccaucgccaccaucugcuuccugaugcagaucgccauccuggugaccaccgugacccugcacuucaagcaguacgagugcaacagcccccccaacaaccaggugaugcugugcgagcccaccaucaucgagagaaacaucaccgagaucguguaccugaccaacaccaccaucgagaaggagaucugccccaagcuggaggaguacagaaacuggagcaagccccagugcaacaucaccggcuucgcccccuucagcaaggacaacagcaucagacugagcgccggcggcgacaucugggugaccagagagcccuacgugagcugcgaccccgacaagugcuaccaguucgcccugggccagggcaccacccugaacaacggccacagcaacgacaccgugcacgacagaacccccuacagaacccugcugaugaacgagcugggcgugcccuuccaccugggcaccaagcaggugugcaucgccuggagcagcagcagcugccacgacggcaaggccuggcugcacgugugcgugaccggcgacgacgagaacgccaccgccagcuucaucuacaacggcagacugguggacagcaucggcagcuggagcaagaagauccugagaacccaggagagcgagugcgugugcaucaacggcaccugcaccguggugaugaccgacggcagcgccagcggcaaggccgacaccaagauccuguucaucgaggagggcaagaucgugcacaccagcagccugagcggcagcgcccagcacguggaggagugcagcugcuaccccagauaccccggcgugagaugcgugugcagagacaacuggaagggcagcaacagacccaucguggacaucaacgugaaggacuacagcaucgugagcagcuacgugugcagcggccuggugggcgacacccccagaaagaacgacagcagcagcagcagccacugccuggaccccaacaacgaggagggcggccacggcgugaagggcugggccuucgacgacggcaacgacguguggaugggcagaaccaucagcgagaagcugagaagcggcuacgagaccuucaaggugaucgagggcuggagcaagcccaacagcaagcugcagaucaacagacaggugaucguggacagaggcaacagaagcggcuacagcggcaucuucagcguggagagcaagagcugcaucaacagaugcuucuacguggagcugaucagaggcagaaagcaggagaccgaggugcuguggaccagcaacagcaucgugguguucugcggcaccagcggcaccuacggcaccggcagcuggcccgacggcgccgacaucaaccugaugcccaucuga

SEQ ID NO: 175500 - RNA, 1410 nt, Artificial Sequence
  derived and/or modified CDS sequence (opt4) from neuraminidase__InfluenzaA__ABI92514
augaaccccaaccagaagaucaucaccaucggcagcgugagccugaccaucgccaccaucugcuuccuggugcagaucgccauccuggugaccaccgugacccugcacuucaagcaguacgagugcaacagcccccccaacaaccaggugaugcugugcgagcccaccaucaucgagagaaacaucaccgagaucguguaccugaccaacaccaccaucgagaaggagaucugccccaagcuggccgaguacagaaacuggagcaagccccagugcaagaucaccggcuucgcccccuucagcaaggacaacagcaucagacugagcgccggcggcgacaucugggugaccagagagcccuacgugagcugcgaccccgacaagugcuaccaguucgcccugggccagggcaccacccugaacaacagacacagcaacgacaccgugcacgacagaacccccuacagaacccugcugaugaacgagcugggcgugcccuuccaccugggcaccaagcaggugugcaucgccuggagcagcagcagcugccacgacggcaaggccuggcugcacgugugcgugaccggcgacgacgagaacgccaccgccagcuucaucuacgacggcagacugguggacagcaucggcagcuggagcaagaagauccugagaacccaggagagcgagugcgugugcaucaacggcaccugcaccguggugaugaccgacggcagcgccagcggcagagccgacaccaagauccuguucaucgaggagggcaagaucgugcacaccagcaagcugagcggcagcgcccagcacguggaggagugcagcugcuaccccagauaccccggcgugagaugcgugugcagagacaacuggaagggcagcaacagacccaucguggacaucaacgugaaggacuacagcaucgugagcagcuacgugugcagcggccuggugggcgacacccccagaaagaacgacagcagcagcagcagccacugccuggaccccaacaacgaggagggcggccacggcgugaagggcugggccuucgacgacggcgacgacguguggaugggcagaaccaucagcgagaagagcagaagcggcuacgagaccuucaaggugaucgagggcuggagcaagcccaacagcaagcugcagaucaacagacaggugaucguggagagaggcaacaugagcggcuacagcggcaucuucagcguggagggcaagagcugcaucaacagaugcuucuacguggagcugaucagaggcagaaagcaggagaccgaggugugguggaccagcaacagcaucgugguguucugcggcaccagcggcaccuacggcaccggcagcuggcccgacggcgccgacaucaaccugaugcccaucuga

SEQ ID NO: 175501 - RNA, 1410 nt, Artificial Sequence
  derived and/or modified CDS sequence (opt4) from neuraminidase__InfluenzaA__ABI92525
augaaccccaaccagaagaucaucaccaucggcagcgugagccugaccaucgccaccaucugcuuccugaugcagaucgccauccuggugaccaccgugacccugcacuucaagcaguacgagugcaacagcccccccaacaaccaggugaugcugugcgagcccaccaucaucgagagaaacaucaccgagaucguguaccugaccaacaccaccaucgagaaggagaucugccccaagcuggccgaguacagaaacuggagcaagccccagugcaacaucaccggcuucgcccccuucagcaaggacaacagcaucagacugagcgccggcggcgacaucugggugaccagagagcccuacgugagcugcgaccccgacaagugcuaccaguucgcccugggccagggcaccacccugaacaacggccacagcaacgacaccgugcacgacagaacccccuacagaacccugcugaugaacgagcugggcgugcccuuccaccugggcaccaagcaggugugcaucgccuggagcagcagcagcugccacgacggcaaggccuggcugcacgugugcgugaccggcgacgacgagaacgccaccgccagcuucaucuacaacggcagacugguggacagcaucggcagcuggagcaagaagauccugagaacccaggagagcgagugcgugugcaucaacggcaccugcaccguggugaugaccgacggcagcgccagcggcaaggccgacaccaagauccuguucaucgaggagggcaagaucgugcacaucagcacccugagcggcagcgcccagcacguggaggagugcagcugcuaccccagauaccccggcgugagaugcgugugcagagacaacuggaagggcagcaacagacccaucguggacaucaacgugaaggacuacagcaucgugagcagcuacgugugcagcggccuggugggcgacacccccagaaagaacgacagcuucagcagcagccacugccuggaccccaacaacgaggagggcggccacggcgugaagggcugggccuucgacgacggcaacgacguguggaugggcagaaccaucagcgagaagcugagaagcggcuacgagaccuucaaggugaucgagggcuggagcaagcccaacagcaagcugcagaucaacagacaggugaucguggagagaggcaacagaagcggcuacagcggcaucuucagcguggagggcaagagcugcaucaacagaugcuucuacguggagcugaucagaggcagaaaggaggagaccgaggugugguggaccagcaacagcaucgugguguucugcggcaccagcggcaccuacggcaccggcagcuggcccgacggcgccgacaucaaccugaugcccaucuga

SEQ ID NO: 175502 - RNA, 1410 nt, Artificial Sequence
  derived and/or modified CDS sequence (opt4) from neuraminidase__InfluenzaA__ABI92536
augaaccccaaccagaagaucaucaccaucggcagcgugagccugaccaucgccaccaucugcuuccugaugcagaucgccauccuggugaccaccgugacccugcacuucaagcaguacgagugcaacagcccccccaacaaccaggugaugcugugcgagcccaccaucaucgagagaaacaucaccgagaucguguaccugaccaacaccaccaucgagaaggagaagugccccaagcuggccgaguacagaaacuggagcaagccccagugcaacaucaccggcuucgcccccuucagcaaggacaacagcaucagacugagcgccggcggcgacaucugggugaccagagagcccuacgugagcugcgaccccgacaagugcuaccaguucgcccugggccagggcaccacccugaacaacggccacagcaacgacaccgugcacgacagaacccccuacagaacccugcugaugaacgagcugggcgugcccuuccaccugggcaccagacaggugugcaucgccuggagcagcagcagcugccacgacggcaaggccuggcugcacgugugcgugaccggcgacgacgagaacgccaccgccagcuucaucuacaacggcagacugguggacagcaucggcagcuggagcaagaagauccugagaacccaggagagcgagugcgugugcaucaacggcaccugcaccguggugaugaccgacggcagcgccagcggcaaggccgacaccaagauccuguucaucgaggagggcaagaucgugcacaucagcacccugagcggcagcgcccagcacguggaggagugcagcugcuaccccagauaccccggcgugagaugcgugugcagagacaacuggaagggcagcaacagacccaucguggacaucaacgugaaggacuacagcaucgugagcagcuacgugugcagcggccuggugggcgacacccccagaaagaacgacagcuucagcagcagccacugccuggaccccaacaacgaggagggcggccacggcgugaagggcugggccuucgacgacggcaacgacguguggaugggcagaaccaucagcgagaagcugagaagcggcuacgagaccuucaaggugaucgagggcuggagcaagcccaacagcaagcugcagaucaacagacaggugaucguggagagaggcaacagaagcggcuacagcggcaucuucagcguggagggcaagagcugcaucaacagaugcuucuacguggagcugaucagaggcagaaaggaggagaccgaggugugguggaccagcaacagcaucgugguguucugcggcaccagcggcaccuacggcgccggcagcuggcccgacggcgccgacaucaaccugaugcccaucuga

SEQ ID NO: 175503 - RNA, 1410 nt, Artificial Sequence
  derived and/or modified CDS sequence (opt4) from neuraminidase__InfluenzaA__ABI92547
augaaccccaaccagaagaucaucaccaucggcagcgugagccugaccaucgccaccaucugcuuccugaugcagaucgccauccuggugaccaccgugacccugcacuucaagcaguacgagugcaacagcccccccaacaaccaggugaugcugugcgagcccaccaucaucgagagaaacaucaccgagaucguguaccugaccaacaccaccaucgagaaggagaugugccccaagcuggccgaguacagaaacuggagcaagccccagugcaacaucaccggcuucgcccccuucagcaaggacaacagcaucagacugagcgccggcggcgacaucugggugaccagagagcccuacgugagcugcgaccccgacaagugcuaccaguucgcccugggccagggcaccacccugaacaacggccacagcaacgacaccgugcacgacagaacccccuacagaacccugcugaugaacgagcugggcgugcccuuccaccugggcaccagacaggugugcaucgccuggagcagcagcagcugccacgacggcaaggccuggcugcacgugugcgugaccggcgacgacgagaacgccaccgccagcuucaucuacaacggcagacugguggacagcaucggcagcuggagcaagaagauccugagaacccaggagagcgagugcgugugcaucaacggcaccugcaccguggugaugaccgacggcagcgccagcggcaaggccgacaccaagauccuguucaucgaggagggcaagaucgugcacaucagcacccugagcggcagcgcccagcacguggaggagugcagcugcuaccccagauaccccggcgugagaugcgugugcagagacaacuggaagggcagcaacagacccaucguggacaucaacgugaaggacuacagcaucgugagcagcuacgugugcagcggccuggugggcgacacccccagaaagaacgacagcuucagcagcagccacugccuggaccccaacaacgaggagggcggccacggcgugaagggcugggccuucgacgacggcaacgacguguggaugggcagaaccaucagcgagaagcugagaagcggcuacgagaccuucaaggugaucgagggcuggagcaagcccaacagcaagcugcagaucaacagacaggugaucguggagagaggcaacagaagcggcuacagcggcaucuucagcguggagggcaagagcugcaucaacagaugcuucuacguggagcugaucagaggcagaaaggaggagaccgaggugugguggaccagcaacagcaucgugguguucugcggcaccagcggcaccuacggcgccggcagcuggcccgacggcgccgacaucaaccugaugcccaucuga

SEQ ID NO: 175504 - RNA, 1410 nt, Artificial Sequence
  derived and/or modified CDS sequence (opt4) from neuraminidase__InfluenzaA__ABI92558
augaaccccaaccagaagaucaucaccaucggcagcgugagccugaccaucgccaccaucugcuuccugaugcagaucgccauccuggugaccaccgugacccugcacuucaagcaguacgagugcaacagcccccccaacaaccaggugaugcugugcgagcccaccaucaucgagagaaacaucaccgagaucguguaccugaccaacaccaccaucgagaaggagaucugccccaagcuggccgaguacagaaacuggagcagaccccagugcaacaucaccggcuucgcccccuucagcaaggacaacagcaucagacugagcgccggcggcgacaucugggugaccagagagcccuacgugagcugcgaccccgacaagugcuaccaguucgcccugggccagggcaccacccugaacaacggccacagcaacgacaccgugcacgacagaacccccuacagaacccugcugaugaacgagcugggcgugcccuuccaccugggcaccagacaggugugcaucgccuggagcagcagcagcugccacgacggcaaggccuggcugcacgugugcgugaccggcgacgacgagaacgccaccgccagcuucaucuacaacggcagacugguggacagcaucggcagcuggagcaagaagauccugagaacccaggagagcgagugcgugugcaucaacggcaccugcaccguggugaugaccgacggcagcgccagcggcaaggccgacaccaagauccuguucaucgaggagggcaagaucgugcacaucagcacccugagcggcagcgcccagcacguggaggagugcagcugcuaccccagauaccccggcgugagaugcgugugcagagacaacuggaagggcagcaacagacccaucguggacaucaacgugaaggacuacagcaucgugagcagcuacgugugcagcggccuggugggcgacacccccagaaagaacgacagcuucagcagcagccacugccuggaccccaacaacgaggagggcggccacggcgugaagggcugggccuucgacgacggcaacgacguguggaugggcagaaccaucagcgagaagcugagaagcggcuacgagaccuucaaggugaucgagggcuggagcaagcccaacagcaagcugcagaucaacagacaggugaucguggagagaggcaacagaagcggcuacagcggcaucuucagcguggagggcaagagcugcaucaacagaugcuucuacguggagcugaucagaggcagaaaggaggagaccgaggugugguggaccagcaacagcaucgugguguucugcggcaccagcggcaccuacggcaccggcagcuggcccgacggcgccgacaucaaccugaugcccaucuga

SEQ ID NO: 175505 - RNA, 1410 nt, Artificial Sequence
  derived and/or modified CDS sequence (opt4) from neuraminidase__InfluenzaA__ABI92569
augaaccccaaccagaagaucaucaccaucggcagcgugagccugaccaucgccaccaucugcuuccugaugcagaucgccauccuggugaccaccgugacccugcacuucaagcaguacgagugcaacagcccccccaacaaccaggugaugcugugcgagcccaccaucaucgagagaaacaucaccgagaucguguaccugaccaacaccaccaucgagaaggagaucugccccaagcuggccgaguacagaaacuggagcaagccccagugcaacaucaccggcuucgcccccuucagcaaggacaacagcaucagacugagcgccggcggcgacaucugggugaccagagagcccuacgugagcugcgaccccgacaagugcuaccaguucgcccugggccagggcaccacccugaacaacggccacagcaacgacaccgugcacgacagaacccccuacagaacccugcugaugaacgagcugggcgugcccuuccaccugggcaccagacaggugugcaucgccuggagcagcagcagcugccacgacggcaaggccuggcugcacgugugcgugaccggcgacgacgagaacgccaccgccagcuucaucuacaacggcaagcugguggacagcaucggcagcuggagcaagaagauccugagaacccaggagagcgagugcgugugcaucaacggcaccugcgccguggugaugaccgacggcagcgccagcggcaaggccgacaccaagauccuguucaucgaggagggcaagaucgugcacaucagcacccugagcggcagcgcccagcacguggaggagugcagcugcuaccccagauaccccggcgugagaugcgugugcagagacaacuggaagggcagcaacagacccaucguggacaucaacgugaaggacuacagcaucgugagcagcuacgugugcagcggccuggugggcgacacccccagaaagaacgacagcuucagcagcagccacugccuggaccccaacaacgaggagggcggccacggcgugaagggcugggccuucgacgacggcaacgacguguggaugggcagaaccaucagcgagaagcugagaagcggcuacgagaccuucaaggugaucgagggcuggagcaagcccaacagcaagcugcagaccaacagacaggugaucguggagagaggcaacagaagcggcuacagcggcaucuucagcguggagggcaagagcugcaucaacagaugcuucuacguggagcugaucagaggcagaaaggaggagaccgaggugugguggaccagcaacagcaucgugguguucugcggcaccagcggcaccuacggcaccggcagcuggcccgacggcgccgacaucaaccugaugcccaucuga

SEQ ID NO: 175506 - RNA, 1410 nt, Artificial Sequence
  derived and/or modified CDS sequence (opt4) from neuraminidase__InfluenzaA__ABI92580
augaaccccaaccagaagaucaucaccaucggcagcgugagccugaccaucgccaccaucugcuuccugaugcagaucgccauccuggugaccaccgugacccugcacuucaagcaguacgagugcaacagcccccccaacaacaaggugaugcugugcgagcccaccaucaucgagagaaacaucaccgagaucguguaccugaccaacaccaccaucgagaaggagaucugccccaagcuggccgaguacagaaacuggagcaagccccagugcaacaucaccggcuucgcccccuucagcaaggacaacagcaucagacugagcgccggcggcgacaucugggugaccagagagcccuacgugagcugcgaccccgacaagugcuaccaguucgcccugggccagggcaccacccugaacaacggccacagcaacgacaccgugcacgacagaacccccuacagaacccugcugaugaacgagcugggcgugcccuuccaccugggcaccagacaggugugcaucgccuggagcagcagcagcugccacgacggcaaggccuggcugcacgugugcgugaccggcgacgacgagaacgccaccgccagcuucaucuacaacggcagacugguggacagcaucggcagcuggagcaagaagauccugagaacccaggagagcgagugcgugugcaucaacggcaccugcaccguggugaugaccgacggcagcgccagcggcaaggccgacaccaagauccuguucaucgaggagggcaagaucgugcacaucagcacccugagcggcagcgcccagcacguggaggagugcagcugcuaccccagauaccccggcgugagaugcgugugcagagacaacuggaagggcagcaacagacccaucguggacaucaacgugaaggacuacagcaucgugagcagcuacgugugcagcggccuggugggcgacacccccagaaagaacgacagcuucagcagcagccacugccuggaccccaacaacgaggagggcggccacggcgugaagggcugggccuucgacgacggcaacgacguguggaugggcagaaccaucagcgagaagcugagaagcggcuacgagaccuucaaggugaucgagggcuggagcaagcccaacagcaagcugcagaucaacagacaggugaucguggagagaggcaacagaagcggcuacagcggcaucuucagcguggagggcaagggcugcaucaacagaugcuucuacguggagcugaucagaggcagaaaggaggagaccgaggugugguggaccagcaacagcaucgugguguucugcggcaccagcggcaccuacggcaccggcagcuggcccgacggcgccgacaucaaccugaugcccaucuga

SEQ ID NO: 175507 - RNA, 1410 nt, Artificial Sequence
  derived and/or modified CDS sequence (opt4) from neuraminidase__InfluenzaA__ABI92591
augaaccccaaccagaagaucaucaccaucggcagcgugagccugaccaucgccaccaucugcuuccugaugcagaucgccauccuggugaccaccgugacccugcacuucaagcaguacgagugcaacagcccccccaacaaccaggugaugcugugcgagcccaccaucaucgagagaaacaucaccgagaucguguaccugaccaacaccaccaucgagaaggagaucugccccaagcuggccgaguacagaaacuggagcaagccccagugcaacaucaccggcuucgcccccuucagcaaggacaacagcaucagacugagcgccggcggcgacaucugggugaccagagagcccuacgugagcugcgaccccgacaagugcuaccaguucgcccugggccagggcaccacccugaacaacggccacagcaacgacaccgugcacgacagaacccccuacagaacccugcugaugaacgagcugggcgugcccuuccaccugagaaccagacaggugugcaucgccuggagcagcagcagcugccacgacggcaaggccuggcugcacgugugcgugaccggcgacgacgagaacgccaccgccagcuucaucuacaacggcagacugguggacagcaucggcagcuggagcaagaagauccugagaacccaggagagcgagugcgugugcaucaacggcaccugcaccguggugaugaccgacggcagcgccagcggcaaggccgacaccaagauccuguucaucgaggagggcaagaucgugcacaucagcacccugagcggcagcgcccagcacguggaggagugcagcugcuaccccagauaccccggcgugagaugcgugugcagagacaacuggaagggcagcaacagacccaucguggacaucaacgugaaggacuacagcaucgugagcagcuacgugugcagcggccuggugggcgacacccccagaaagaacgacagccugagcagcagccacugccuggaccccaacaacgaggagggcggccacggcgugaagggcugggccuucgacgacggcaacgacguguggaugggcagaaccaucagcgagaagcugagaagcggcuacgagaccuucaaggugaucgagggcuggagcaagcccaacagcaagcugcagaucaacagacaggugaucguggagagaggcaacagaagcggcuacagcggcaucuucagcguggagggcaagggcugcaucaacagaugcuucuacguggagcugaucagaggcagaaaggaggagaccgaggugugguggaccagcaacagcaucgugguguucugcggcaccagcggcaccuacggcaccggcagcuggcccgacggcgccgacaucaaccugaugcccaucuga

SEQ ID NO: 175508 - RNA, 1410 nt, Artificial Sequence
  derived and/or modified CDS sequence (opt4) from neuraminidase__InfluenzaA__ABI92602
augaaccccaaccagaagaucaucaccaucggcagcgugagccugaccaucgccaccaucugcuuccugaugcagaucgccauccuggugaccaccgugacccugcacuucaagcaguacgagugcaacagcccccccaacaaccaggugaugcugugcgagcccaccaucaucgagagaaacaucaccgagaucguguaccugaccaacaccaccaucgagaaggagaucugccccaagcuggccgaguacagaaacuggagcaagccccagugcaacaucaccggcuucgcccccuucagcaaggacaacagcaucagacugagcgccggcggcgacaucugggugaccagagagcccuacgugagcugcgaccccgacaagugcuaccaguucgcccugggccagggcaccacccugaacaacggccacagcaacgacaccgugcacgacagaacccccuacagaacccugcugaugaacgagcugggcgugcccuuccaccugggcaccagacaggugugcaucgccuggagcagcagcagcugccacgacggcaaggccuggcugcacgugugcgugaccggcgacgacgagaacgccaccgccagccugaucuacaacggcagacugguggacagcaucggcagcuggagcaagaagauccugagaacccaggagagcgagugcgugugcaucaacggcaccugcaccguggugaugaccgacggcagcgccagcggcaaggccgacaccaagauccuguucaucgaggagggcaagaucgugcacaucagcacccugagcggcagcgcccagcacguggaggagugcagcugcuaccccagauaccccggcgugagaugcgugugcagagacaacuggaagggcagcaacagacccaucguggacaucaacgugaaggacuacagcaucgugagcagcuacgugugcagcggccuggugggcgacacccccagaaagaacgacagcuucagcagcagccacugccuggaccccaacaacgaggagggcggccacggcgugaagggcugggccuucgacgacggcaacgacguguggaugggcagaaccaucagcgagaagcugagaagcggcuacgagaccuucaaggugaucgagggcuggagcaagcccaacagcaagcugcaggugaacagacaggugaucguggagagaggcaacagaagcggcuacagcggcaucuucagcguggagggcaagagcugcaucaacagaugcuucuacguggagcugaucagaggcagaaaggaggagaccgaggugugguggaccagcaacagcaucgugguguucugcggcaccagcggcaccuacggcaccggcagcuggcccgacggcgccgacaucaaccugaugcccaucuga

SEQ ID NO: 175509 - RNA, 1410 nt, Artificial Sequence
  derived and/or modified CDS sequence (opt4) from neuraminidase__InfluenzaA__ABI92613
augaaccccaaccagaagaucaucaccaucggcagcgugagccugaccaucgccaccaucugcuuccugaugcagaucgccauccuggugaccaccgugacccugcacuucaagcaguacgagugcaacagcccccccaacaaccaggugaugcugugcgagcccaccaucaucgagagaaacaucaccgagaucguguaccugaccaacaccaccaucgagaaggagaucugccccaagcuggccgaguacagaaacuggagcaagccccagugcaacaucaccggcuucgcccccuucagcaaggacaacagcaucagacugagcgccggcggcgacaucugggugaccagagagcccuacgugagcugcgaccccgacaagugcuaccaguucgcccugggccagggcaccacccugaacaacggccacagcaacgacaccgugcacgacagaacccccuacagaacccugcugaugaacgagcugggcgugcccuuccaccugggcaccagacaggugugcaucgccuggagcagcagcagcugccacgacggcaaggccuggcugcacgugugcgugaccggcgacaacgagaacgccaccgccagcuucaucuacaacggcaagcugguggacagcaucggcagcuggagcaagaagauccugagaacccaggagagcgagugcgugugcaucaacggcaccugcgccguggugaugaccgacggcagcgccagcggcaaggccgacaccaagauccuguucaucgaggagggcaagaucgugcacaucagcacccugagcggcagcgcccagcacguggaggagugcagcugcuaccccagauaccccggcgugagaugcgugugcagagacaacuggaagggcagcaacagacccaucguggacaucaacgugaaggacuacagcaucgugagcagcuacgugugcagcggccuggugggcgacacccccagaaagaacgacagcuucagcagcagccacugccuggaccccaacaacgaggagggcggccacggcgugaagggcugggccuucgacgacggcaacgacguguggaugggcagaaccaucagcgagaagcugagaagcggcuacgagaccuucaaggugaucgagggcuggagcaagcccaacagcaagcugcagaccaacagacaggugaucguggagagaggcaacagaagcggcuacagcggcaucuucagcguggagggcaagagcugcaucaacagaugcuucuacguggagcugaucagaggcagaaaggaggagaccgaggugugguggaccagcaacagcaucgugguguucugcggcaccagcggcaccuacggcaccggcagcuggcccgacggcgccgacaucaaccugaugcccaucuga

SEQ ID NO: 175510 - RNA, 1410 nt, Artificial Sequence
  derived and/or modified CDS sequence (opt4) from neuraminidase__InfluenzaA__ABI92624
augaaccccaaccagaagaucaucaccaucggcagcgugagccugaccaucgccaccaucugcuuccugaugcagaucgccauccuggugaccaccgugacccugcacuucaagcaguacgagugcaacagcccccccaacaaccaggugaugcugugcgagcccaccaucaucgagagaaacaucaccgagaucguguaccugaccaacaccaccaucgagaaggagaucugccccaagcuggccgaguacagaaacuggagcaagccccagugcaacaucaccggcuucgcccccuucagcaaggacaacagcaucagacugagcgccggcggcgacaucugggugaucagagagcccuacgugagcugcgaccccgacaagugcuaccaguucgcccugggccagggcaccacccugaacaacggccacagcaacgacaccgugcacgacagaacccccuacagaacccugcugaugaacgagcugggcgugcccuuccaccugggcaccagacaggugugcaucgccuggagcagcagcagcugccacgacggcaaggccuggcugcacgugugcgugaccggcgacgacgagaacgccaccgccagcuucaucuacaacggcagacugguggacagcaucggcagcuggagcaagaagauccugagaacccaggagagcgagugcgugugcaucaacggcaccugcaccguggugaugaccgacggcagcgccagcggcaaggccgacaccaagauccuguucaucgaggagggcaagaucgugcacaucagcacccugagcggcagcgcccagcacguggaggagugcagcugcuaccccagauaccccggcgugagaugcgugugcagagacaacuggaagggcagcaacagacccaucguggacaucaacgugaaggaccacagcaucgugagcagcuacgugugcagcggccuggugggcgacacccccagaaagaacgacagcuucagcagcagccacugccuggaccccaacaacgaggagggcggccacggcgugaagggcugggccuucgacgacggcaacgacguguggaugggcagaaccaucagcgagaagcugagaagcggcuacgagaccuucaaggugaucgagggcuggagcaagcccaacagcaagcugcagaucaacagacaggugaucguggagagaggcaacagaagcggcuacagcggcaucuucagcguggagggcaagagcugcaucaacagaugcuucuacguggagcugaucagaggcagaaaggaggagaccgaggugugguggaccagcaacagcaucgugguguucugcggcaccagcggcaccuacggcaccggcagcuggcccgacggcgccgacaucaaccugaugcccaucuga

SEQ ID NO: 175511 - RNA, 1410 nt, Artificial Sequence
  derived and/or modified CDS sequence (opt4) from neuraminidase__InfluenzaA__ABI92635
augaaccccaaccagaagaucaucaccaucggcagcgugagccugaccaucgccaccaucugcuuccugaugcagaucgccauccuggugaccaccgugacccugcacuucaagcaguacgagugcaaccccccccccaacaaccaggugaugcugugcgagcccaccaucaucgagagaaacaucaccgagaucguguaccugaccaacaccaccaucgagaaggagaucugccccaagcuggccgaguacagaaacuggagcaagccccagugcaaccugaccggcuucgcccccuucagcaaggacaacagcaucagacugagcgccggcggcgacaucugggugaccagagagcccuacgugagcugcgaccccgacaagugcuaccaguucgcccugggccagggcaccacccugaacaacggccacagcaacgacaccgugcacgacagaacccccuacagaacccugcugaugaacgagcugggcgugcccuuccaccugggcaccagacaggugugcaucgccuggagcagcagcagcugccacgacggcaaggccuggcugcacgugugcgugaccggcgacgacgagaacgccaccgccagcuucaucuacaacggcagacugguggacagcaucggcagcuggagcaagaagauccugagaacccaggagagcgagugcgugugcaucaacggcaccugcaccguggugaugaccgacggcagcgccagcggcaaggccgacaccaagaucaucuucaucgaggagggcaagaucgugcacaccagcacccugagcggcagcgcccagcacguggaggagugcagcugcuaccccagauaccccggcgugagaugcgugugcagagacaacuggaagggcagcaacagacccaucguggacaucaacgugaaggacuacagcaucgugagcagcuacgugugcagcggccuggugggcgacacccccagaaagaacgacagcuucagcagcagccacugccuggaccccaacaacgaggagggcggccacggcgugaagggcugggccuucgacgacggcaacgacguguggaugggcagaaccaucagcgagaagcugagaagcggcuacgagaccuucaaggugaucgagggcuggagcaagcccaacagcaagcugcagaccaacagacaggugaucguggagagaggcaacagaagcggcuacagcggcaucuucagcguggagggcaagagcugcaucaacagaugcuucuacguggagcugaucagaggcagaaaggaggagaccgaggugugguggaccagcaacagcaucgugguguucugcggcaccagcggcaccuacggcaccggcagcuggcccgacggcgccgacaucaaccugaugcccaucuga

SEQ ID NO: 175512 - RNA, 1410 nt, Artificial Sequence; identical to SEQ ID NO: 174205
  derived and/or modified CDS sequence (opt4) from neuraminidase__InfluenzaA__ABI92646

SEQ ID NO: 175513 - RNA, 1410 nt, Artificial Sequence; identical to SEQ ID NO: 174205
  derived and/or modified CDS sequence (opt4) from neuraminidase__InfluenzaA__ABI92657

SEQ ID NO: 175514 - RNA, 1410 nt, Artificial Sequence
  derived and/or modified CDS sequence (opt4) from neuraminidase__InfluenzaA__ABI92668
augaaccccaaccagaagaucaucaccaucggcagcgugagccugaccaucgccaccaucugcuuccugaugcagaucgccauccuggugaccaccgugacccugcacuucaagcagcacgagugcaacagcccccccaacaaccaggugaugcugugcgagcccaccaucaucgagagaaacaucaccgagaucguguaccugaccaacaccaccaucgagaaggagaucugccccaagcuggccgaguacagaaacuggagcaagccccagugcaacaucaccggcuucgcccccuucagcaaggacaacagcaucagacugagcgccggcggcgacaucugggugaccagagagcccuacgugagcugcggccccgacaagugcuaccaguucgcccugggccagggcaccacccugaacaacggccacagcaacgacaccgugcacgacagaacccccuacagaacccugcugaugaacgagcugggcgugcccuuccaccugggcaccagacaggugugcaucgccuggagcagcagcagcugccacgacggcaaggccuggcugcacgugugcgugaccggcgacgacaagaacgccaccgccagcuucaucuacaacggcagacugguggacagcaucggcagcuggagcaagaagauccugagaacccaggagagcgagugcgugugcaucaacggcaccugcaccguggugaugaccgacggcagcgccagcggcaaggccgacaccaagauccuguucaucgaggagggcaagaucgugcacaucagcacccugagcggcagcgcccagcacguggaggagugcagcugcuaccccagauaccccggcgugagaugcgugugcagagacaacuggaagggcagcaacagacccaucguggacaucaacgugaaggacuacagcaucgugagcagcuacgugugcagcggccuggugggcgacacccccagaaagaacgacagcuucagcagcagccacugccuggaccccaacaacgaggagggcggccacggcgugaagggcugggccuucgacgacggcaacgacguguggaugggcagaaccaucagcgagaagcugagaagcggcuacgagaccuucaaggugaucgagggcuggagcaagcccaacagcaagcugcagaucaacagacaggugaucguggagagaggcaacagaagcggcuacagcggcaucuucagcguggagggcaagagcugcaucaacagaugcuucuacguggagcugaucagaggcagaaaggaggagaccgaggugugguggaccagcaacagcaucgugguguucugcggcaccagcggcaccuacggcaccggcagcuggcccgacggcgccgacaucaaccugaugcccaucuga

SEQ ID NO: 175515 - RNA, 1410 nt, Artificial Sequence; identical to SEQ ID NO: 174651
  derived and/or modified CDS sequence (opt4) from neuraminidase__InfluenzaA__ABI92679

SEQ ID NO: 175516 - RNA, 1410 nt, Artificial Sequence; identical to SEQ ID NO: 174205
  derived and/or modified CDS sequence (opt4) from neuraminidase__InfluenzaA__ABI92701

SEQ ID NO: 175517 - RNA, 1410 nt, Artificial Sequence
  derived and/or modified CDS sequence (opt4) from neuraminidase__InfluenzaA__ABI92712
augaaccccaaccagaagaucaucaccaucggcagcgugagccugaccaucgccaccaucugcuuccugaugcagaucgccauccuggugaccaccgugacccugcacuucaagcagcacgagugcaacagcccccccaacaaccaggccaugcugugcgagcccaccaccaccgagagaaacaccaccgagaucguguaccugaccaacaccaccaucgagaaggagaucugccccaagcugguggaguacagaaacuggagcaagccccagugcaacaucaccggcuucgcccccuucagcaaggacaacagcaucagacugagcgccggcggcgacaucugggugaccagagagcccuacgugagcugcgaccccgacaagugcuaccaguucgcccugggccagggcaccacccugaacaacggccacagcaacgacaccgugcacgacagaacccccuacagaacccugcugaugaacgagcugggcgugcccuuccaccugggcaccagacaggugugcaucgccuggagcagcagcagcugccacgacggcaaggccuggcugcacgugugcgugaccggcgacgacaagaacgccaccgccagcuucaucuacaacggcagacugguggacagcaucggcagcuggagcaagaagauccugagaacccaggagagcgagugcgugugcaucaacggcaccugcaccguggugaugaccgacggcagcgccagcggcaaggccgacaccaagauccuguucaucgaggagggcaagaucgugcacaucagcacccugagcggcagcgcccagcacguggaggagugcagcugcuaccccagauaccccggcgugagaugcgugugcagagacaacuggaagggcagcaacagacccaucguggacaucaacgugaaggacuacagcaucgugagcagcuacgugugcagcggccuggugggcgacacccccagaaagaacgacagcuucagcagcagccacugccuggaccccaacaacgaggagggcggccacggcgugaagggcugggccuucgacgacggcaacgacguguggaugggcagaaccaucagcgagaagcugagaagcggcuacgagaccuucaaggugaucgagggcuggagcaagcccaacagcaagcugcagaucaacagacaggugaucguggagagaggcaacagaagcggcuacagcggcaucuucagcguggagggcaagagcugcaucaacagaugcuucuacguggagcugaucagaggcagaaaggaggagaccgaggugugguggaccagcaacagcaucgugguguucugcggcaccagcggcaccuacggcaccggcagcuggcccgacggcgccgacaucaaccugaugcccaucuga

SEQ ID NO: 175518 - RNA, 1410 nt, Artificial Sequence
  derived and/or modified CDS sequence (opt4) from neuraminidase__InfluenzaA__ABI92723
augaaccccaaccagaagaucaucaccaucggcagcgugagccugaccaucgccaccaucugcuuccugaugcagaucgccauccuggugaccaccgugacccugcacuucaagcagcacgagugcaacagcccccccaacaaccaggugaugcugugcgagcccaccaucaucgagagaaacaucaccgagaucguguaccugaccaacaccaccaucgagaaggagaucugccccaagcugguggaguacagaaacuggagcaagccccagugcaacaucaccggcuucgcccccuucagcaaggacaacagcaucagacugagcgccggcggcgacaucugggugaccagagagcccuacgugagcugcgaccccgacaagugcuaccaguucgcccugggccagggcaccacccugaacaacggccacagcaacgacaccgugcacgacagaacccccuacagaacccugcugaugaacgagcugggcgugcccuuccaccugggcaccaagcaggugugcaucgccuggagcagcagcagcugccacgacggcaaggccuggcugcacgugugcgugaccggcgacgacaagaacgccaccgccagcuucaucuacaacggcagacugguggacagcaucggcagcuggagcaagaagauccugagaacccaggagagcgagugcgugugcaucaacggcaccugcaccguggugaugaccgacggcagcgccagcggcaaggccgacaccaagauccuguucaucgaggagggcaagaucgugcacaucagcacccugagcggcagcgcccagcacguggaggagugcagcugcuaccccagauaccccggcgugagaugcgugugcagagacaacuggaagggcagcaacagacccaucguggacaucaacgugaaggacuacagcaucgugagcagcuacgugugcagcggccuggugggcgacacccccagaaagaacgacagcuucagcagcagccacugccuggaccccaacaacgaggagggcggccacggcgugaagggcugggccuucgacgacggcaacgacguguggaugggcagaaccaucagcgagaagcugagaagcggcuacgagaccuucaaggugaucgagggcuggagcaagcccaacagcaagcugcagaucaacagacaggugaucguggagagaggcaacagaagcggcuacagcggcaucuucagcguggagggcaagagcugcaucaacagaugcuucuacguggagcugaucagaggcagaaaggaggagaccgaggugugguggaccagcaacagcaucgugguguucugcggcaccagcggcaccuacggcaccggcagcuggcccgacggcgccgacaucaaccugaugcccaucuga

SEQ ID NO: 175519 - RNA, 1410 nt, Artificial Sequence; identical to SEQ ID NO: 174205
  derived and/or modified CDS sequence (opt4) from neuraminidase__InfluenzaA__ABI92734

SEQ ID NO: 175520 - RNA, 1410 nt, Artificial Sequence; identical to SEQ ID NO: 174651
  derived and/or modified CDS sequence (opt4) from neuraminidase__InfluenzaA__ABI92745

SEQ ID NO: 175521 - RNA, 1410 nt, Artificial Sequence
  derived and/or modified CDS sequence (opt4) from neuraminidase__InfluenzaA__ABI92756
augaaccccaaccagaagaucaucaccaucggcagcgugagccugaccaucgccaccaucugcuuccugaugcagaucgccauccuggugaccaccgugacccugcacuucaagcagcacgagugcaacagcccccccaacaaccaggugauccugugcgagcccaccaucaucgagagaaacaucaccgagaucguguaccugaccaacaccaccaucgagaaggagaucugccccaagcuggccgaguacagaaacuggagcaagccccagugcaacaucaccggcuucgcccccuucagcaaggacaacagcaucagacugagcgccggcggcgacaucugggugaccagagagcccuacgugagcugcgaccccgacaagugcuaccaguucgcccugggccagggcaccacccugaacaacggccacagcaacgacaccgugcacgacagaacccccuacagaacccugcugaugaacgagcugggcgugcccuuccaccugggcaccagacaggugugcaucgccuggagcagcagcagcugccacgacggcaaggccuggcugcacgugugcgugaccggcgacgacaagaacgccaccgccagcuucaucuacaacggcagacugguggacagcaucggcagcuggagcaagaagauccugagaacccaggagagcgagugcgugugcaucaacggcaccugcaccguggugaugaccgacggcagcgccagcggcaaggccgacaccaagauccuguucaucgaggagggcaagaucgugcacaucagcacccugagcggcagcgcccagcacguggaggagugcagcugcuaccccagauaccccggcgugagaugcgugugcagagacaacuggaagggcagcaacagacccaucguggacaucaacgugaaggacuacagcaucgugagcagcuacgugugcagcggccuggugggcgacacccccagaaagaacgacagcuucagcagcagccacugccuggaccccaacaacgaggagggcggccacggcgugaagggcugggccuucgacgacggcaacgacguguggaugggcagaaccaucagcgagaagcugagaagcggcuacgagaccuucaaggugaucgagggcuggagcaagcccaacagcaagcugcagaucaacagacaggugaucguggagagaggcaacagaagcggcuacagcggcaucuucagcguggagggcaagagcugcaucaacagaugcuucuacguggagcugaucagaggcagaaaggaggagaccgaggugugguggaccagcaacagcaucgugguguucugcggcaccagcggcaccuacggcaccggcagcuggcccgacggcgccgacaucaaccugaugcccaucuga

SEQ ID NO: 175522 - RNA, 1410 nt, Artificial Sequence
  derived and/or modified CDS sequence (opt4) from neuraminidase__InfluenzaA__ABI92767
augaaccccaaccagaagaucaucaccaucggcagcgugagccugaccaucgccaccaucugcuuccugaugcagaucgccauccuggugaccaccgugacccugcacuucaagcagcacgagugcaacagcccccccaacaaccaggugaugcugugcgagcccaccaucaucgagagaaacaucaccgagaucguguaccugaccaacaccaccaucgagaaggagaucugccccaagcuggccgaguacagaaacuggagcaagccccagugcaacaucaccggcuucgcccccuucagcaaggacaacagcaucagacugagcgccggcggcgacaucugggugaccagagagcccuacgugagcugcgaccccgacaagugcuaccaguucgcccugggccagggcaccacccugaacaacggccacagcaacgacaccgugcacgacagaacccccuacagaacccugcugaugaacgagcugggcgugcccuuccaccugggcaccagacaggugugcaucgccuggagcagcagcagcugccacgacggcaaggccuggcugcacgugugcgugaccggcgacgacaagaacgccaccgccagcuucaucuacaacggcagacugguggacagcaucggcagcuggagcaagaagauccugagaacccaggagagcgagugcgugugcaucaacggcaccugcaccguggugaugaccgacggcagcgccagcggcaaggccgacaccaagauccuguucaucgaggagggcaagaucgugcacaucagcacccugagcggcagcgcccagcacguggaggagugcagcugcuaccccagauaccccggcgugagaugcgugugcagagacaacuggaagggcagcaacagacccaucguggacaucaacgugaaggacuacagcaucgugagcagcuacgugugcagcggccuggugggcgacacccccagaaagaacgacagcuucagcagcagccacugccuggaccccaacaacgaggagggcggccacggcgugaagggcugggccuucgacgacggcaacgacguguggaugggcagaaccaucagcgagaagcugagaagcggcuacgagaccuucaaggugaucgagggcuggagcaagcccaacagcaagcugcagaucaacagacaggugaucguggagagaggcaacagaagcggcuacagcggcaucuucagcguggagggcaagagcugcaucaacagaugcuucuacguggagcugaucagaggcagaaaggagaagaccgaggugugguggaccagcaacagcaucgugguguucugcggcaccagcggcaccuacggcaccggcagcuggcccgacggcgccgacaucaaccugaugcccaucuga

SEQ ID NO: 175523 - RNA, 1410 nt, Artificial Sequence; identical to SEQ ID NO: 174205
  derived and/or modified CDS sequence (opt4) from neuraminidase__InfluenzaA__ABI92778

SEQ ID NO: 175524 - RNA, 1410 nt, Artificial Sequence; identical to SEQ ID NO: 174387
  derived and/or modified CDS sequence (opt4) from neuraminidase__InfluenzaA__ABI92789

SEQ ID NO: 175525 - RNA, 1410 nt, Artificial Sequence; identical to SEQ ID NO: 174387
  derived and/or modified CDS sequence (opt4) from neuraminidase__InfluenzaA__ABI92800

SEQ ID NO: 175526 - RNA, 1410 nt, Artificial Sequence; identical to SEQ ID NO: 174387
  derived and/or modified CDS sequence (opt4) from neuraminidase__InfluenzaA__ABI92811

SEQ ID NO: 175527 - RNA, 1410 nt, Artificial Sequence; identical to SEQ ID NO: 174387
  derived and/or modified CDS sequence (opt4) from neuraminidase__InfluenzaA__ABI92822

SEQ ID NO: 175528 - RNA, 1410 nt, Artificial Sequence; identical to SEQ ID NO: 174387
  derived and/or modified CDS sequence (opt4) from neuraminidase__InfluenzaA__ABI92844

SEQ ID NO: 175529 - RNA, 1410 nt, Artificial Sequence; identical to SEQ ID NO: 174387
  derived and/or modified CDS sequence (opt4) from neuraminidase__InfluenzaA__ABI92855

SEQ ID NO: 175530 - RNA, 1410 nt, Artificial Sequence
  derived and/or modified CDS sequence (opt4) from neuraminidase__InfluenzaA__ABI92866
augaaccccaaccagaagaucaucaccaucggcagcgccagccugaccaucgccaccaucugcuuccugauccagaucgccauccuggugaccaccgugacccugcacuucaagcagcacgagugcaacagccugcccaacaaccaggugaugcugugcgagcccaccaucaucgagagaaacaucaccgagaucguguaccugaccaacaccaccaucgagaaggagaucugccccaagcuggccgaguacagaaacuggagcaagccccagugcaacaucaccggcuucgcccccuucagcaaggacaacagcaucagacugagcgccggcggcgacaucugggugaccagagagcccuacgugagcugcgaccccgacaagugcuaccaguucgcccugggccagggcaccacccugaacaacggccacagcaacgacaccgugcacgacagaacccccuacagaacccugcugaugaacgagcugggcgugcccuuccaccugggcaccagacaggugugcaucgccuggagcagcagcagcugccacgacggcaaggccuggcugcacgugugcgugaccggcgacgacaagaacgccaccgccagcuucaucuacaacggcagacugguggacagcaucagcagcuggagcaagaagauccugagaacccaggagagcgagugcgugugcaucaacggcaccugcaccguggugaugaccgacggcagcgccagcggcaaggccgacaccaagauccuguucaucgaggagggcaagaucauccacaucagcacccugagcggcagcgcccagcacguggaggagugcagcugcuaccccagauaccccggcgugagaugcgugugcagagacaacuggaagggcagcaacagacccaucguggacaucaacgugaaggacuacagcaucgugagcagcuacgugugcagcggccuggugggcgacacccccagaaagaacgacagcuucagcagcagccacugccuggaccccaacaacgaggagggcggccacggcgugaagggcugggccuucgacgacggcaacgacguguggaugggcagaaccaucagcgagaagcugagaagcggcuacgagaccuucaaggugaucgagggcuggagcaaccccaacagcaagcugcagaucaacagacaggugaucguggagagaggcaacagaagcggcuacagcggcaucuucagcguggagggcaagagcugcaucaacagaugcuucuacguggagcugaucagaggcagaaaggaggagaccgaggugugguggaccagcaacagcaucgugguguucugcggcaccagcggcaccuacggcaccggcagcuggcccgacggcgccgacaucaaccugaugcccaucuga

SEQ ID NO: 175531 - RNA, 1410 nt, Artificial Sequence; identical to SEQ ID NO: 174387
  derived and/or modified CDS sequence (opt4) from neuraminidase__InfluenzaA__ABI92877

SEQ ID NO: 175532 - RNA, 1410 nt, Artificial Sequence; identical to SEQ ID NO: 174387
  derived and/or modified CDS sequence (opt4) from neuraminidase__InfluenzaA__ABI92888

SEQ ID NO: 175533 - RNA, 1410 nt, Artificial Sequence; identical to SEQ ID NO: 174387
  derived and/or modified CDS sequence (opt4) from neuraminidase__InfluenzaA__ABI92899

SEQ ID NO: 175534 - RNA, 1410 nt, Artificial Sequence; identical to SEQ ID NO: 174387
  derived and/or modified CDS sequence (opt4) from neuraminidase__InfluenzaA__ABI92910

SEQ ID NO: 175535 - RNA, 1410 nt, Artificial Sequence; identical to SEQ ID NO: 174387
  derived and/or modified CDS sequence (opt4) from neuraminidase__InfluenzaA__ABI92921

SEQ ID NO: 175536 - RNA, 1410 nt, Artificial Sequence; identical to SEQ ID NO: 174387
  derived and/or modified CDS sequence (opt4) from neuraminidase__InfluenzaA__ABI92932

SEQ ID NO: 175537 - RNA, 1410 nt, Artificial Sequence; identical to SEQ ID NO: 174774
  derived and/or modified CDS sequence (opt4) from neuraminidase__InfluenzaA__ABI92943

SEQ ID NO: 175538 - RNA, 1410 nt, Artificial Sequence; identical to SEQ ID NO: 174774
  derived and/or modified CDS sequence (opt4) from neuraminidase__InfluenzaA__ABI92954

SEQ ID NO: 175539 - RNA, 1410 nt, Artificial Sequence
  derived and/or modified CDS sequence (opt4) from neuraminidase__InfluenzaA__ABI92965
augaaccccaaccagaagaucaucaccaucggcagcgugagccugaccaucagcaccaucugcuucuucaugcagaucgccauccugaucaccaccgugacccugcacuucaagcaguacgaguucaacagcccccccaacaaccaggugaugcugugcgagcccaccaucaucgagagaaacaucaccgagaucguguaccugaccaacaccaccaucgagaaggagaucugccccaagcuggccgaguacagaaacuggagcaagccccagugcgacaucaccggcuucgcccccuucagcaaggacaacagcaucagacugagcgccggcggcgacaucugggugaccagagagcccuacgugagcugcgaccccgacaagugcuaccaguucgcccugggccagggcaccacccugaacaacgugcacagcaacgacaccgugcacgacagaacccccuacagaacccugcugaugaacgagcugggcgugcccuuccaccugggcaccaagcaggugugcaucgccuggagcagcagcagcugccacgacggcaaggccuggcugcacgugugcgugaccggcgacgacaagaacgccaccgccagcuucaucuacaacggcagacugguggacagcaucgugagcuggagcaagaagauccugagaacccaggagagcgagugcgugugcaucaacggcaccugcaccguggugaugaccgacggcagcgccagcggcaaggccgacaccaagauccuguucaucgaggagggcaagaucgugcacaccagcacccugagcggcagcgcccagcacguggaggagugcagcugcuaccccagauaccccggcgugagaugcgugugcagagacaacuggaagggcagcaacagacccaucguggacaucaacaucaaggacuacagcaucgugagcagcuacgugugcagcggccuggugggcgacacccccagaaagaacgacagaagcagcagcagccacugccuggaccccaacaacgaggagggcggccacggcgugaagggcugggccuucgacgacggcaacgacguguggaugggcagaaccaucagcgagaagcugagaagcggcuacgagaccuucaaggugaucgagggcuggagcaaccccaacagcaagcugcagaucaacagacaggugaucguggacagaggcaacagaagcggcuacagcggcaucuucagcguggagggcaagagcugcaucaacagaugcuucuacguggagcugaucagaggcagaaaggaggagaccgaggugcuguggaccagcaacagcaucgugguguucugcggcaccagcggcaccuacggcaccggcagcuggcccgacggcgccgacaucaaccugaugcccaucuga

SEQ ID NO: 175540 - RNA, 1410 nt, Artificial Sequence; identical to SEQ ID NO: 174774
  derived and/or modified CDS sequence (opt4) from neuraminidase__InfluenzaA__ABI92976

SEQ ID NO: 175541 - RNA, 1410 nt, Artificial Sequence; identical to SEQ ID NO: 174774
  derived and/or modified CDS sequence (opt4) from neuraminidase__InfluenzaA__ABI92987

SEQ ID NO: 175542 - RNA, 1410 nt, Artificial Sequence; identical to SEQ ID NO: 174774
  derived and/or modified CDS sequence (opt4) from neuraminidase__InfluenzaA__ABI92998

SEQ ID NO: 175543 - RNA, 1410 nt, Artificial Sequence; identical to SEQ ID NO: 174978
  derived and/or modified CDS sequence (opt4) from neuraminidase__InfluenzaA__ABI93009

SEQ ID NO: 175544 - RNA, 1410 nt, Artificial Sequence; identical to SEQ ID NO: 174774
  derived and/or modified CDS sequence (opt4) from neuraminidase__InfluenzaA__ABI93020

SEQ ID NO: 175545 - RNA, 1413 nt, Artificial Sequence; identical to SEQ ID NO: 175416
  derived and/or modified CDS sequence (opt4) from neuraminidase__InfluenzaA__ABI93031

SEQ ID NO: 175546 - RNA, 1410 nt, Artificial Sequence; identical to SEQ ID NO: 175171
  derived and/or modified CDS sequence (opt4) from neuraminidase__InfluenzaA__ABI93042

SEQ ID NO: 175547 - RNA, 1410 nt, Artificial Sequence; identical to SEQ ID NO: 174344
  derived and/or modified CDS sequence (opt4) from neuraminidase__InfluenzaA__ABI93053

SEQ ID NO: 175548 - RNA, 1410 nt, Artificial Sequence
  derived and/or modified CDS sequence (opt4) from neuraminidase__InfluenzaA__ABI93064
augaaccccaaccagaagaucaucaccaucggcagcgugagccugaccaucgccaccaucugcuuccugaugcagaucgccauccuggugaccaccgugacccugcacuucaagcaguacgagugcaacagcccccccaacaaccaggugaugcugugcgagcccaccaucaucgagagaaacaucaccgagaucguguaccugaccaacaccaccaucgagaaggagaucugccccaagcuggccgaguacagaaacuggagcaagccccagugcaagaucaccggcuucgcccccuucagcaaggacaacagcaucagacugagcgccggcggcgacaucugggugaccagagagcccuacgugagcugcgaccccgacaagugcuaccaguucgcccugggccagggcaccacccugaacaacagacacagcaacgacaccgugcacgacagaacccccuacagaacccugcugaugaacgagcugggcgugcccuuccaccugggcaccaagcaggugugcaucgccuggagcagcagcagcugccacgacggcaaggccuggcugcacgugugcgugaccggccacgacgagaacgccaccgccagcuucaucuacgacggcagacugguggacagcaucggcagcuggagcaagaagauccugagaacccaggagagcgagugcgugugcaucaacggcaccugcaccguggugaugaccgacggcagcgccagcggcagagccgacaccaagauccuguucaucgaggagggcaagaucgugcacaccagcaagcugagcggcagcgcccagcacguggaggagugcagcugcuaccccagauaccccggcgugagaugcgugugcagagacaacuggaagggcagcaacagacccaucguggacaucaacgugaaggacuacagcaucgugagcagcuacgugugcagcggccuggugggcgacacccccagaaagaacgacagcagcagcagcagccacugccuggaccccaacaacgaggagggcggccacggcgugaagggcugggccuucgacgacggcaacgacguguggaugggcagaaccaucagcgagaagagcagaagcggcuacgagaccuucaaggugaucgagggcuggagcaagcccaacagcaagcugcagaucaacagacaggugaucguggagagaggcaacagaagcggcuacagcggcaucuucagcguggagggcaagagcugcaucaacagaugcuucuacguggagcugaucagaggcagaaagcaggagaccgaggugugguggaccagcaacagcaucgugguguucugcggcaccagcggcaccuacggcaccggcagcuggcccgacggcgccgacaucaaccugaugcccaucuga

SEQ ID NO: 175549 - RNA, 1410 nt, Artificial Sequence; identical to SEQ ID NO: 174790
  derived and/or modified CDS sequence (opt4) from neuraminidase__InfluenzaA__ABI93075

SEQ ID NO: 175550 - RNA, 1410 nt, Artificial Sequence; identical to SEQ ID NO: 174790
  derived and/or modified CDS sequence (opt4) from neuraminidase__InfluenzaA__ABI93086

SEQ ID NO: 175551 - RNA, 1410 nt, Artificial Sequence; identical to SEQ ID NO: 174790
  derived and/or modified CDS sequence (opt4) from neuraminidase__InfluenzaA__ABI93097

SEQ ID NO: 175552 - RNA, 1410 nt, Artificial Sequence
  derived and/or modified CDS sequence (opt4) from neuraminidase__InfluenzaA__ABI93108
augaaccccaaccagaagaucaucaccaucggcagcgugagccugaccaucgccaccaucugcuuccugaugcagaucgccauccuggugaccaccgugacccugcacuucaagcaguacgagugcaacagcccccccaacaaccaggugaugcugugcgagcccaccaucaucgagagaaacaucaccgagaucguguaccugaccaacaccaccaucgagaaggagaucugccccaagcuggccgaguacagaaacuggagcaagccccagugcaacaucaccggcuucgcccccuucagcaaggacaacagcaucagacugagcgccggcggcgacaucugggugaccagagagcccuacgugagcugcgaccccgacaagugcuaccaguucgcccugggccagggcaccacccugaacaacggccacagcaacgacaccgugcacgacagaacccccuacagaacccugcugaugaacgagcugggcgugcccuuccaccugggcaccaagcaggugugcaucgccuggagcagcagcagcugccacgacggcaaggccuggcugcacgugugcgugaccggcgacgacgagaacgccaccgccagcuucaucuacaacggcagacugguggacagcaucggcagcuggagcaagaagauccugagaacccaggagagcgagugcgugugcaucaacggcaccugcaccguggugaugaccgacggcagcgccagcggcaaggccgacaccaagauccuguucaucgaggagggcaagaucgugcacaccagcagccugagcggcagcgcccagcacguggaggagugcagcugcuaccccagauaccccggcgugagaugcgugugcagagacaacuggaagggcagcaacagacccaucguggacaucaacgugaacgacuacagcaucgugagcagcuacgugugcagcggccuggugggcgacacccccagaaagaacgacagcagcagcagcagccacugccuggaccccaacaacgaggagggcggccacggcgugaagggcugggccuucgacgacggcaacgacguguggaugggcagaaccaucagcgagaagcugagaagcggcuacgagaccuucaaggugaucgagggcuggagcaagcccaacagcaagcugcagaucaacagacaggugaucguggacagaggcaacagaagcggcuacagcggcaucuucagcguggagagcaagagcugcaucaacagaugcuucuacguggagcugaucagaggcagaaagcaggagaccgaggugcuguggaccagcaacagcaucgugguguucugcggcaccagcggcaccuacggcaccggcagcuggcccgacggcgccgacaucaaccugaugcccaucuga

SEQ ID NO: 175553 - RNA, 1410 nt, Artificial Sequence
  derived and/or modified CDS sequence (opt4) from neuraminidase__InfluenzaA__ABI93119
augaaccccaaccagaagaucaucaccaucggcagcgugagccugaccaucgccaccaucugcuuccugaugcagaucgccauccuggugaccaccgugacccugcacuucaagcaguacgagugcaacagcccccccaacaaccaggugaugcugugcgagcccaccaucaucgagagaaacaucaccgagaucguguaccugaccaacaccaccaucgagaaggagaucugccccaagcuggccgaguacagaaacuggagcaagccccagugcaacaucaccggcuucgcccccuucagcaaggacaacagcaucagacugagcgccggcggcgacaucugggugaccagagagcccuacgugagcugcgaccccgacaagugcuaccaguucgcccugggccagggcaccacccugaacaacggccacagcaacgacaccgugcacgacagaacccccuacagaacccugcugaugaacgagcugggcgugcccuuccaccugggcaccaagcaggugugcaucgccuggagcagcagcagcugccacgacggcaaggccuggcugcacgugugcgugaccggcgacgacgagaacgccaccgccagcuucaucuacaacggcagacugguggacagcaucggcagcuggagcaagaagauccugagaacccaggagagcgagugcgugugcaucaacggcaccugcaccguggugaugaccgacggcagcgccagcggcaaggccgacaccaagauccuguucaucgaggagggcaagaucgugcacaccagcagccugagcggcagcgcccagcacguggaggagugcagcugcuaccccagauaccccggcgugagaugcgugugcagagacaacuggaagggcagcaacagacccaucguggacaucaacgugaaggacuacagcaucgugagcagcuacgugugcagcggccuggugggcgacacccccagaaagaacgacaacagcagcagcagccacugccuggaccccaacaacgaggagggcggccacggcgugaagggcugggccuucgacgacggcaacgacguguggaugggcagaaccaucagcgagaagcugagaagcggcuacgagaccuucaaggugaucgagggcuggagcaagcccaacagcaagcugcagaucaacagacaggugaucguggacagaagcaacagaagcggcuacagcggcaucuucagcguggagagcaagagcugcaucaacagaugcuucuacguggagcugaucagaggcagaaagcaggagaccgaggugcuguggaccagcaacagcaucgugguguucugcggcaccagcggcaccuacggcaccggcagcuggcccgacggcgccgacaucaaccugaugcccaucuga

SEQ ID NO: 175554 - RNA, 1416 nt, Artificial Sequence
  derived and/or modified CDS sequence (opt4) from neuraminidase__InfluenzaA__ABI94584
augaaccccaaccagaagcuguucgcccugagcggcguggccaucgcccugagcgugcugaaccugcugaucggcaucagcaacgugggccugaacgugagccugcaccugaaggagaagggccccaagcaggaggagaaccugaccugcaccaccaucaaccagaacaacaccaccgugguggagaacaccuacgugaacaacaccaccaucaucaccaagggcaccgaccugaagacccccagcuaccugcugcugaacaagagccugugcaacguggagggcuggguggugaucgccaaggacaacgccgugagauucggcgagagcgagcagaucaucgugaccagagagcccuacgugagcugcgaccccaccggcugcaagauguacgcccugcaccagggcaccaccaucagaaacaagcacagcaacggcaccauccacgacagaaccgccuucagaggccugaucagcaccccccugggcaccccccccaccgugagcaacagcgacuucaugugcgugggcuggagcagcaccaccugccacgacggcaucgccagaaugaccaucugcauccagggcaacaacgacaacgccaccgccaccguguacuacaacagaagacugaccaccaccaucaagaccugggccagaaacauccugagaacccaggagagcgagugcgugugccacaacggcaccugcgccguggugaugaccgacggcagcgccagcagccaggccuacaccaaggugauguacuuccacaagggccugguggugaaggaggaggagcugagaggcagcgccagacacaucgaggagugcagcugcuacggccacaaccagaaggugaccugcgugugcagagacaacuggcagggcgccaacagacccaucaucgagaucgacaugagcacccuggagcacaccagcagauacgugugcaccggcauccugaccgacaccagcagacccggcgacaagagcagcggcgacugcagcaaccccaucaccggcagccccggcgugcccggcgugaagggcuucggcuuccugaacggcgacaacaccuggcugggcagaaccaucagccccagaagcagaagcggcuucgagaugcugaagauccccaacgccggcaccgaccccaacagcagaaucgccgagagacaggagaucguggacaacaacaacuggagcggcuacagcggcagcuucaucgacuacuggaacgacaacagcgagugcuacaaccccugcuucuacguggagcugaucagaggcagacccgaggaggccaaguacguguggugggccagcaacagccugaucgcccugugcggcagccccuuccccgugggcagcggcagcuuccccgacggcgcccagauccaguacuucagcuga

SEQ ID NO: 175555 - RNA, 1413 nt, Artificial Sequence; identical to SEQ ID NO: 174888
  derived and/or modified CDS sequence (opt4) from neuraminidase__InfluenzaA__ABI95220

SEQ ID NO: 175556 - RNA, 1410 nt, Artificial Sequence
  derived and/or modified CDS sequence (opt4) from neuraminidase__InfluenzaA__ABI95242
augaaccccaaccagaagaucaucaccaucggcagcgugagccugaccaucagcaccaucugcuucuucaugcagaucgccauccugaucaccaccgugacccugcacuucaagcaguacgaguucaacagcccccccaacaaccaggugaugcugugcgagcccaccaucaucgagagaaacaucaccgagaucguguaccugaccaacaccaccaucgagaaggagaucugccccaagcuggccgaguacagaaacuggagcaagccccagugcgacaucaccggcuucgcccccuucagcaaggacaacagcaucagacugagcgccggcggcgacaucugggugaccagagagcccuacgugagcugcgaccccgacaagugcuaccaguucgcccugggccagggcaccacccugaacaacgugcacagcaacgacaccgugcacggcagaacccccuacagaacccugcugaugaacgagcugggcgugcccuuccaccugggcaccaagcaggugugcaucgccuggagcagcagcagcugccacgacggcaaggccuggcugcacgugugcgugaccggcgacgacaagaacgccaccgccagcuucaucuacaacggcagacugguggacagcaucgugagcuggagcaaggagauccugagaacccaggagagcgagugcgugugcaucaacggcaccugcaccguggugaugaccgacggcagcgccagcggcgaggccgacaccaagauccuguucaucgaggagggcaagaucgugcacaccagcacccugagcggcagcgcccagcacguggaggagugcagcugcuaccccagauaccccggcgugagaugcgugugcagagacaacuggaagggcagcaacagacccaucguggacaucaacaucaaggacuacagcaucgugagcagcuacgugugcagcggccuggugggcgacacccccagaaagaacgacagcagcagcagcagccacugccuggaccccaacaacgaggagggcggccacggcgugaagggcugggccuucgacgacggcaacgacguguggaugggcagaaccaucagcgagaagcugagaagcggcuacgagaccuucaaggugaucgagggcuggagcaaccccaacagcaagcugcagaucaacagacaggugaucguggacagaggcaacagaagcggcuacagcggcaucuucagcguggagggcaagagcugcaucaacagaugcuucuacguggagcugaucagaggcagaaaggaggagaccgaggugcuguggaccagcaacagcaucgugguguucugcggcaccagcggcaccuacggcaccggcagcuggcccgacggcgccgacaucaaccugaugcccaucuga

SEQ ID NO: 175557 - RNA, 1413 nt, Artificial Sequence
  derived and/or modified CDS sequence (opt4) from neuraminidase__InfluenzaA__ABI95253
augaaccccaaccagaagaucaucaccaucggcagcaucagcaucgccaucggcaucaucagcaucaugcugcagaucggcaacaucaucagcaucugggccagccacagcauccagaccggcagccagaaccacaccggcaucugcaaccagagaaucaucaccuacgagaacagcaccugggugaaccacaccuacgugaacaucaacaacaccaacgugguggccggcaaggacaagaccagcgugacccuggccggcaacagcagccugugcagcaucagcggcugggccaucuacaccaaggacaacagcaucagaaucggcagcaagggcgacguguucgugaucagagagcccuucaucagcugcagccaccuggagugcagaaccuucuuccugacccagggcgcccugcugaacgacaagcacagcaacggcaccgugaaggacagaagccccuacagagcccugaugagcugcccccugggcgaggcccccagccccuacaacagcaaguucgagagcguggccuggagcgccagcgccugccacgacggcaugggcuggcugaccaucggcaucagcggccccgacaacggcgccguggccgugcugaaguacaacggcaucaucaccgagaccaucaagagcuggaagaagagaauccugagaacccaggagagcgagugcgugugcgugaacggcagcugcuucaccaucaugaccgacggccccagcgacggcgccgccagcuacaagaucuucaagaucgagaagggcaaggugaccaagagcaucgagcugaacgcccccaacagccacuacgaggagugcagcugcuaccccgacaccggcaccgugaugugcgugugcagagacaacuggcacggcagcaacagacccugggugagcuucaaccagaaccuggacuaccagaucggcuacaucugcagcggcguguucggcgacaaccccagacccaaggacggcgagggcagcugcaaccccgugaccguggacggcgccgacggcgugaagggcuucagcuacaaguacggcaacggcguguggaucggcagaaccaagagcaacagacugagaaagggcuucgagaugaucugggaccccaacggcuggaccgacaccgacagcgacuucagcgugaagcaggacgugguggccaucaccgacuggagcggcuacagcggcagcuucgugcagcaccccgagcugaccggccuggacugcaucagacccugcuucuggguggagcuggugagaggcagacccagagagaacaccaccaucuggaccagcggcagcagcaucagcuucugcggcgugaacagcgacaccgccaacuggagcuggcccgacggcgccgagcugcccuucaccaucgacaaguga

SEQ ID NO: 175558 - RNA, 1413 nt, Artificial Sequence; identical to SEQ ID NO: 175416
  derived and/or modified CDS sequence (opt4) from neuraminidase__InfluenzaA__ABI95264

SEQ ID NO: 175559 - RNA, 1413 nt, Artificial Sequence; identical to SEQ ID NO: 175416
  derived and/or modified CDS sequence (opt4) from neuraminidase__InfluenzaA__ABI95275

SEQ ID NO: 175560 - RNA, 1413 nt, Artificial Sequence; identical to SEQ ID NO: 175416
  derived and/or modified CDS sequence (opt4) from neuraminidase__InfluenzaA__ABI95286

SEQ ID NO: 175561 - RNA, 1413 nt, Artificial Sequence
  derived and/or modified CDS sequence (opt4) from neuraminidase__InfluenzaA__ABI95297
augaaccccaaccagaagaucaucaccaucggcagcaucagcaucgccaucggcaucaucagccugaugcugcagaucggcaacaucaucagcaucugggccagccacagcauccagaccggcagccagaaccacaccggcgugugcaaccagagaaucaucaccuacgagaacagcaccugggugaaccacaccuacgugaacaucaacaacaccaacgugaucgccggcaaggacaagaccagcgugacccuggccggcaacagcagccugugcagcaucagcggcugggccaucuacaccaaggacaacagcaucagaaucggcagcaagggcgacguguucgugaucagagagcccuucaucagcugcagccaccuggagugcagaaccuucuuccugacccagggcgcccugcugaacgacaagcacagcaacggcaccgugaagaacagaagccccuacagagcccugaugagcugcccccugggcgaggcccccagccccuacaacagcaaguucgagagcguggccuggagcgccagcgccugccacgacggcaugggcuggcugaccaucggcaucagcggccccgacaacggcgccguggccgugcugaaguacaacggcaucaucaccgagaccaucaagagcuggaagaagcagauccugagaacccaggagagcgagugcgugugcgugaacggcagcugcuucaccaucaugaccgacggccccagcaacggcgccgccagcuacaagaucuucaagaucgagaagggcaaggugaccaagagcaucgagcugaacgcccccaacuuccacuacgaggagugcagcugcuaccccgacaccggcaccgugaugugcgugugcagagacaacuggcacggcagcaacagacccugggugagcuucaaccagaaccuggacuaccagaucggcuacaucugcagcggcguguucggcgacaaccccagacccaaggacggcgagggcagcugcaaccccgugaccguggacggcgccaacggcgugaagggcuucagcuacaaguacggcaacggcguguggaucggcagaaccaagagcaacagacugagaaagggcuucgagaugaucugggaccccaacggcuggaccgacaccgacagcgacuucagcgugaagcaggacgugguggccaucaccgacuggagcggcuacagcggcagcuucgugcagcaccccgagcugaccggccuggacugcaucagacccugcuucuggguggagcuggugagaggccugcccaaggagaacaccaccaucuggaccagcggcagcagcaucagcuucugcggcgugaacagcgacaccgccaacuggagcuggcccgacggcgccgagcugcccuucaccaucgacaaguga

SEQ ID NO: 175562 - RNA, 1410 nt, Artificial Sequence; identical to SEQ ID NO: 174790
  derived and/or modified CDS sequence (opt4) from neuraminidase__InfluenzaA__ABI95308

SEQ ID NO: 175563 - RNA, 1413 nt, Artificial Sequence; identical to SEQ ID NO: 174446
  derived and/or modified CDS sequence (opt4) from neuraminidase__InfluenzaA__ABI96131

SEQ ID NO: 175564 - RNA, 1413 nt, Artificial Sequence; identical to SEQ ID NO: 174446
  derived and/or modified CDS sequence (opt4) from neuraminidase__InfluenzaA__ABI96133

SEQ ID NO: 175565 - RNA, 1413 nt, Artificial Sequence; identical to SEQ ID NO: 174446
  derived and/or modified CDS sequence (opt4) from neuraminidase__InfluenzaA__ABI96136

SEQ ID NO: 175566 - RNA, 1410 nt, Artificial Sequence
  derived and/or modified CDS sequence (opt4) from neuraminidase__InfluenzaA__ABJ09110
augaaccccaaccagaagaucaucaccaucggcagcgugagccugaccaucgccaccaucugcuuccugaugcagaucgccauccuggugaccaccgugacccugcacuucaagcaguacgagugcaacagcccccccaacaaccaggugaugcugugcgagcccaccaucaucgagagaaacaucaccgagaucguguaccugaccaacaccaccaucgagaaggagaucugccccaagcuggccgaguacagaaacuggagcaagccccagugcaacaucaccggcuucgcccccuucagcaaggacaacagcaucagacugagcgccggcggcgacaucugggugaccagagagcccuacgugagcugcgaccccgacaagugcuaccaguucgcccugggccagggcaccacccugaacaacggccacagcaacgacaccgugcacgacagaacccccuacagaacccugcugaugaacgagcugggcgugcccuuccaccugggcaccaagcaggugugcaucgccuggagcagcagcagcugccacgacggcaaggccuggcugcacgugugcgugaccggcgacgacgagaacgccaccgccagcuucaucuacaacggcagacugguggacagcaucggcagcuggagcaagaagauccugagaacccaggagagcgagugcgugugcaucaacggcaccugcaccguggugaugaccgacggcagcgccagcggcaaggccgacaccaagauccuguucaucgaggagggcaagaucauccacaccagcagccugagcggcagcgcccagcacguggaggagugcagcugcuaccccagauaccccggcgugagaugcgugugcagagacaacuggaagggcagcaacagacccaucguggacaucaacgugaaggacuacagcaucgugagcagcuacgugugcagcggccuggugggcgacacccccagaaagaacgacagcagcagcagcagccacugccuggaccccaacaacgaggagggcggccacggcgugaagggcugggccuucgacgacggcaacgacguguggaugggcagaaccaucagcgagaagcugagaagcggcuacgagaccuucaaggugaucgagggcuggagcaagcccaacagcaagcugcagaucaacagacaggugaucguggacagaggcaacagaagcggcuacagcggcaucuucagcguggagagcaagagcugcaucaacagaugcuucuacguggagcugaucagaggcagaaagcaggagaccgaggugcuguggaccagcaacagcaucgugguguucugcggcaccagcggcaccuacggcaccggcagcuggcccgacggcgccgacaucaaccugaugcccaucuga

SEQ ID NO: 175567 - RNA, 1410 nt, Artificial Sequence; identical to SEQ ID NO: 175161
  derived and/or modified CDS sequence (opt4) from neuraminidase__InfluenzaA__ABJ09143

SEQ ID NO: 175568 - RNA, 1413 nt, Artificial Sequence; identical to SEQ ID NO: 174985
  derived and/or modified CDS sequence (opt4) from neuraminidase__InfluenzaA__ABJ09154

SEQ ID NO: 175569 - RNA, 1410 nt, Artificial Sequence; identical to SEQ ID NO: 174387
  derived and/or modified CDS sequence (opt4) from neuraminidase__InfluenzaA__ABJ09165

SEQ ID NO: 175570 - RNA, 1410 nt, Artificial Sequence; identical to SEQ ID NO: 174387
  derived and/or modified CDS sequence (opt4) from neuraminidase__InfluenzaA__ABJ09176

SEQ ID NO: 175571 - RNA, 1410 nt, Artificial Sequence; identical to SEQ ID NO: 174774
  derived and/or modified CDS sequence (opt4) from neuraminidase__InfluenzaA__ABJ09198

SEQ ID NO: 175572 - RNA, 1410 nt, Artificial Sequence; identical to SEQ ID NO: 174774
  derived and/or modified CDS sequence (opt4) from neuraminidase__InfluenzaA__ABJ09209

SEQ ID NO: 175573 - RNA, 1410 nt, Artificial Sequence
  derived and/or modified CDS sequence (opt4) from neuraminidase__InfluenzaA__ABJ09220
augaaccccaaccagaagaucaucaccaucggcagcgugagccugaccaucgccaccaucugcuuccugaugcagaucgccauccuggugaccaccgugacccugcacuucaagcaguacgagugcaacagcccccccaacaaccaggugaugcugugcgagcccaccaucaucgagagaaacaucaccgagaucguguaccugaccaacaccaccaucgagaaggagaucugccccaagcuggccaaguacagaaacuggagcaagccccagugcaagaucaccggcuucgcccccuucagcaaggacaacagcaucagacugagcgccggcggcgacaucugggugaccagagagcccuacgugagcugcgaccccggcaagugcuaccaguucgcccugggcagaggcaccacccugaacaacagacacagcaacgacaccgugcacgacagaacccccuacagaacccugcugaugaacgagcugggcgugcccuuccaccugggcaccaagcaggugugcaucgccuggagcagcagcagcugccacgacggcaaggccuggcugcacgugugcgugaccggccacgacgagaacgccaccgccagcuucaucuacgacggcagacugguggacagcaucggcagcuggagcaagaacauccugagaacccaggagagcgagugcgugugcaucaacggcaccugcaccguggugaugaccgacggcagcgccagcgagagagccgacaccaagauccuguucaucgaggagggcaagaucgugcacaucagcccccugagcggcagcgcccagcacguggaggagugcagcugcuaccccagauaccccggcgugagaugcgugugcagagacaacuggaagggcagcaacagacccaucguggacaucaacgugaaggacuacagcaucgugagcagcuacgugugcagcggccuggugggcgacacccccagaaagaacgacagcagcagcagcagcuacugcagaaaccccaacaacgagaagggcagccacggcgugaagggcugggccuucgacgacggcaacgacguguggaugggcagaaccaucagcgaggagcugagaagcggcuacgagaccuucaaggugaucggcggcuggagcaagcccaacagcaagcugcagaucaacagacaggugaucguggacagaggcaacagaagcggcuacagcggcaucuucagcguggagggcaagagcugcaucaacagaugcuucuacguggagcugaucagaggcagaaagcaggagaccgaggugugguggaccagcaacagcaucgugguguucugcggcaccagcggcaccuacggcaccggcagcuggcccgacggcgccgacaucaaccugaugcccaucuga

SEQ ID NO: 175574 - RNA, 1410 nt, Artificial Sequence; identical to SEQ ID NO: 174790
  derived and/or modified CDS sequence (opt4) from neuraminidase__InfluenzaA__ABJ09231

SEQ ID NO: 175575 - RNA, 1410 nt, Artificial Sequence; identical to SEQ ID NO: 174790
  derived and/or modified CDS sequence (opt4) from neuraminidase__InfluenzaA__ABJ09242

SEQ ID NO: 175576 - RNA, 1410 nt, Artificial Sequence; identical to SEQ ID NO: 174344
  derived and/or modified CDS sequence (opt4) from neuraminidase__InfluenzaA__ABJ09253

SEQ ID NO: 175577 - RNA, 1410 nt, Artificial Sequence
  derived and/or modified CDS sequence (opt4) from neuraminidase__InfluenzaA__ABJ09264
augaaccccaaccagaagaucaucaccaucggcagcgugagccugaccaucgccaccaucugcuuccugaugcagaucgccauccuggugaccaccgugacccugcacuucaagcaguacgagugcaacagcccccccaacaaccaggugaugcugugcgagcccaccaucaucgagagaaacaucaccgagaucguguacaugaccaacaccaccaucgagaaggagaucugccccaagcuggccgaguacagaaacuggagcaagccccagugcaacaucaccggcuucgcccccuucagcaaggacaacagcaucagacugagcgccggcggcgacaucugggugaccagagagcccuacgugagcugcgaccccgacaagugcuaccaguucgcccugggccagggcaccacccugaacaacagacacagcaacgacaccgugcacgacagaacccccuacagaacccugcugaugaacgagcugggcgugcccuuccaccugggcaccaagcaggugugcaucgccuggagcagcagcagcugccacgacggcaaggccuggcugcacgugugcgugaccggccacgacgagaacgccaccgccagcuucaucuacaacggcagacugguggacagcaucggcagcuggagcaagaagauccugagaacccaggagagcgagugcgugugcaucaacggcaccugcaccguggugaugaccgacggcagcgccagcggcaaggccgacaccaagauccuguucaucgaggagggcaagaucgugcacaucagcccccugagcggcagcgcccagcacguggaggagugcagcugcuaccccagauaccccggcgugagaugcgugugcagagacaacuggaagggcagcaacagacccaucguggacaucaacgugaaggacuacagcaucgugagcagcuacgugugcagcggccuggugggcgacacccccagaaagaacgacagcagcagcagcagccacugccugaaccccaacaacgaggagggcggccacggcgugaagggcugggccuucgacgacggcaacgacguguggaugggcagaaccaucagcgagaagcugagaagcggcuacgagaccuucaaggugaucgagggcuggagcaagcccaacagcaagcugcagaucaacagacaggugaucguggacagaggcaacagcagcggcuacagcggcaucuucagcguggagggcaagagcugcaucaacagaugcuucuacguggagcugaucagaggcagaaagcaggagaccgaggugugguggaccagcaacagcaucguggugcugugcggcaccagcggcaccuacggcaccggcagcuggcccgacggcgccgacaucaaccugaugcccaucuga

SEQ ID NO: 175578 - RNA, 1410 nt, Artificial Sequence
  derived and/or modified CDS sequence (opt4) from neuraminidase__InfluenzaA__ABJ09286
augaaccccaaccagaagaucaucaccaucggcagcgugagccugaccaucgccaccaucugcuuccugaugcagaucgccauccuggugaccaccgugacccugcacuucaagcaguacgagugcaacagcccccccaacaaccaggugaugcugugcgagcccaccaucaucgagagaaacaucaccgagaucguguaccugaccaacaccaccaucgagaaggagaucugccccaagcuggccgaguacagaaacuggagcaagccccagugcaacaucaccggcuucgcccccuucagcaaggacaacagcaucagacugagcgccggcggcgacaucugggugaccagagagcccuacgugagcugcgaccccgacaagugcuaccaguucgcccugggccagggcaccacccugaacaacggccacagcaacgacaccgugcacgacagaacccccuacagaacccugcugaugaacgagcugggcgugcccuuccaccugggcaccaagcaggugugcaucgccuggagcagcagcagcugccacgacggcaaggccuggcugcacgugugcgugaccggcgacgacgagaacgccaccgccagcuucaucuacaacggcagacugguggacagcaucggcagcuggagcaagaagauccugagaacccaggagagcgagugcgugugcaucaacggcaccugcaccguggugaugaccgacggcagcgccagcggcaaggccgacaccaagauccuguucaucgaggagggcaagaucgugcacaccagcccccugagcggcagcgcccagcacguggaggagugcagcugcuaccccagauaccccggcgugagaugcgugugcagagacaacuggaagggcagcaacagacccaucguggacaucaacgugaaggacuacagcaucgugagcagcuacgugugcagcggccuggugggcgacacccccagaaagaacgacagcagcagcagcagccacugccuggaccccaacaacgaggagggcggccacggcgugaagggcugggccuucgacgacggcaacgacguguggaugggcagaaccaucagcgagaagcugagaagcggcuacgagaccuucaaggugaucgagggcuggagcaagcccaacagcaagcugcagaucaacaagcaggugaucguggacagaggcaacagaagcggcuacagcggcaucuucagcguggagggcaagagcugcaucaacagaugcuucuacguggagcugaucagaggcagaaagcaggagaccgaggugcuguggaccagcaacagcaucgugguguucugcggcaccagcggcaccuacggcaccggcagcuggcccgacggcgccgacaucaaccugaugcccaucuga

SEQ ID NO: 175579 - RNA, 1410 nt, Artificial Sequence; identical to SEQ ID NO: 174344
  derived and/or modified CDS sequence (opt4) from neuraminidase__InfluenzaA__ABJ09308

SEQ ID NO: 175580 - RNA, 1410 nt, Artificial Sequence; identical to SEQ ID NO: 175548
  derived and/or modified CDS sequence (opt4) from neuraminidase__InfluenzaA__ABJ09319

SEQ ID NO: 175581 - RNA, 1413 nt, Artificial Sequence; identical to SEQ ID NO: 175013
  derived and/or modified CDS sequence (opt4) from neuraminidase__InfluenzaA__ABJ09330

SEQ ID NO: 175582 - RNA, 1410 nt, Artificial Sequence
  derived and/or modified CDS sequence (opt4) from neuraminidase__InfluenzaA__ABJ09341
augaaccccaaccagaagaucaucaccaucggcagcgugagccugaccaucgccaccaucugcuuccugaugcagaucgccauccuggugaccaccgugacccugcacuucaagcaguacgagugcaacagcccccccaacaaccaggugaugcugugcgagcccaccaucaucgagagaaacaucaccgagaucguguaccugaccaacaccaccaucgagaaggagaucugccccaagcuggccgaguacagaaacuggagcaagccccagugcaacaucaccggcuucgcccccuucagcaaggacaacagcaucagacugagcgccggcggcgacaucugggugaccagagagcccuacgugagcugcgaccccgacaagugcuaccaguucgcccugggccagggcaccacccugaacaacggccacagcaacgacaccgugcacgacagaacccccuacagaacccugcugaugaacgagcugggcgugcccuuccaccugggcaccaagcaggugugcaucgccuggagcagcagcagcugccacgacggcaaggccuggcugcacgugugcgugaccggcgacgacgagaacgccaccgccagcuucaucuacaacggcagacugguggacagcaucggcagcuggagcaagaagauccugagaacccaggagagcgagugcgugugcaucaacggcaccugcaccguggugaugaccgacggcagcgccagcggcaaggccgacaccaagauccuguucaucgaggagggcaagaucgugcacaccagcagccugcugggcagcgcccagcacguggaggagugcagcugcuaccccagauaccccggcgugagaugcgugugcagagacaacuggaagggcagcaacagacccaucguggacaucaacgugaaggacuacagcaucgugagcagcuacgugugcagcggccuggugggcgacacccccagaaagaacgacagcagcagcagcagccacugccuggaccccaacaacgaggagggcggccacggcgugaagggcugggccuucgacgacggcaacgacguguggaugggcagaaccaucagcgagaagcugagaagcggcuacgagaccuucaaggugaucgagggcuggagcaagcccaacagcaagcugcagaucaacagacaggugaucguggacagaggcaacagaagcggcuacagcggcaucuucagcguggagagcaagagcugcaucaacagaugcuucuacguggagcugaucagaggcagaaagcaggagaccgaggugcuguggaccagcaacagcaucgugguguucugcggcaccagcggcaccuacggcaccggcagcuggcccgacggcgccgacaucaaccugaugcccaucuga

SEQ ID NO: 175583 - RNA, 1410 nt, Artificial Sequence
  derived and/or modified CDS sequence (opt4) from neuraminidase__InfluenzaA__ABJ09352
augaaccccaaccagaagaucaucaccaucggcagcgugagccugaccaucgccaccaucugcuuccugaugcagaucgccauccuggugaccaccgugacccugcacuucaagcaguacgagugcaacagcccccccaacaaccaggugaugcugugcgagcccaccaucaucgagagaaacaucaccgagaucguguaccugaccaacaccaccaucgagaaggagaucugccccaagcuggccgaguacagaaacuggagcaagccccagugcaacaucaccggcuucgcccccuucagcaaggacaacagcaucagacugagcgccggcggcgacaucugggugaccagagagcccuacgugagcugcgaccccgacaagugcuaccaguucgcccugggccagggcaccacccugaacaacggccacagcaacgacaccgugcacggcagaacccccuacagaacccugcugaugaacgagcugggcgugcccuuccaccugggcaccaagcaggugugcaucgccuggagcagcagcagcugccacgacggcaaggccuggcugcacgugugcgugaccggcgacgacgagaacgccaccgccagcuucaucuacaacggcagacugguggacagcaucggcagcuggagcaagaagauccugagaacccaggagagcgagugcgugugcaucaacggcaccugcaccguggugaugaccgacggcagcgccagcggcaaggccgacaccaagauccuguucaucgaggagggcaagaucgugcacaccagcagccugagcggcagcgcccagcacguggaggagugcagcugcuaccccagauaccccggcgugagaugcgugugcagagacaacuggaagggcagcaacagacccaucguggacaucaacgugaaggacuacagcaucgugagcagcuacgugugcagcggccuggugggcgacacccccagaaagaacgacagcagcagcagcagccacugccuggaccccaacaacgaggagggcggccacggcgugaagggcugggccuucgacgacggcaacgacguguggaugggcagaaccaucagcgagaagcugagaagcggcuacgagaccuucaaggugaucgagggcuggagcaagcccaacagcaagcugcagaucaacagacaggugaucguggacagaggcaacagaagcggcuacagcggcaucuucagcguggagagcaagagcugcaucaacagaugcuucuacguggagcugaucagaggcagaaagcaggagaccgaggugcuguggaccagcaacagcaucgugguguucugcggcaccagcggcaccuacggcaccggcagcuggcccgacggcgccgacaucaaccugaugcccaucuga

SEQ ID NO: 175584 - RNA, 1407 nt, Artificial Sequence
  derived and/or modified CDS sequence (opt4) from neuraminidase__InfluenzaA__ABJ09374
augauccagagcaagaucaucaccaucggcagcgugagccugaccaucagcaccaucugcuucuucaugcagaucgccauccugaucaccaccgugacccugcacuucaagcaguacgaguucaacagcccccccaacaaccaggugaugcugugcgagcccaccaucaucgagagaaacaucaccgagaucguguaccugaccaacaccaccaucgagaaggagaucugccccaagcuggccgaguacagaaacuggagcaagccccagugcgacaucaccggcuucgcccccuucagcaaggacaacagcaucagacugagcgccggcggcgacaucugggugaccagagagcccuacgugagcugcgaccccgacaagugcuaccaguucgcccugggccagggcaccacccugaacaacgugcacagcaacgacaccgugcacgacagaacccccuacagaacccugcugaugaacgagcugggcgugcccuuccaccugggcaccaagcaggugugcaucgccuggagcagcagcagcugccacgacggcaaggccuggcugcacgugugcgugaccggcgacgacaagaacgccaccgccagcuucaucuacaacggcagacugguggacagcaucgugagcuggagcaagaagauccugagaacccaggagagcgagugcgugugcaucaacggcaccugcaccguggugaugaccgacggcagcgccagcggcaaggccgacaccaagauccuguucaucgaggagggcaagaucgugcacaccagcacccugagcggcagcgcccagcacguggaggagugcagcugcuaccccagauaccccggcgugagaugcgugugcagagacaacuggaagggcagcaacagacccaucguggacaucaacaucaaggacuacagcaucgugagcagcuacgugugcagcggccuggugggcgacacccccagaaagaacgacagcagcagcagcagccacugccuggaccccaacaacgaggagggcggccacggcgugaagggcugggccuucgacgacggcaacgacguguggaugggcagaaccaucagcgagaagcugagaagcggcuacgagaccuucaaggugaucgagggcuggagcaaccccaacagcaagcugcagaucaacagacaggugaucguggacagaggcaacagaagcggcuacagcggcaucuucagcguggagggcaagagcugcaucaacagaugcuucuacguggagcugaucagaggcaagaaggaggagaccgaggugcuguggaccagcaacagcaucgugguguucugcggcaccagcggcaccuacggcaccggcagcuggcccgacggcgccgacaucaaccugaugcccaucuga

SEQ ID NO: 175585 - RNA, 1410 nt, Artificial Sequence; identical to SEQ ID NO: 174774
  derived and/or modified CDS sequence (opt4) from neuraminidase__InfluenzaA__ABJ09385

SEQ ID NO: 175586 - RNA, 1410 nt, Artificial Sequence; identical to SEQ ID NO: 174313
  derived and/or modified CDS sequence (opt4) from neuraminidase__InfluenzaA__ABJ16590

SEQ ID NO: 175587 - RNA, 1410 nt, Artificial Sequence; identical to SEQ ID NO: 175578
  derived and/or modified CDS sequence (opt4) from neuraminidase__InfluenzaA__ABJ16601

SEQ ID NO: 175588 - RNA, 1413 nt, Artificial Sequence
  derived and/or modified CDS sequence (opt4) from neuraminidase__InfluenzaA__ABJ16612
augaaccccaaccagaagaucaucaccaucggcagcaucagcaucgccaucggcaucaucagccugaugcugcagaucggcaacaucaucagcaucugggccagccacagcauccagaccggcagccagaaccacaccggcgugugcaaccagagaaucaucaccuacgagaacagcaccugggugaaccacaccuacgugaacaucaacaacaccaacgugguggccggcaaggacaagaccagcgugacccuggccggcaacagcagccugugcagcaucagcggcugggccaucuacaccaaggacaacagcaucagaaucggcagcaagggcgacguguucgugaucagagagcccuucaucagcugcagccaccuggagugcagaaccuucuuccugacccagggcgcccugcugaacgacaagcacagcaacggcaccgugaaggacagaagccccuacagagcccugaugagcugcccccugggcgaggcccccagccccuacaacagcaaguucgagagcguggccuggagcgccagcgccugccacgacggcaugggcuggcugaccgugggcaucagcggccccgacaacggcgccguggccgugcugaaguacaacggcaucaucaccgagaccaucaagagcuggaagaagagaauccugagaacccaggagagcgagugcgugugcgugaacggcagcugcuucaccaucaugaccgacggccccagcaacggcgccgccagcuacaagaucuucaagaucgagaagggcaaggugaccaagagcaucgagcugaacgcccccaacuuccacuacgaggagugcagcugcuaccccgacaccggcaccgugaugugcgugugcagagacaacuggcacggcagcaacagacccugggugagcuucaaccagaaccuggacuaccagaucggcuacaucugcagcggcguguucggcgacaaccccagacccaaggacggcgagggcagcugcaaccccgugaccguggacggcgccgacggcgugaagggcuucagcuacaaguacggcaacggcguguggaucggcagaaccaagagcaacagacugagaaagggcuucgagaugaucugggaccccaacggcuggaccgacaccgacagcgacuucagcgugaagcaggacgugguggccaucaccgacuggagcggcuacagcggcagcuucgugcagcaccccgagcugaccggccuggacugcaucagacccugcuucuggguggagcuggugagaggccugcccagagagaacaccaccaucuggaccagcggcagcagcaucagcuucugcggcgugaacagcgacaccgccaacuggagcuggcccgacggcgccgagcugcccuucaccaucgacaaguga

SEQ ID NO: 175589 - RNA, 1410 nt, Artificial Sequence; identical to SEQ ID NO: 175578
  derived and/or modified CDS sequence (opt4) from neuraminidase__InfluenzaA__ABJ16623

SEQ ID NO: 175590 - RNA, 1410 nt, Artificial Sequence
  derived and/or modified CDS sequence (opt4) from neuraminidase__InfluenzaA__ABJ16634
augaaccccaaccagaagaucaucaccaucggcagcgugagccugaccaucagcaccaucugcuucuucaugcagaucgccauccugaucaccaccgugacccugcacuucaagcaguacgaguucaacagcccccccaacaaccaggugaugcugugcgagcccaccaucaucgagagaaacaucaccgagaucguguaccugaccaacaucaccaucgagaaggagaucugccccaagcuggccgaguacagaaacuggagcaagccccagugcgacaucaccggcuucgcccccuucagcaaggacaacagcaucagacugagcgccggcggcgacaucugggugaccagagagcccuacgugagcugcgaccccgacaagugcuaccaguucgcccugggccagggcaccacccugaacaacgugcacagcaacgacaccgugcacgacagaacccccuacagaacccugcugaugaacgagcugggcgugcccuuccaccugggcaccaagcaggugugcaucgccuggagcagcagcagcugccacgacggcaaggccuggcugcacgugugcgugaccggcgacgacaagaacgccaccgccagcuucaucuacaacggcagacugguggacagcaucgugagcuggagcaagaagauccugagaacccaggagagcgagugcgugugcaucaacggcaccugcaccguggugaugaccgacggcagcgccagcggcaaggccgacaccaagauccuguucaucgaggagggcaagaucgugcacaccagcacccugagcggcagcgcccagcacguggaggagugcagcugcuaccccagauaccccggcgugagaugcgugugcagagacaacuggaagggcagcaacagacccaucguggacaucaacaucaaggacuacagcaucgugagcagcuacgugugcagcggccuggugggcgacacccccagaaagaacgacagcagcagcagcagccacugccuggaccccaacaacgaggagggcggccacggcgugaagggcugggccuucgacgacggcaacgacguguggaugggcagaaccaucagcgagaagcugagaagcggcuacgagaccuucaaggugaucgagggcuggagcaaccccaacagcaagcugcagaucaacagacaggugaucguggacagaggcaacagaagcggcuacagcggcaucuucagcguggagggcaagagcugcaucaacagaugcuucuacguggagcugaucagaggcagaaaggaggagaccgaggugcuguggaccagcaacagcaucgugguguucugcggcaccagcggcaccuacggcaccggcagcuggcccgacggcgccgacaucaaccugaugcccaucuga

SEQ ID NO: 175591 - RNA, 1413 nt, Artificial Sequence; identical to SEQ ID NO: 174446
  derived and/or modified CDS sequence (opt4) from neuraminidase__InfluenzaA__ABJ16656

SEQ ID NO: 175592 - RNA, 1413 nt, Artificial Sequence; identical to SEQ ID NO: 174446
  derived and/or modified CDS sequence (opt4) from neuraminidase__InfluenzaA__ABJ16667

SEQ ID NO: 175593 - RNA, 1413 nt, Artificial Sequence
  derived and/or modified CDS sequence (opt4) from neuraminidase__InfluenzaA__ABJ16678
augaaccccaaccagaagaucaucaccaucggcagcaucagcaucgccaucggcaucaucagccugaugcugcagaucggcaacaucaucagcaucugggccagccacagcauccagaccggcagccagaaccacaccggcaucugcaaccagagaaucaucaccuacgagaacagcaccugggugaaccacaccuacgugaacaucaacaacaccaacgugguggccggcaaggacaagaccagcgugacccuggccggcaacagcagccugugcagcaucagcggcugggccaucuacaccaaggacaacagcaucagaaucggcagcaagggcgacguguucgugaucagagagcccuucaucagcugcagccaccuggagugcagaaccuucuuccugacccagggcgcccugcugaacgacaagcacagcaacggcaccgugaaggacagaagccccuacagagcccugaugagcugcccccugggcgaggcccccagccccuacaacagcaaguucgagagcguggccuggagcgccagcgccugccacgacggcaugggcuggcugaccaucggcaucagcggccccgacaacggcgccguggccgugcugaaguacaacggcaucaucaccgagaccaucaagagcuggaagaagagaauccugagaacccaggagagcgagugcgugugcgugaacggcagcugcuucaccaucaugaccgacggccccagcaacggcgccgccagcuacaagaucuucaagaucgagaagggcaaggugaccaagagcaucgagcugaacgcccccaacuuccacuacgaggagugcagcugcuaccccgacaccggcaccgugaugugcgugugcagagacaacuggcacggcagcaacagacccugggugagcuucaaccagaaccuggacuaccagaucggcuacaucugcagcggcguguucggcgacaaccccagacccaaggacggcaagggcagcugcaaccccgugaccguggacggcgccgacggcgugaagggcuucagcuacaaguacggcaacggcguguggaucggcagaaccaagagcaacagacugagaaagggcuucgagaugaucugggaccccaacggcuggaccgacaccgacagcgacuuccuggugaagcaggacgugguggccaucaccgacuggagcggcuacagcggcagcuucgugcagcaccccgagcugaccggccuggacugcaucagacccugcuucuggguggagcuggugagaggccugcccagagagaacaccaccaucuggaccagcggcagcagcaucagcuucugcggcguggacagcgacaccgccaacuggagcuggcccgacggcgccgagcugcccuucaccaucgacaaguga

SEQ ID NO: 175594 - RNA, 1413 nt, Artificial Sequence; identical to SEQ ID NO: 174446
  derived and/or modified CDS sequence (opt4) from neuraminidase__InfluenzaA__ABJ16689

SEQ ID NO: 175595 - RNA, 1410 nt, Artificial Sequence
  derived and/or modified CDS sequence (opt4) from neuraminidase__InfluenzaA__ABJ16700
augaaccccaaccagaagaucaucaccaucggcagcgugagccugaccaucgccaccaucugcuuccugaugcagaucgccauccuggugaccaccgugacccugcacuucaagcaguacgagugcaacagcccccccaacaaccaggugaugcugugcgagcccaccaucaucgagagaaacaucaccgagaucguguaccugaccaacaccaccaucgagaaggagaucugccccaagcuggccgaguacagaaacuggagcaagccccagugcaacaucaccggcuucgcccccuucagcaaggacaacagcaucagacugagcgccggcggcgacaucugggugaccagagagcccuacgugagcugcgaccccgacaagugcuaccaguucgcccugggccagggcaccacccugaacaacggccacagcaacgacaccgugcacgacagaacccccuacagaacccugcugaugaacgagcugggcgugcccuuccaccugggcaccaagcaggugugcaucgccuggagcagcagcagcugccacgacggcaaggccuggcugcacgugugcgugaccggcgacgacgagaacgccaccgccagcuucaucuacaacggcagacugguggacagcaucggcagcuggagcaagaagauccugagaacccaggagagcgagugcgugugcaucaacggcaccugcaccguggugaugaccgacggcagcgccagcggcaaggccgacaccaagauccuguucaucgaggagggcaagaucgugcacaccagcagccugagcggcagcgcccagcacguggaggagugcagcugcuaccccagauaccccggcgugagaugcgugugcagagacaacuggaagggcagcaacagacccaucguggacaucaacgugaaggacuacagcaucgugagcagcuacgugugcagcggccuggugggcgacacccccagaaagaacgacagcagcagcagcagccacugccuggaccccaacaacgaggagggcggccacggcgugaagggcugggccuucgacgacggcaacgacguguggaugggcagaaccaucagcgagaagcugagaagcggcuacgagaccuucaaggugaucgagggcuggagcaagcccaacagcaagcugcagaucaacagacaggugaucguggacagaggcaacagaagcggcuacagcggcaucuucagcguggagagcaagagcugcaucaacagaugcuucuacguggagcugaucagaggcaagaagcaggagaccgaggugcuguggaccagcaacagcaucgugguguucugcggcaccagcggcaccuacggcaccggcagcuggcccgacggcgccgacaucaaccugaugcccaucuga

SEQ ID NO: 175596 - RNA, 1410 nt, Artificial Sequence
  derived and/or modified CDS sequence (opt4) from neuraminidase__InfluenzaA__ABJ16711
augaaccccaaccagaagaucaucaccaucggcagcgugagccugaccaucgccaccaucugcuuccugaugcagaucgccauccuggugaccaccgugacccugcacuucaagcaguacgagugcaacagcccccccaacaaccaggugaugcugugcgagcccaccaucaucgagagaaacaucaccgagaucguguaccugaccaacaccaccaucgagaaggagaucugccccaagcuggccgaguacagaaacuggagcaagccccagugcaacaucaccggcuucgcccccuucagcaaggacaacagcaucagacugagcgccggcggcgacaucugggugaccagagagcccuacgugagcugcgaccccgacaagugcuaccaguucgcccugggccagggcaccacccugaacaacggccacagcaacgacaccgugcacgacagaacccccuacagaacccugcugaugaacgagcugggcgugcccuuccaccugggcaccaagcaggugugcaucgccuggagcagcagcagcugccacgacggcaaggccuggcugcacgugugcgugaccggcgacgacgagaacgccaccgccagcuucaucuacaacggcagacugguggacagcaucggcagcuggagcaagaagauccugagaacccaggagagcgagugcgugugcaucaacggcaccugcaccguggugaugaccgacggcagcgccagcggcaaggccgacaccaagauccuguucaucgaggagggcaagaucgugcacaccagcagccugagcggcagcgcccagcacguggaggagugcagcugcuaccccagauaccccggcgugagaugcgugugcagagacaacuggaagggcagcaacagacccaucguggacaucaacaucaaggacuacagcaucgugagcagcuacgugugcagcggccuggugggcgacacccccagaaagaacgacagcagcagcagcagccacugccuggaccccaacaacgaggagggcggccacggcgugaagggcugggccuucgacgacggcaacgacgccuggaugggcagaaccaucagcgagaagcugagaagcggcuacgagaccuucaaggugaucgagggcuggagcaagagcaacagcaagcugcagaucaacagacaggugaucguggacagaggcaacagaagcggcuacagcggcaucuucagcguggagggcaagagcugcaucaacagaugcuucuacguggagcugaucagaggcagaaagcaggagaccgaggugcuguggaccagcaacagcaucgugguguucugcggcaccagcggcaccuacggcaccggcagcuggcccgacggcgccgacaucaaccugaugcccaucuga

SEQ ID NO: 175597 - RNA, 1413 nt, Artificial Sequence
  derived and/or modified CDS sequence (opt4) from neuraminidase__InfluenzaA__ABJ16733
augaaccccaaccagaagaucaucaccaucggcagcaucagcguggccaucggcaucaucaaccugauccugcagaucggcaacaucaucagcaucugggccagccacagcauccagaccggcagccagaacuacaccggcaucugcaaccagagaaucaucaccuacgagaacagaaccugggugaaccagaccuacgugaacaucaacaacaccaacgugguggccggcaaggacaagaccagcaugacccuggccggcaacagcagccugugccccaucagaggcugggccaucuacaccaaggacaacagcaucagaaucggcagcaagggcgacaucuucgugaucagagagcccuucaucagcugcagccaccuggagugcagaaccuucuuccugacccagggcgcccugcugaacgacaagcacagcaacggcaccaucaaggacagaagccccuucagagcccugaugagcugcccccugggcgaggcccccagccccuacaacagcagauucgagagcguggccuggagcgccagcgccugccacgacggccugggcuggcugaccaucggcaucagcggccccgacaacggcgccguggccgugcugaaguacaacggcaucaucaccgagaccaucaagagcuggaagaagcagauccugagaacccaggagagcgagugcgugugcgugaacggcagcugcuucaccaucaugaccgacggccccagcaacagagccgccagcuacagaaucuucaagaucgagaagggcagagugaccaagagcaucgagcuggacgcccccaacuaccacuacgaggagugcagcugcuaccccgacaccggcaccgugaugugcgugugcagagacaacuggcacggcagcaacagacccugggugagcuucaaccagaaccuggacuaccagaucggcuacaucugcagcggcguguucggcgacaaccccagacccaaggacggcgagggcagcugcaaccccgugaccguggacggcgccgacggcgugaagggcuucagcuacagauacggcaacggcguguggaucggcagaaccaagagcaacagacugagaaagggcuucgagaugaucugggaccccaacggcuggaccgacaccgacagcgacuucagcaugaagcaggacgugguggccaugaccgacuggagcggcuacagcggcagcuucgugcagcaccccgagcugaccggccuggacugcaugagacccugcuucuggguggagcuggugagaggccugcccagagagaacaccaccaucuggaccagcggcagcagcaucagcuucugcggcgugaacagcgagaccgccaacuggagcuggcccgacggcgccgagcugcccuucaccaucgacaaguga

SEQ ID NO: 175598 - RNA, 1410 nt, Artificial Sequence; identical to SEQ ID NO: 174790
  derived and/or modified CDS sequence (opt4) from neuraminidase__InfluenzaA__ABJ16744

SEQ ID NO: 175599 - RNA, 1410 nt, Artificial Sequence; identical to SEQ ID NO: 174790
  derived and/or modified CDS sequence (opt4) from neuraminidase__InfluenzaA__ABJ16755

SEQ ID NO: 175600 - RNA, 1410 nt, Artificial Sequence; identical to SEQ ID NO: 174790
  derived and/or modified CDS sequence (opt4) from neuraminidase__InfluenzaA__ABJ16766

SEQ ID NO: 175601 - RNA, 1410 nt, Artificial Sequence
  derived and/or modified CDS sequence (opt4) from neuraminidase__InfluenzaA__ABJ16777
augaaccccaaccagaagaucaucaccaucggcagcgugagccugaccaucgccaccaucugcuuccugaugcagaucgccauccuggugaccaccgugacccugcacuucaagcaguacgagugcaacagcccccccaacaaccaggugaugcugugcgagcccaccaucaucgagagaaacaucaccgagaucguguaccugaccaacaccaccaucgagaaggagaucugccccaagcuggccgaguacagaaacuggagcaagccccagugcaacaucaccggcuucgcccccuucagcaaggacaacagcaucagacugagcgccggcggcgacaucugggugaccagagagcccuacgugagcugcgaccccgacaagugcuaccaguucgcccugggccagggcaccacccugaacaacggccacagcaacgacaccgugcacgacagaacccccuacagaacccugcugaugaacgagcugggcgugcccuuccaccugggcaccaagcaggugugcaucgccuggagcagcagcagcugccacgacggcaaggccuggcugcacgugugcgugaccggcgacgacgagaacgccaccgccagcuucaucuacaacggcagacugguggacagcaucggcagcuggagcaagaagauccugagaacccaggagagcgagugcgugugcaucaacggcaccugcaccguggugaugaccgacggcagcgccagcggcaaggccgacaccaagauccuguucaucgaggagggcaagaucgugcacaccagcagccugagcggcagcgcccagcacguggaggagugcagcugcuaccccagauaccccggcgugagaugcgugugcagagacaacuggaagggcagcaacagacccaucguggacaucaacaucaaggacuacagcaucgugagcagcuacgugugcagcggccuggugggcgacacccccagaaagaacgacagcagcagcagcagccacugccuggaccccaacaacgaggagggcggccacggcgugaagggcugggccuucgacgacggcaacgacguguggaugggcagaaccaucagcgagaagcugagaagcggcuacgagaccuucaaggugaucgagggcuggagcaagcccaacagcaagcugcagaucaacagacaggugaucguggacagaggcaacagaagcggcuacagcggcaucuucagcguggagggcaagagcugcaucaacagaugcuucuacguggagcugaucagaggcagaaagcaggagaccgaggugcuguggaccagcaacagcaucgugguguucugcggcaccagcggcaccuacggcaccggcagcuggcccgacggcgccgacaucaaccugaugcccaucuga

SEQ ID NO: 175602 - RNA, 1410 nt, Artificial Sequence; identical to SEQ ID NO: 174790
  derived and/or modified CDS sequence (opt4) from neuraminidase__InfluenzaA__ABJ16788

SEQ ID NO: 175603 - RNA, 1413 nt, Artificial Sequence; identical to SEQ ID NO: 175028
  derived and/or modified CDS sequence (opt4) from neuraminidase__InfluenzaA__ABJ53441

SEQ ID NO: 175604 - RNA, 1413 nt, Artificial Sequence
  derived and/or modified CDS sequence (opt4) from neuraminidase__InfluenzaA__ABJ53452
augaaccccaaccagaagaucaucaccaucggcagcaucagcaucgccaucggcaucaucagccugaugcugcagaucggcaacaucaucagcaucugggccagccacagcauccagaccggcagccagaaccacaccggcaucugcaaccagagaaucaucaccuacgagaacagcaccugggugaaccacaccuacgugaacaucaacaacaccaacgugaucgccggcaaggacaagaccagcgugacccuggccggcaacagcagccugugcagcaucagcggcugggccaucuacaccaaggacaacagcaucagaaucggcagcaagggcgacguguucgugaucagagagcccuucaucagcugcagccaccuggagugcagaaccuucuuccugacccagggcgcccugcugaacgacaagcacagcaacggcaccgugaaggacagaagccccuacagagcccugaugagcugcccccugggcgaggcccccagccccuacaacagcaaguucgagagcguggccuggagcgccagcgccugccacgacggcaugggcuggcugaccaucggcaucagcggccccgacaacggcgccguggccgugcugaaguacaacggcaucaucaccgagaccaucaagagcuggaagaagagaauccugagaacccaggagagcgagugcgugugcgugaacggcagcugcuucaccaucaugaccgacggccccagcaacggcgccgccagcuacaagaucuucaagaucgagaagggcaaggugaccaagagcaucgagcugaacgcccccaacuuccacuacgaggagugcagcugcuaccccgacaccggcaccgugaugugcgugugcagagacaacuggcacggcagcaacagacccugggugagcuucaaccagaaccuggacuaccagaucggcuacaucugcagcggcguguucggcgacaaccccagacccaaggacggcgagggcagcugcaaccccgugaccguggacggcgccgacggcgugaagggcuucagcuacaaguacggcaacggcguguggaucggcagaaccaagagcaacagacugagaaagggcuucgagaugaucugggaccccaacggcuggaccgacaccgacagcaacuucagcgugaagcaggacgugguggccaucaccgacuggagcggcuacagcggcagcuucgugcagcaccccgagcugaccggccuggacugcaucagacccugcuucuggguggagcuggugagaggccugcccagagagaacaccaccaucuggaccagcggcagcagcaucagcuucugcggcgugaacagcgacaccgccaacuggagcuggcccgacggcgccgagcugcccuucaccaucgacaaguga

SEQ ID NO: 175605 - RNA, 1410 nt, Artificial Sequence; identical to SEQ ID NO: 174772
  derived and/or modified CDS sequence (opt4) from neuraminidase__InfluenzaA__ABJ53463

SEQ ID NO: 175606 - RNA, 1410 nt, Artificial Sequence; identical to SEQ ID NO: 174772
  derived and/or modified CDS sequence (opt4) from neuraminidase__InfluenzaA__ABJ53474

SEQ ID NO: 175607 - RNA, 1410 nt, Artificial Sequence
  derived and/or modified CDS sequence (opt4) from neuraminidase__InfluenzaA__ABJ53485
augaaccccaaccagaagaucaucaccaucggcagcgugagccugaccaucagcaccaucugcuucuucaugcagaucgccauccugaucaccaccgugacccugcacuucaagcaguacgaguucaacagcccccccaacaaccaggugaugcugugcgagcccaccaucaucgagagaaacaucaccgagaucguguaccugaccaacaccaccaucgagaaggagaucugccccaagcuggccgaguacagaaacuggagcaagccccagugcaacaucaccggcuucgcccccuucagcaaggacaacagcaucagacugagcgccggcggcgacaucugggugaccagagagcccuacgugagcugcgaccccgacaagugcuaccaguucgcccugggccagggcaccacccugaacaacgugcacagcaacgacaccgugcacgacagaacccccuacagaacccugcugaugaacgagcugggcgugcccuuccaccugggcaccaagcaggugugcaucgccuggagcagcagcagcugccacgacggcaaggccuggcugcacgugugcgugaccggcgacgacaagaacgccaccgccagcuucaucuacaacggcagacugguggacagcaucgugagcuggagcaaggagauccugagaacccaggagagcgagugcgugugcaucaacggcaccugcaccguggugaugaccgacggcagcgccagcggcaaggccgacaccaagauccuguucaucgaggagggcaagaucgugcacaccagcacccugagcggcagcgcccagcacguggaggagugcagcugcuaccccagauaccccggcgugagaugcgugugcagagacaacuggaagggcagcaacagacccaucguggacaucaacaucaaggacuacagcaucgugagcagcuacgugugcagcggccuggugggcgacacccccagaaagaacgacagcagcagcagcagccacugccuggaccccaacaacgaggagggcggccacggcgugaagggcugggccuucgacgacggcaacgacguguggaugggcagaaccaucagcgagaagcugagacugggcuacgagaccuucaaggugaucgagggcuggagcaacagcaacagcaagcugcagaccaacagacaggugaucguggacagaggcaacagaagcggcuacagcggcaucuucagcguggagggcaagagcugcaucaacagaugcuucuacguggagcugaucagaggcagaaaggaggagaccgaggugcuguggaccagcaacagcaucgugguguucugcggcaccagcggcaccuacggcaccggcagcuggcccgacggcgccgacaucaaccugaugcccaucuga

SEQ ID NO: 175608 - RNA, 1413 nt, Artificial Sequence; identical to SEQ ID NO: 175416
  derived and/or modified CDS sequence (opt4) from neuraminidase__InfluenzaA__ABJ53496

SEQ ID NO: 175609 - RNA, 1413 nt, Artificial Sequence; identical to SEQ ID NO: 175416
  derived and/or modified CDS sequence (opt4) from neuraminidase__InfluenzaA__ABJ53507

SEQ ID NO: 175610 - RNA, 1413 nt, Artificial Sequence
  derived and/or modified CDS sequence (opt4) from neuraminidase__InfluenzaA__ABJ53518
augaaccccaaccagaagaucaucaccaucggcagcaucagcguggccaucggcaucaucaaccugauccugcagaucggcaacaucaucagcaucugggccagccacagcauccagaccggcagccagaacuacaccggcaucugcaaccagagaaucaucaccuacgagaacagaaccugggugaaccagaccuacgugaacaucaacaacaccaacgugguggccggcaaggacaagaccagcaugacccuggccggcaaccugagccugugccccaucagaggcugggccaucuacaccaaggacaacagcaucagaaucggcagcaagggcgacguguucgugaucagagagcccuucaucagcugcagccaccuggagugcagaaccuucuuccugacccagggcgcccugcugaacgacaagcacagcaacggcaccaucaaggacagaagccccuucagagcccugaugagcugcccccugggcgaggcccccagccccuacaacagcagauucgagagcguggccuggagcgccagcgccugccacgacggccugggcuggcugaccaucggcaucagcggccccgacaacggcgccguggccgugcugaaguacaacggcaucaucaccgagaccaucaagagcuggaagaagcagauccugagaacccaggagagcgagugcgugugcgugaacggcagcugcuucaccaucaugaccgacggccccagcaacagagccgccagcuacagaaucuucaagaucgagaagggcagagugaccaagagcaucgagcuggacgcccccaacuaccacuacgaggagugcagcugcuaccccgacaccggcaccgugaugugcgugugcagagacaacuggcacggcagcaacagacccugggugagcuucaaccagaaccuggacuaccagaucggcuacaucugcagcggcguguucggcgacaaccccagacccaaggacggcgagggcagcugcaaccccgugaccguggacggcgccgacggcgugaagggcuucagcuacagauacggcaacggcguguggaucggcagaaccaagagcaacagacugagaaagggcuucgagaugaucugggaccccaacggcuggaccgacaccgacagcgacuucagcaugaagcaggacgugguggccaugaccgacuggagcggcuacagcggcagcuucgugcagcaccccgagcugaccggccuggacugcaugagacccugcuucuggguggagcuggugagaggccugcccagagagaacaccaccaucuggaccagcggcagcagcaucagcuucugcggcgugaacagcgagaccgccaacuggagcuggcccgacggcgccgagcugcccuucaccaucgacaaguga

SEQ ID NO: 175611 - RNA, 1410 nt, Artificial Sequence; identical to SEQ ID NO: 174214
  derived and/or modified CDS sequence (opt4) from neuraminidase__InfluenzaA__ABK39965

SEQ ID NO: 175612 - RNA, 1410 nt, Artificial Sequence
  derived and/or modified CDS sequence (opt4) from neuraminidase__InfluenzaA__ABK39976
augaaccccaaccagaagaucaucaccaucggcagcgugagccugaccaucagcaccaccugcuucuucaugcagaucgccauccugaucaccaccgugacccugcacuucaagcaguacgaguucaacagcccccccaacaaccaggugaugcugugcgagcccaccaucaucgagagaaacaucaccgagaucguguaccugaccaacaccaccaucgagaaggagaucugccccaagcuggccgaguacagaaacuggagcaagccccagugcaacaucaccggcuucgcccccuucagcaaggacaacagcaucagacugagcgccggcggcgacaucugggugaccagagagcccuacgugagcugcgaccccgacaagugcuaccaguucgcccugggccagggcaccacccugaacaacgugcacagcaacgacaccgugcacgacagaacccccuacagaacccugcugaugaacgagcugggcgugcccuuccaccugggcaccaagcaggugugcaucgccuggagcagcagcagcugccacgacggcaaggccuggcugcacgugugcgugaccggcgacgacaagaacgccaccgccagcuucaucuacaacggcagacugguggacagcaucgugagcuggagcaaggagauccugagaacccaggagagcgagugcgugugcaucaacggcaccugcgccguggugaugaccgacggcagcgccagcggcaaggccgacaccaagauccuguucaucgaggagggcaagaucgugcacaccagcacccugagcggcagcgcccagcacguggaggagugcagcugcuaccccagauaccccggcgugagaugcgugugcagagacaacuggaagggcagcaacagacccaucguggacaucaacaucaaggacuacagcaucgugagcagcuacgugugcagcggccuggugggcgacacccccagaaagaacgacagcagcagcagcagccacugccuggaccccaacaacgaggagggcggccacggcgugaagggcugggccuucgacgacggcaacgacguguggaugggcagaaccaucagcgagaagcugagaagcggcuacgagaccuucaaggugaucgagggcuggagcaaccccaacagcaagcugcagaucaacagacaggugaucguggacagaggcaacagaagcggcuacagcggcaucuucagcguggagggcaagagcugcaucaacagaugcuucuacguggagcugaucagaggcagaaaggaggagaccgaggugcuguggaccagcaacagcaucgugguguucugcggcaccagcggcaccuacggcaccggcagcuggcccgacggcgccgacaucaaccugaugcccaucuga

SEQ ID NO: 175613 - RNA, 1410 nt, Artificial Sequence; identical to SEQ ID NO: 174772
  derived and/or modified CDS sequence (opt4) from neuraminidase__InfluenzaA__ABK39987

SEQ ID NO: 175614 - RNA, 1410 nt, Artificial Sequence; identical to SEQ ID NO: 174442
  derived and/or modified CDS sequence (opt4) from neuraminidase__InfluenzaA__ABK39998

SEQ ID NO: 175615 - RNA, 1410 nt, Artificial Sequence; identical to SEQ ID NO: 174387
  derived and/or modified CDS sequence (opt4) from neuraminidase__InfluenzaA__ABK40020

SEQ ID NO: 175616 - RNA, 1413 nt, Artificial Sequence
  derived and/or modified CDS sequence (opt4) from neuraminidase__InfluenzaA__ABK40031
augaaccccaaccagaagaucaucaccaucggcagcaucagcguggccaucggcaucaucaaccugauccugcagaucggcaacaucaucagcaucugggccagccacagcauccagaccggcagccagaacuacaccggcaucugcaaccagagaaucaucaccuacgagaacagaaccugggugaaccagaccuacgugaacaucaacaacaccaacgugguggccggcaaggacaagaccagcaugacccuggccggcaacagcagccugugccccaucagaggcugggccaucuacaccaaggacaacagcaucagaaucggcagcaagggcgacguguucgugaucagagagcccuucaucagcugcagccaccuggagugcagaaccuucuuccugacccagggcgcccugcugaacgacaagcacagcaacggcaccaucaaggacagaagccccuucagagcccugaugagcugcccccugggcgaggcccccagccccuacaacagcagauucgagagcguggccuggagcgccagcgccugccacgacggccugggcuggcugaccaucggcaucagcggccccgacaacggcgccguggccgugcugaaguacaacggcaucaucaccgagaccaucaagagcuggaagaagcagauccugagaacccaggagagcgagugcgugugcgugaacggcagcugcuucaccaucaugaccgacggccccagcaacagagccgccagcuacagaaucuucaagaucgagaagggcagagugaccaagagcaucgagcuggacgcccccaacuaccacuacgaggagugcagcugcuaccccgacaccggcaccgugaugugcgugugcagagacaacuggcacggcagcaacagacccugggugagcuucaaccagaaccuggacuaccagaucggcuacaucugcagcggcguguucggcgacaaccccagacccaaggacggcgagggcagcugcaaccccgugaccguggacggcgccgacggcgugaagggcuucagcuacagauacggcaacggcguguggaucggcagaaccaagagcaacagacugagaaagggcuucgagaugaucugggaccccaacggcuggaccgacaccgacagcgacuucagcaugaagcaggacgugguggccaugaccgacuggagcggcuacagcggcagcuucgugcagcaccccgagcugaccggccuggacugcaugagacccugcuucuggguggagcuggugagaggccugcccagagagaacaccaccaucuggaccagcggcagcagcaucagcuucugcggcgugaacagcgagaccgccaacuggagcuggcccgacggcgccgagcugcccuucaccaucgacaaguga

SEQ ID NO: 175617 - RNA, 1413 nt, Artificial Sequence; identical to SEQ ID NO: 175616
  derived and/or modified CDS sequence (opt4) from neuraminidase__InfluenzaA__ABK40042

SEQ ID NO: 175618 - RNA, 1413 nt, Artificial Sequence; identical to SEQ ID NO: 175616
  derived and/or modified CDS sequence (opt4) from neuraminidase__InfluenzaA__ABK40053

SEQ ID NO: 175619 - RNA, 1410 nt, Artificial Sequence; identical to SEQ ID NO: 174790
  derived and/or modified CDS sequence (opt4) from neuraminidase__InfluenzaA__ABK40064

SEQ ID NO: 175620 - RNA, 1410 nt, Artificial Sequence; identical to SEQ ID NO: 174790
  derived and/or modified CDS sequence (opt4) from neuraminidase__InfluenzaA__ABK40078

SEQ ID NO: 175621 - RNA, 1413 nt, Artificial Sequence; identical to SEQ ID NO: 175119
  derived and/or modified CDS sequence (opt4) from neuraminidase__InfluenzaA__ABK40513

SEQ ID NO: 175622 - RNA, 1413 nt, Artificial Sequence; identical to SEQ ID NO: 175119
  derived and/or modified CDS sequence (opt4) from neuraminidase__InfluenzaA__ABK40538

SEQ ID NO: 175623 - RNA, 1413 nt, Artificial Sequence
  derived and/or modified CDS sequence (opt4) from neuraminidase__InfluenzaA__ABK40549
augaaccccaaccagaagaucaucaccaucggcagcaucugcaugaccaucggcaucaucagccugauccugcagaucggcaacaucaucagcaucugggugagccacagcauccagaccggcagccagaaccacaccggcaucugcaaccagagaaucaucaccuacgagaacagcaccugggugaaccagaccuacgugaacaucaacaacaccaacgugguggccggcaaggacaccaccagcgugacccuggccggcaacagcagccugugccccaucagaggcugggccaucuacagcaaggacaacagcaucagaaucggcagcaagggcgacguguucgugaucagagagcccuucaucagcugcagccaccuggagugcagaaccuucuuccugacccagggcgcccugcugaacgacaagcacagcaacggcaccgugaaggacagaagccccuacagagcccugaugagcugccccaucggcgaggcccccagccccuacaacagcagauucgagagcguggccuggagcgccagcgccugccacgacggcaugggcuggcugaccaucggcaucagcggccccgacgacggcgccguggccgugcugaaguacaacggcaucaucaccgagaccaucaagagcuggagaaagagaauccugagaacccaggagagcgagugcgugugcgugaacggcagcugcuucaccaucaugaccgacggccccagcaacggccccgccagcuacagaaucuucaagaucgagaagggcaagaucaccaagagcaucgagcuggacgcccccaacagccacuacgaggagugcagcugcuaccccgacaccggcaccgugaugugcgugugcagagacaacuggcacggcagcaacagacccugggugagcuucaaccagaaccuggacuacaagaucggcuacaucugcagcggcguguucggcgacaaccccagacccaaggacggcaagggcagcugcgaccccgugaccguggacggcgccgacggcgugaagggcuucagcuacagauacggcaacggcguguggaucggcagaaccaagagcaacagcagcagaaagggcuucgagaugaucugggaccccaacggcuggaccgacaccgacagcaacuuccuggugaagcaggacgugguggccaugaccgacuggagcggcuacagcggcagcuucgugcagcaccccgagcugaccggccuggacugcaugagacccugcuucuggguggagcugaucagaggcagacccagagagaagaccaccaucuggaccagcggcagcagcaucagcuucugcggcgugaacagcgacaccgccaacuggagcuggcccgacggcgccgagcugcccuucaccaucgacaaguga

SEQ ID NO: 175624 - RNA, 1413 nt, Artificial Sequence; identical to SEQ ID NO: 175119
  derived and/or modified CDS sequence (opt4) from neuraminidase__InfluenzaA__ABK40560

SEQ ID NO: 175625 - RNA, 1413 nt, Artificial Sequence; identical to SEQ ID NO: 175119
  derived and/or modified CDS sequence (opt4) from neuraminidase__InfluenzaA__ABK40571

SEQ ID NO: 175626 - RNA, 1413 nt, Artificial Sequence; identical to SEQ ID NO: 175119
  derived and/or modified CDS sequence (opt4) from neuraminidase__InfluenzaA__ABK40582

SEQ ID NO: 175627 - RNA, 1413 nt, Artificial Sequence
  derived and/or modified CDS sequence (opt4) from neuraminidase__InfluenzaA__ABK40593
augaaccccaaccagaagaucaucaccaucggcagcaucugcaugaccaucggcaucaucagccugauccugcagaucggcaacaucaucagcaucugggugagccacagcauccagaccggcagccagaaccacaccggcaucugcaaccagagaaucaucaccuacgagaacagcaccugggugaaccagaccuacgugaacaucaacaacaccaacgugguggccggcaaggacaccaccagcgugacccuggccggcaacagcagccugugccccaucagaggcugggccaucuacagcaaggacaacagcaucagaaucggcagcaagggcgacguguucgugaucagagagcccuucaucagcugcagccaccuggagugcagaaccuucuuccugacccagggcgcccugcugaacgacaagcacagcaacggcaccgugaaggacagaagccccuacagagcccugaugagcugccccaucggcgaggcccccagccccuacaacagcagauucgagagcguggccuggagcgccagcgccugccacgacggcaugggcuggcugaccaucggcaucagcggccccgacgacggcgccguggccgugcugaaguacaacggcaucaucaccgagaccaucaagagcuggagaaagagaauccugagaacccaggagagcgagugcgugugcgugaacggcagcugcuucaccaucaugaccgacggccccagcaacggccccgccagccacagaaucuucaagaucgagaagggcaagaucaccaagagcaucgagcuggacgcccccaacagccacuacgaggagugcagcugcuaccccgacaccggcaccgugaugugcgugugcagagacaacuggcacggcagcaacagacccugggugagcuucaaccagaaccuggacuacaagaucggcuacaucugcagcggcguguucggcgacaaccccagacccaaggacggcaagggcagcugcgaccccgugaccguggacggcgccgacggcgugaagggcuucagcuacagauacggcaacggcguguggaucggcagaaccaagagcaacagcagcagaaagggcuucgagaugaucugggaccccaacggcuggaccgacaccgacagcaacuuccuggugaagcaggacgugguggccaugaccgacuggagcggcuacagcggcagcuucgugcagcaccccgagcugaccggccuggacugcaugagacccugcuucuggguggagcugaucagaggcagacccagagagaagaccaccaucuggaccagcggcagcagcaucagcuucugcggcgugaacagcgacaccgccaacuggagcuggcccgacggcgccgagcugcccuucaccaucgacaaguga

SEQ ID NO: 175628 - RNA, 1413 nt, Artificial Sequence; identical to SEQ ID NO: 175119
  derived and/or modified CDS sequence (opt4) from neuraminidase__InfluenzaA__ABK40604

SEQ ID NO: 175629 - RNA, 1410 nt, Artificial Sequence; identical to SEQ ID NO: 174790
  derived and/or modified CDS sequence (opt4) from neuraminidase__InfluenzaA__ABK40615

SEQ ID NO: 175630 - RNA, 1410 nt, Artificial Sequence; identical to SEQ ID NO: 174121
  derived and/or modified CDS sequence (opt4) from neuraminidase__InfluenzaA__ABK40626

SEQ ID NO: 175631 - RNA, 1410 nt, Artificial Sequence
  derived and/or modified CDS sequence (opt4) from neuraminidase__InfluenzaA__ABK40648
augaaccccaaccagaagaucaucaccaucggcagcgugagccugaccaucgccaccaucugcuuccugaugcagaucgccauccuggugaccaccgugacccugcacuucaagcaguacgagugcaacagcccccccaacaaccaggugaugcugugcgagcccaccaucaucgagagaaacaucaccgagaucguguaccugaccaacaccaccaucgagaaggagaucugccccaagcuggccgaguacagaaacuggagcaagccccagugcaagaucaccggcuucgcccccuucagcaaggacaacagcaucagacugagcgccggcggcgacaucugggugaccagagagcccuacgugagcugcgaccccggcaagugcuaccaguucgcccugggccagggcaccacccugaacaacagacacagcaacgacaccgugcacgacagaacccccuacagaacccugcugaugaacgagcugggcauccccuuccaccugggcaccaagcaggugugcaucgccuggagcagcagcagcugccacgacggcaaggccuggcugcacgugugcgugaccggccacgacgagaacgccaccgccagcuucaucuacgacggcagacugguggacagcaucggcagcuggagcaagaacauccugagaacccaggagagcgagugcgugugcaucaacggcaccugcaccguggugaugaccgacggcagcgccagcgacagagccgacaccaagauccuguucaucgaggagggcaagaucgugcacaucagcccccugagcggcagcgcccagcacguggaggagugcagcugcuaccccagauaccccggcgugagaugcgugugcagagacaacuggaagggcagcaacagacccaucguggacaucaacgugaaggacuacagcaucgugagcagcuacgugugcagcggccuggugggcgacacccccagaaagaacgacagcagcagcagcagcuacugcuggaaccccaacaacgagaagggcggccacggcgugaagggcugggccuucgacgacggcaacgacguguggaugggcagaaccaucagcgaggagagcagaagcggcuacgagaccuucaaggugaucggcggcuggagcaagcccaacagcaagcugcagaucaacagacaggugaucguggacagaggcaacagaagcggcuacagcggcaucuucagcguggagggcaagagcugcaucaacagaugcuucuacguggagcugaucagaggcagaaagcaggagaccgaggugugguggaccagcaacagcaucgugguguucugcggcaccagcggcaccuacggcaccggcagcuggcccgacggcgccgacaucaaccugaugcccaucuga

SEQ ID NO: 175632 - RNA, 1410 nt, Artificial Sequence; identical to SEQ ID NO: 175173
  derived and/or modified CDS sequence (opt4) from neuraminidase__InfluenzaA__ABK40659

SEQ ID NO: 175633 - RNA, 1410 nt, Artificial Sequence; identical to SEQ ID NO: 175161
  derived and/or modified CDS sequence (opt4) from neuraminidase__InfluenzaA__ABK40681

SEQ ID NO: 175634 - RNA, 1413 nt, Artificial Sequence
  derived and/or modified CDS sequence (opt4) from neuraminidase__InfluenzaA__ABK40692
augaaccccaaccagaagaucaucaccaucggcagcaucagcaucgccaucggcaucaucagccugaugcugcagaucggcaacaucaucagcaucugggccagccacagcauccagaccggcagccagaaccacaccggcaucugcaaccagagaaucaucaccuacgagaacagcaccugggugaaccacaccuacgugaacaucaacaacaccaacgugguggccggcaaggacaagaccagcgugacccuggccggcaacagcagccugugcagcaucagcggcugggccaucuacaccaaggacaacagcaucagaaucggcagcaagggcgacguguucgugaucagagagcccuucaucagcugcagccaccuggagugcagaaccuucuuccugacccagggcgcccugcugaacgacaagcacagcaacggcaccgugaaggacagaagccccuacagagcccugaugagcugcccccugggcgaggcccccagccccuacaacagcaaguucgagagcguggccuggagcgccagcgccugccacgacggcaugggcuggcugaccaucggcaucagcggccccgacaacggcgccguggccgugcugaaguacaacggcaucaucaccgagaccaucaagagcugggagaagagaauccugagaacccaggagagcgagugcgugugcgugaacggcagcugcuucaccaucaugaccgacggccccagcaacggcgccgccagcuacaagaucuucaagaucgagaagggcaaggugaccaagagcguggagcugaacgcccccaacuuccacuacgaggagugcagcugcuaccccgacaccggcaccgugaugugcgugugcagagacaacuggcacggcagcaacagacccugggugagcuucaaccagaaccuggacuaccagaucggcuacaucugcagcggcguguucggcgacaaccccagacccaaggacggcaagggcagcugcaaccccgugaccguggacggcgccgacggcgugaagggcuucagcuacaaguacggcaacggcguguggaucggcagaaccaagagcaacagacugagaaagggcuucgagaugaucugggaccccaacggcuggaccgacaccgacagcgacuucagcgugaagcaggacgugguggccaucaccgacuggagcggcuacagcggcagcuucgugcagcaccccgagcugaccggccuggacugcaucagacccugcuucuggguggagcuggugagaggccugcccagagagaacaccaccaucuggaccagcggcagcagcaucagcuucugcggcguggacagcgacaccgccaacuggagcuggcccgacggcgccgagcugcccuucaccaucgacaaguga

SEQ ID NO: 175635 - RNA, 1410 nt, Artificial Sequence; identical to SEQ ID NO: 174790
  derived and/or modified CDS sequence (opt4) from neuraminidase__InfluenzaA__ABK40703

SEQ ID NO: 175636 - RNA, 1410 nt, Artificial Sequence; identical to SEQ ID NO: 174790
  derived and/or modified CDS sequence (opt4) from neuraminidase__InfluenzaA__ABK40714

SEQ ID NO: 175637 - RNA, 1410 nt, Artificial Sequence; identical to SEQ ID NO: 174790
  derived and/or modified CDS sequence (opt4) from neuraminidase__InfluenzaA__ABK40725

SEQ ID NO: 175638 - RNA, 1410 nt, Artificial Sequence; identical to SEQ ID NO: 174790
  derived and/or modified CDS sequence (opt4) from neuraminidase__InfluenzaA__ABK40736

SEQ ID NO: 175639 - RNA, 1410 nt, Artificial Sequence; identical to SEQ ID NO: 175505
  derived and/or modified CDS sequence (opt4) from neuraminidase__InfluenzaA__ABK40747

SEQ ID NO: 175640 - RNA, 1413 nt, Artificial Sequence; identical to SEQ ID NO: 175011
  derived and/or modified CDS sequence (opt4) from neuraminidase__InfluenzaA__ABK79951

SEQ ID NO: 175641 - RNA, 1413 nt, Artificial Sequence; identical to SEQ ID NO: 175616
  derived and/or modified CDS sequence (opt4) from neuraminidase__InfluenzaA__ABK79973

SEQ ID NO: 175642 - RNA, 1410 nt, Artificial Sequence; identical to SEQ ID NO: 174790
  derived and/or modified CDS sequence (opt4) from neuraminidase__InfluenzaA__ABK79984

SEQ ID NO: 175643 - RNA, 1410 nt, Artificial Sequence; identical to SEQ ID NO: 174790
  derived and/or modified CDS sequence (opt4) from neuraminidase__InfluenzaA__ABK79995

SEQ ID NO: 175644 - RNA, 1413 nt, Artificial Sequence; identical to SEQ ID NO: 175119
  derived and/or modified CDS sequence (opt4) from neuraminidase__InfluenzaA__ABK80028

SEQ ID NO: 175645 - RNA, 1413 nt, Artificial Sequence; identical to SEQ ID NO: 175119
  derived and/or modified CDS sequence (opt4) from neuraminidase__InfluenzaA__ABK80039

SEQ ID NO: 175646 - RNA, 1413 nt, Artificial Sequence; identical to SEQ ID NO: 175119
  derived and/or modified CDS sequence (opt4) from neuraminidase__InfluenzaA__ABK80050

SEQ ID NO: 175647 - RNA, 1410 nt, Artificial Sequence
  derived and/or modified CDS sequence (opt4) from neuraminidase__InfluenzaA__ABK80061
augaaccccaaccagaagaucaucaccaucggcagcgugagccugaccaucgccaccaucugcuuccugaugcagaucgccauccuggugaccaccgugacccugcacuucaagcaguacgagugcaacagcccccccaacaaccaggugaugcugugcgagcccaccaucaucgagagaaacaucaccgagaucguguaccugaccaacaccaccaucgagaaggagaucugccccaagcuggccgaguacagaaacuggagcaagccccagugcaacaucaccggcuucgcccccuucagcaaggacaacagcaucagacugagcgccggcggcgacaucugggugaccagagagcccuacgugagcugcgaccccgacaagugcuaccaguucgcccugggccagggcaccacccugaacaacggccacagcaacgacaccgugcacgacagaacccccuacagaacccugcugaugaacgagcugggcgugcccuuccaccugggcaccaagcaggugugcaucgccuggagcagcagcagcugccacgacggcaaggccuggcugcacgugugcgugaccggcgacgacgagaacgccaccgccagcuucaucuacaacggcagacugguggacagcaucggcagcuggagcaagaagauccugagaacccaggagagcgagugcgugugcaucaacggcaccugcaccguggugaugaccgacggcagcgccagcggcaaggccgacaccaagauccuguucaucgaggagggcaagaucgugcacaccagcagccugagcggcagcgcccagcacguggaggagugcagcugcuaccccagauaccccggcgugagaugcgugugcagagacaacuggaagggcagcaacagacccaucguggacaucaacgugaaggacuacagcaucgugagcagcuacgugugcagcggccuggugggcgacacccccagaaagaacgacagcagcagcagcagccacugccuggaccccaacaacgaggagggcggccacggcgugaagggcugggccuucgacgacggcaacgacguguggaugggcagaaccaucagcgagaagagcagaagcggcuacgagaccuucaaggugaucgagggcuggagcaagcccaacagcaagcugcagaucaacagacaggugaucguggacagaggcaacagaagcggcuacagcggcaucuucagcguggagggcaagagcugcaucaacagaugcuucuacguggagcugaucagaggcagaaagcaggagaccgaggugcuguggaccagcaacagcaucgugguguucugcggcaccagcggcaccuacggcaccggcagcuggcccgacggcgccgacaucaaccugaugcccaucuga

SEQ ID NO: 175648 - RNA, 1410 nt, Artificial Sequence; identical to SEQ ID NO: 174121
  derived and/or modified CDS sequence (opt4) from neuraminidase__InfluenzaA__ABK80072

SEQ ID NO: 175649 - RNA, 1410 nt, Artificial Sequence
  derived and/or modified CDS sequence (opt4) from neuraminidase__InfluenzaA__ABK80083
augaaccccaaccagaagaucaucaccaucggcagcgugagccugaccaucgccaccaucugcuuccugaugcagaucgccauccuggugaccaccgugacccugcacuucaagcaguacgagugcagcagcccccccaacaaccaggugaugcugugcgagcccaccaucaucgagagaaacaucaccgagaucguguaccugaccaacaccaccaucgagaaggagaucugccccaagcuggccgaguacagaaacuggagcaagccccagugcaacaucaccggcuucgcccccuucagcaaggacaacagcaucagacugagcgccggcggcgacaucugggugaccagagagcccuacgugagcugcgaccccgacaagugcuaccaguucgcccugggccagggcaccacccugaacaacggccacagcaacgacaccgugcacgacagaacccccuacagaacccugcugaugaacgagcugggcgugcccuuccaccugggcaccaagcaggugugcaucgccuggagcagcagcagcugccacgacggcaaggccuggcugcacgugugcgugaccggcgacgacgagaacgccaccgccagcuucaucuacaacggcagacugguggacagcaucggcagcuggagcaagaagauccugagaacccaggagagcgagugcgugugcaucaacggcaccugcaccguggugaugaccgacggcagcgccagcggcaaggccgacaccaagauccuguucaucgaggagggcaagaucgugcacaccagccugcugagcggcagcgcccagcacguggaggagugcagcugcuaccccagauaccccggcgugagaugcgugugcagagacaacuggaagggcagcaacagacccaucguggacaucaacgugaaggacuacagcaucgugagcagcuacgugugcagcggccuggugggcgacacccccagaaagaacgacagcagcagcagcagccacugccuggaccccaacaacgaggagggcggccacggcgugaagggcugggccuucgacgacggcaacgacguguggaugggcagaaccaucagcgagaagcugagaagcggcuacgagaccuucaaggugaucgagggcuggagcaagcccaacagcaagcugcagaucaacagacaggugaucguggacagaggcaacagaagcggcuacagcggcaucuucagcguggagggcaagagcugcaucaacagaugcuucuacguggagcugaucagaggcagaaagcaggagaccgaggugcuguggaccagcaacagcaucgugguguucugcggcaccagcggcaccuacggcaccggcagcuggcccgacggcgccgacaucaaccugaugcccaucuga

SEQ ID NO: 175650 - RNA, 1410 nt, Artificial Sequence
  derived and/or modified CDS sequence (opt4) from neuraminidase__InfluenzaA__ABK80094
augaaccccaaccagaagaucaucaccaucggcagcgugagccugaucaucgccaccaucugcuuccugaugcagaucgccauccuggugaccaccgugacccugcacuucaagcaguacgagugcaacagcccccccaacaaccaggugaugcugugcgagcccaccaucaucgagagaaacaucaccgagaucguguaccugaccaacaccaccaucgagaaggagaucugccccaagcuggccgaguacagaaacuggagcaagccccagugcaacaucaccggcuucgcccccuucagcaaggacaacagcaucagacugagcgccggcggcgacaucugggugaccagagagcccuacgugagcugcgaccccgacaagugcuaccaguucgcccugggccagggcaccacccugaacaacggccacagcaacgacaccgugcacgacagaacccccuacagaacccugcugaugaacgagcugggcgugcccuuccaccugggcaccaagcaggugugcaucgccuggagcagcagcagcugccacgacggcaaggccuggcugcacgugugcgugaccggcgacgacgagaacgccaccgccagcuucaucuacaacggcagacugguggacagcaucggcagcuggagcaagaagauccugagaacccaggagagcgagugcgugugcaucaacggcaccugcaccguggugaugaccgacggcagcgccagcggcaaggccgacaccaagauccuguucaucgaggagggcaagaucgugcacaccagcagccugagcggcagcgcccagcacguggaggagugcagcugcuaccccagauaccccggcgugagaugcgugugcagagacaacuggaagggcagcaacagacccaucguggacaucaacgugaaggacuacagcaucgugagcagcuacgugugcagcggccuggugggcgacacccccagaaagaacgacagcagcagcagcagccacugccuggaccccaacaacgaggagggcggccacggcgugaagggcugggccuucgacgacggcaacgacguguggaugggcagaaccaucagcgagaagcugagaagcggcuacgagaccuucaaggugaucgagggcuggagcaagcccaacagcaagcugcagaucaacagacaggugaucguggacagaggcaacagaagcggcuacagcggcaucuucagcguggagagcaagagcugcaucaacagaugcuucuacguggagcugaucagaggcagaaagcaggagaccgaggugcuguggaccagcaacagcaucgugguguucugcggcaccagcggcaccuacggcaccggcagcuggcccgacggcgccgacaucaaccugaugcccaucuga

SEQ ID NO: 175651 - RNA, 1410 nt, Artificial Sequence; identical to SEQ ID NO: 174790
  derived and/or modified CDS sequence (opt4) from neuraminidase__InfluenzaA__ABK80105

SEQ ID NO: 175652 - RNA, 1410 nt, Artificial Sequence
  derived and/or modified CDS sequence (opt4) from neuraminidase__InfluenzaA__ABK80138
augaaccccaaccagaagaucaucaccaucggcagcgugagccugaccaucgccaccaucugcuuccugaugcagaccgccauccuggugaccaccgugacccugcacuucaagcaguacgagugcaacagcccccccaacaaccaggugaugcugugcgagcccaccaucaucgagagaaacaucaccgagaucguguaccugaccaacaccaccaucgagaaggagaucugccccaagcuggccgaguacagaaacuggagcaagccccagugcaacaucaccggcuucgcccccuucagcaaggacaacagcaucagacugagcgccggcggcgacaucugggugaccagagagcccuacgugagcugcgaccccgacaagugcuaccaguucgcccugggccagggcaccacccugaacaacggccacagcaacgacaccgugcacgacagaacccccuacagaacccugcugaugaacgagcugggcgugcccuuccaccugggcaccagacaggugugcaucgccuggagcagcagcagcugccacgacggcaaggccuggcugcacgugugcgugaccggcgacgacgagaacgccaccgccagcuucaucuacaacggcagacugguggacagcaucggcagcuggagcaagaagauccugagaacccaggagagcgagugcgugugcaucaacggcaccugcaccguggugaugaccgacggcagcgccagcggcaaggccgacaccaagauccuguucaucgaggagggcaagaucgugcacaucagcacccugagcggcagcgcccagcacguggaggagugcagcugcuaccccagauaccccggcgugagaugcgugugcagagacaacuggaagggcagcaacagacccaucguggacaucaacgugaaggacuacagcaucgugagcagcuacgugugcagcggccuggugggcgacacccccagaaagaacgacagcuucagcagcagccacugccuggaccccaacaacgaggagggcggccacggcgugaagggcugggccuucgacgacggcaacgacguguggaugggcagaaccaucagcgagaagcugagaagcggcuacgagaccuucaaggugaucgagggcuggagcaagcccaacagcaagcugcagaucaacagacaggugaucguggagagaggcaacagaagcggcuacagcggcaucuucagcguggagggcaagagcugcaucaacagaugcuucuacguggagcugaucagaggcagaaaggaggagaccgaggugugguggaccagcaacagcaucgugguguucugcggcaccagcggcaccuacggcaccggcagcuggcccgacggcgccgacaucaaccugaugcccaucuga

SEQ ID NO: 175653 - RNA, 1410 nt, Artificial Sequence
  derived and/or modified CDS sequence (opt4) from neuraminidase__InfluenzaA__ABK80149
augaaccccaaccagaagaucaucaccaucggcagcgugagccugaccaucgccaccaucugcuuccugaugcagaucgccauccuggugaccaccgugacccugcacuucaagcaguacgagugcaacagcccccccaacaaccaggccaugcuguacgagcccaccaucaucgagagaaacaucaccgagaucguguaccugaccaacaccaccaucgagaaggagaucugccccaagcuggccgaguacagaaacuggagcaagccccagugcaacaucaccggcuucgcccccuucagcaaggacaacagcaucagacugagcgccggcggcgacaucugggugaccagagagcccuacgugagcugcgaccccgacaagugcuaccaguucgcccugggccagggcaccacccugaacaacggccacagcaacgacaccgugcacgacagaacccccuacagaacccugcugaugaacgagcugggcgugcccuuccaccugggcaccagacaggugugcaucgccuggagcagcagcagcugccacgacggcaaggccuggcugcacgugugcgugaccggcgacgacgagaacgccaccgccagcuucaucuacaacggcagacugguggacagcaucggcagcuggagcaagaagauccugagaacccaggagagcgagugcgugugcaucaacggcaccugcaccguggugaugaccgacggcagcgccagcggcaaggccgacaccaagauccuguucaucgaggagggcaagaucgugcacaucagcacccugagcggcagcgcccagcacguggaggagugcagcugcuaccccagauaccccggcgugagaugcgugugcagagacaacuggaagggcagcaacagacccaucguggacaucaacgugaaggacuacagcaucgugagcagcuacgugugcagcggccuggugggcgacacccccagaaagaacgacagcuucagcagcagccacugccuggaccccaacaacgaggagggcggccacggcgugaagggcugggccuucgacgacggcaacgacguguggaugggcagaaccaucagcgagaagcugagaagcggcuacgagaccuucaaggugaucgagggcuggagcaagcccaacagcaagcugcagaucaacagacaggugaucguggagagaggcaacagaagcggcuacagcggcaucuucagcguggagggcaagagcugcaucaacagaugcuucuacguggagcugaucagaggcagaaaggaggagaccgaggugugguggaccagcaacagcaucgugguguucugcggcaccagcggcaccuacggcaccggcagcuggcccgacggcgccgacaucaaccugaugcccaucuga

SEQ ID NO: 175654 - RNA, 1410 nt, Artificial Sequence; identical to SEQ ID NO: 175653
  derived and/or modified CDS sequence (opt4) from neuraminidase__InfluenzaA__ABK80160

SEQ ID NO: 175655 - RNA, 1410 nt, Artificial Sequence
  derived and/or modified CDS sequence (opt4) from neuraminidase__InfluenzaA__ABK80171
augaaccccaaccagaagaucaucaccaucggcagcgugagccugaccaucgccaccaucugcuuccugaugcagaucgccauccuggugaccaccgugacccugcacuucaagcaguacgagugcaaccccccccccaacaaccaggugaugcugugcgagcccaccaucaucgagagaaacaucaccgagaucguguaccugaccaacaccaccaucgagaaggagaucugccccaagcuggccgaguacagaaacuggagcaagccccagugcaacaucaccggcuucgcccccuucagcaaggacaacagcaucagacugagcgccggcggcgacaucugggugaccagagagcccuacgugagcugcgaccccgacaagugcuaccaguucgcccugggccagggcaccacccugaacaacggccacagcaacgacaccgugcacgacagaacccccuacagaacccugcugaugaacgagcugggcgugcccuuccaccugggcaccagacaggugugcaucgccuggagcagcagcagcugccacgacggcaaggccuggcugcacgugugcgugaccggcgacgacgagaacgccaccgccagcuucaucuacaacggcagacugguggacagcaucggcagcuggagcaagaagauccugagaacccaggagagcgagugcgugugcaucaacggcaccugcaccguggugaugaccgacggcagcgccagcggcaaggccgacaccaagauccuguucaucgaggagggcaagaucgugcacaucagcacccugagcggcagcgcccagcacguggaggagugcagcugcuaccccagauaccccggcgugagaugcgugugcagagacaacuggaagggcagcaacagacccaucguggacaucaacgugaaggacuacagcaucuucagcagcuacgugugcagcggccuggugggcgacacccccagaaagaacgacagcuucagcagcagccacugccuggaccccaacaacgaggagggcggccacggcgugaagggcugggccuucgacgacggcaacgacguguggaugggcagaaccaucagcgagaagcugagaagcggcuacgagaccuucaaggugaucgagggcuggagcaagcccaacagcaagcugcagaccaacagacaggugaucguggagagaggcaacagaagcggcuacagcggcaucuucagcguggagggcaagagcugcaucaacagaugcuucuacguggagcugaucagaggcagaaaggaggagaccgaggugugguggaccagcaacagcaucgugguguucugcggcaccagcggcaccuacggcaccggcagcuggcccgacggcgccgacaucaaccugaugcccaucuga

SEQ ID NO: 175656 - RNA, 1410 nt, Artificial Sequence
  derived and/or modified CDS sequence (opt4) from neuraminidase__InfluenzaA__ABK80182
augaaccccaaccagaagaucaucaccaucggcagcgugagccugaccaucgccaccaucugcuuccugaugcagaucgccauccuggugaccaccgugacccugcacuucaagcaguacgagugcaacagcccccccaacaaccaggugaugcugugcgagcccaccaucaucgagagaaacaucaccgagaucguguaccugaccaacaccaccaucgagaaggagaucugccccaagcuggccgaguacagaaacuggagcaagccccagugcaacaucaccggcuucgcccccuucagcaaggacaacagcaucagacugagcgccggcggcgacaucugggugaccagagagcccuacgugagcugcgaccccgacaagugcuaccaguucgcccugggccagggcaccacccugaacaacggccacagcaacgacaccgugcacgacagaacccccuacagaacccugcugaugaacgagcugggcgugcccuuccaccugggcaccagacaggugugcaucgccuggagcagcagcagcugccacgacggcaaggccuggcugcacgugugcgugaccggcgacgacaagaacgccaccgccagcuucaucuacaacggcaagcugguggacagcaucggcagcuggagcaagaagauccugagaacccaggagagcgagugcgugugcaucaacggcaccugcgccguggugaugaccgacggcagcgccagcggcaaggccgacaccaagauccuguucaucgaggagggcaagaucgugcacaucagcacccugagcggcagcgcccagcacguggaggagugcagcugcuaccccagauaccccggcgugagaugcgugugcagagacaacuggaagggcagcaacagacccaucguggacaucaacgugaaggacuacagcaucgugagcagcuacgugugcagcggccuggugggcgacacccccagaaagaacgacagcuucagcagcagccacugccuggaccccaacaacgaggagggcggccacggcgugaagggcugggccuucgacgacggcaacgacguguggaugggcagaaccaucagcgagaagcugagaagcggcuacgagaccuucaaggugaucgagggcuggagcaagcccaacagcaagcugcagaccaacagacaggugaucguggagagaggcaacagaagcggcuacagcggcaucuucagcguggagggcaagagcugcaucaacagaugcuucuacguggagcugaucagaggcagaaaggaggagaccgaggugugguggaccagcaacagcaucgugguguucugcggcaccagcggcaccuacggcaccggcagcuggcccgacggcgccgacaucaaccugaugcccaucuga

SEQ ID NO: 175657 - RNA, 1410 nt, Artificial Sequence
  derived and/or modified CDS sequence (opt4) from neuraminidase__InfluenzaA__ABK80193
augaaccccaaccagaagaucaucaccaucggcagcgugagccugaccaucgccaccaucugcuuccugaugcagaucgccauccuggugaccaccgugacccugcacuucaagcaguacgagugcaacagcccccccaacaaccaggugaugcugugcgagcccaccaucaucgagagaaacaucaccgagaucguguaccugaccaacaccaccaucgagaaggagaucugccccaagcuggccgaguacagaaacuggagcaagccccagugcaacaucaccggcuucgcccccuucagcaaggacaacagcaucagacugagcgccggcggcgacaucugggugaccagagagcccuacgugagcugcgaccccgacaagugcuaccaguucgcccugggccagggcaccacccugaacaacggccacagcaacgacaccgugcacgacagaacccccuacagaacccugcugaugaacgagcugggcgugcccuuccaccugggcaccagacaggugugcaucgccuggagcagcagcagcugccacgacggcaaggccuggcugcacgugugcgugaccggcgacgacgagaacgccaccgccagcuucaucuacaacggcagacugguggacagcaucggcagcuggagcaagaagauccugagaacccaggagagcgagugcgugugcaucaacggcaccugcaccguggugaugaccgacggcagcgccagcggcaaggccgacaccaagauccuguucaucgaggagggcaagaucgugcacaucagcacccugagcggcagcgcccagcacguggaggagugcagcugcuaccccagauaccccggcgugagaugcgugugcagagacaacuggaagggcagcaacagacccaucguggacaucaacgugaaggacuacagcaucgugagcagcuacgugugcagcggccuggugggcgacacccccagaaagaacgacagcuucagcagcagccacugccuggaccccaacaacgaggagggcggccacggcgugaagggcugggccuucgacgacggcaacgacguguggaugggcagaaccaucggcgagaagcugagaagcggcuacgagaccuucaaggugaucgagggcuggagcaagcccaacagcaagcugcagaccaacagacaggugaucguggagagaggcaacagaagcggcuacagcggcaucuucagcguggagggcaagagcugcaucaacagaugcuucuacguggagcugaucagaggcagaaaggaggagaccgaggugugguggaccagcaacagcaucgugguguucugcggcaccagcggcaccuacggcaccggcagcuggcccgacggcgccgacaucaaccugaugcccaucuga

SEQ ID NO: 175658 - RNA, 1410 nt, Artificial Sequence
  derived and/or modified CDS sequence (opt4) from neuraminidase__InfluenzaA__ABK80204
augaaccccaaccagaagaucaucaccaucggcagcgugagccugaccaucgccaccaucugcuuccugaugcagaucgccauccuggugaccaccgugacccugcacuucaagcaguacgagugcaacagcccccccaacaaccaggugaugcugugcgagcccaccaucaucgagagaaacaucaccgagaucguguaccugaccaacaccaccaucgagaaggagaucugccccaagcuggccgaguacagaaacuggagcaagccccagugcaacaucaccggcuucgcccccuucagcaaggacaacagcaucagacugagcgccggcggcgacaucugggugaccagagagcccuacgugagcugcgaccccgacaagugcuaccaguucgcccugggccagggcaccacccugaacaacggccacagcaacgacaccgugcacgacagaacccccuacagaacccugcugaugaacgagcugggcgugcccuuccaccugggcaccagacaggugugcaucgccuggagcagcagcagcugccacgacggcaaggccuggcugcacgugugcgugaccggcgacgacgagaacgccaccgccagcuucaucuacaacggcaagcugguggacagcaucggcagcuggagcaagaagauccugagaacccaggagagcgagugcgugugcaucaacggcaccugcgccguggugaugaccgacggcagcgccagcggcaaggccgacaccaagauccuguucaucgaggagggcaagaucgugcacaucagcacccugagcggcagcgcccagcacguggaggagugcagcugcuaccccagauaccccggcgugagaugcgugugcagagacaacuggaagggcagcaacagacccaucguggacaucaacgugaaggacuacagcaucgugagcagcuacgugugcagcggccuggugggcgacacccccagaaagaacgacagcuucagcagcagccacugccuggaccccaacaacgaggagggcggccacggcgugaagggcugggccuucgacgacggcaacgacgccuggaugggcagaaccaucagcgagaagcugagaagcggcuacgagaccuucaaggugaucgagggcuggagcaagcccaacagcaagcugcagaccaacagacaggugaucguggagagaggcaacagaagcggcuacagcggcaucuucagcguggagggcaagagcugcaucaacagaugcuucuacguggagcugaucagaggcagaaaggaggagaccgaggugugguggaccagcaacagcaucgugguguucugcggcaccagcggcaccuacggcaccggcagcuggcccgacggcgccgacaucaaccugaugcccaucuga

SEQ ID NO: 175659 - RNA, 1410 nt, Artificial Sequence; identical to SEQ ID NO: 174651
  derived and/or modified CDS sequence (opt4) from neuraminidase__InfluenzaA__ABK80215

SEQ ID NO: 175660 - RNA, 1410 nt, Artificial Sequence; identical to SEQ ID NO: 174651
  derived and/or modified CDS sequence (opt4) from neuraminidase__InfluenzaA__ABK80226

SEQ ID NO: 175661 - RNA, 1410 nt, Artificial Sequence
  derived and/or modified CDS sequence (opt4) from neuraminidase__InfluenzaA__ABK80237
augaaccccaaccagaagaucaucaccaucggcagcgugagccugaccaucgccaccaucugcuuccugaugcagaucgccauccuggugaccaccgugacccugcacuucaagcagcacgagugcaacagcccccccaacaaccaggugaugcugugcgagcccaccaucaucgagagaaacaucaccgagaucguguaccugaccaacaccaccaucgagaaggagaucugccccaagcugguggaguacagaaacuggagcaagccccagugcaacaucaccggcuucgcccccuucagcaaggacaacagcaucagacugagcgccggcggcgacaucugggugaccagagagcccuacgugagcugcgaccccgacaagugcuaccaguucgcccugggccagggcaccacccugaacaacggccacagcaacgacaccgugcacgacagaacccccuacagaacccugcugaugaacgagcugggcgugcccuuccaccugggcaccagacaggugugcaucgccuggagcagcagcagcugccacgacggcaaggccuggcugcacgugugcgugaccggcgacgacaagaacgccaccgccagcuucaucuacaacggcagacugguggacagcaucggcagcuggagcaagaagauccugagaacccaggagagcgagugcgugugcaucaacggcaccugcaccguggugaugaccgacggcagcgccagcggcaaggccgacaccaagauccuguucaucgaggagggcaagaucgugcacaucagcacccugagcggcagcgcccagcacguggaggagugcagcugcuaccccagauaccccggcgugagaugcgugugcagagacaacuggaagggcagcaacagacccaucguggacaucaacgugaaggacuacagcaucgugagcagcuacgugugcagcggccuggugggcgacacccccagaaagaccgacagcuucagcagcagccacugccuggaccccaacaacgaggagggcggccacggcgugaagggcugggccuucgacgacggcaacgacguguggaugggcagaaccaucagcgagaagcugagaagcggcuacgagaccuucaaggugaucgagggcuggagcaagcccaacagcaagcugcagaucaacagacaggugaucguggagagaggcaacagaagcggcuacagcggcaucuucagcguggagggcaagagcugcaucaacagaugcuucuacguggagcugaucagaggcagaaaggaggagaccgaggugugguggaccagcaacagcaucgugguguucugcggcaccagcggcaccuacggcaccggcagcuggcccgacggcgccgacaucaaccugaugcccaucuga

SEQ ID NO: 175662 - RNA, 1410 nt, Artificial Sequence
  derived and/or modified CDS sequence (opt4) from neuraminidase__InfluenzaA__ABK80259
augaaccccaaccagaagaucaucaccaucggcagcgccagccugaccaucgccaccaucugcuuccugauccagaucgccauccuggugaccaccgugacccugcacuucaagcagcacgagugcaacagcccccccaacaaccaggugaugcugugcgagcccaccaucaucgagagaaacaucaccgagaucguguaccugaccaacaccaccaucgagaaggagaucugccccaagcuggccgaguacagaaacuggagcaagccccagugcaacaucaccggcuucgcccccuucagcaaggacaacagcaucagacugagcgccggcggcgacaucugggugaccagagagcccuacgugagcugcgaccccgacaagugcuaccaguucgcccugggccagggcaccacccugaacaacggccacagcaacgacaccgugcacgacagaacccccuacagaacccugcugaugaacgagcugggcgugcccuuccaccugggcaccagacaggugugcaucgccuggagcagcagcagcugccacgacggcaaggccuggcugcacgugugcgugaccggcgacgacaagaacgccaccgccagcuucaucuacaacggcagacugguggacagcaucagcagcuggagcaagaagauccugagaacccaggagagcgagugcgugugcaucaacggcaccugcaccguggugaugaccgacggcagcgccagcggcaaggccgacaccaagauccuguucaucgaggagggcaagaucauccacaucagcacccugagcggcagcgcccagcacguggaggagugcagcugcuaccccagauaccccggcgugagaugcgugugcagagacaacuggaagggcagcaacagacccaucguggacaucaacgugaaggacuacagcaucgugagcagcuacgugugcagcggccuggugggcgacacccccagaaagaacgacagcuucagcagcagccacugccuggaccccaacaacgaggagggcggccacggcgugaagggcugggccuucgacgacggcaacgacguguggaugggcagaaccaucagcgagaagcugagaagcggcuacgagaccuucaaggugaucgagggcuggagcaaccccaacagcaagcugcagaucaacagacaggugaucguggagagaggcaacagaagcggcuacagcggcaucuucagcguggagggcaagagcugcaucaacagaugcuucuacguggagcugaucagaggcagaaaggaggagaccgaggugugguggaccagcaacagcaucgugguguucugcggcaccagcggcaccuacggcaccggcagcuggcccgacggcgccgacaucaaccugaugcccaucuga

SEQ ID NO: 175663 - RNA, 1410 nt, Artificial Sequence; identical to SEQ ID NO: 174387
  derived and/or modified CDS sequence (opt4) from neuraminidase__InfluenzaA__ABK80270

SEQ ID NO: 175664 - RNA, 1410 nt, Artificial Sequence; identical to SEQ ID NO: 174774
  derived and/or modified CDS sequence (opt4) from neuraminidase__InfluenzaA__ABK80281

SEQ ID NO: 175665 - RNA, 1410 nt, Artificial Sequence
  derived and/or modified CDS sequence (opt4) from neuraminidase__InfluenzaA__ABK80292
augaaccccaaccagaagaucaucaccaucggcagcgugagccugaccaucagcaccaucugcuucuucaugcagaucgccauccugaucaccaccgugacccugcacuucaagcaguacgaguucaacagcccccccaacaaccaggugaugcugugcgagcccaccaucaucgagagaaacaucaccgagaucguguaccugaccaacaccaccaucgagaaggagaucugccccaagcuggccgaguacagaaacuggagcaagccccagugcaacaucaccggcuucgcccccuucagcaaggacaacagcaucagacugagcgccggcggcgacaucugggugaccagagagcccuacgugagcugcgaccccgacaagugcuaccaguucgcccugggccagggcaccacccugaacaacgugcacagcaacgacaccgugcacgacagaacccccuacagaacccugcugaugaacgagcugggcgugcccuuccaccugggcaccaagcaggugugcaucgccuggagcagcagcagcugccacgacggcaaggccuggcugcacgugugcgugaccggcgacgacaagaacgccaccgccagcuucaucuacaacggcagacugguggacagcaucgugagcuggagcaaggagauccugagaacccaggagagcgagugcgugugcaucaacggcaccugcaccguggugaugaccgacggcagcgccagcggcaaggccgacaccaagauccuguucaucgaggagggcaagaucauccacaccagcacccugagcggcagcgcccagcacguggaggagugcagcugcuaccccagauaccccggcgugagaugcgugugcagagacaacuggaagggcagcaacagacccaucguggacaucaacaucaaggacuacagcaucgugagcagcuacgugugcagcggccuggugggcgacacccccagaaagaacgacagcagcagcagcagccacugccuggaccccaacaacgaggagggcggccacggcgugaagggcugggccuucgacgacggcaacgacguguggaugggcagaaccaucagcgagaagcugagaagcggcuacgagaccuucaaggugaucgagggcuggagcaaccccaacagcaagcugcagaucaacagacaggugaucguggacagaagcaacagaagcggcuacagcggcaucuucagcguggagggcaagagcugcaucaacagaugcuucuacguggagcugaucagaggcagaaaggaggagaccgaggugcuguggaccagcaacagcaucgugguguucugcggcaccagcggcaccuacggcaccggcagcuggcccgacggcgccgacaucaaccugaugcccaucuga

SEQ ID NO: 175666 - RNA, 1410 nt, Artificial Sequence
  derived and/or modified CDS sequence (opt4) from neuraminidase__InfluenzaA__ABK80303
augaaccccaaccagaagaucaucaccaucggcagcgugagccugaccaucgccaccaucugcuuccugaugcagaucgccauccuggugaccaccgugacccugcacuucaagcaguacgagugcaacagcccccccaacaaccaggugaugcuguacgagcccaccaucaucgagagaaacaucaccgagaucguguaccugaccaacaccaccaucgagaaggagaucugccccaagcuggccgaguacagaaacuggagcaagccccagugcaacaucaccggcuucgcccccuucagcaaggacaacagcaucagacugagcgccggcggcgacaucugggugaccagagagcccuacgugagcugcgaccccgacaagugcuaccaguucgcccugggccagggcaccacccugaacaacggccacagcaacgacaccgugcacgacagaacccccuacagaacccugcugaugaacgagcugggcgugcccuuccaccugggcaccagacaggugugcaucgccuggagcagcagcagcugccacgacggcaaggccuggcugcacgugugcgugaccggcgacgacgagaacgccaccgccagcuucaucuacaacggcagacugguggacagcaucggcagcuggagcaagaagauccugagaacccaggagagcgagugcgugugcaucaacggcaccugcaccguggugaugaccgacggcaacgccagcggcaaggccgacaccaagauccuguucaucgaggagggcaagaucgugcacaucagcacccugagcggcagcgcccagcacguggaggagugcagcugcuaccccagauaccccggcgugagaugcgugugcagagacaacuggaagggcagcaacagacccaucguggacaucaacgugaaggacuacagcaucgugagcagcuacgugugcagcggccuggugggcgacacccccagaaagaacgacagcuucagcagcagccacugccuggaccccaacaacgaggagggcggccacggcgugaagggcugggccuucgacgacggcaacgacguguggaugggcagaaccaucagcgagaagcugagaagcggcuacgagaccuucaaggugaucgagggcuggagcaagcccaacagcaagcugcagaucaacagacaggugaucguggagagaggcaacagaagcggcuacagcggcaucuucagcguggagggcaagagcugcaucaacagaugcuucuacguggagcugaucagaggcagaaaggaggagaccgaggugugguggaccagcaacagcaucgugguguucugcggcaccagcggcaccuacggcaccggcagcuggcccgacggcgccgacaucaaccugaugcccaucuga

SEQ ID NO: 175667 - RNA, 1410 nt, Artificial Sequence
  derived and/or modified CDS sequence (opt4) from neuraminidase__InfluenzaA__ABK80314
augaaccccaaccagaagaucaucaccaucggcagcgugagccugaccaucgccaccaucugcuuccugaugcagaucgccauccuggugaccaccgugacccugcacuucaagcaguacgagugcgacagcccccccaacaaccaggugaugcuguacgagcccaccaucaucgagagaaacaucaccgagaucguguaccugaccaacaccaccaucgagaaggagaucugccccaagcuggccgaguacagaaacuggagcaagccccagugcaacaucaccggcuucgcccccuucagcaaggacaacagcaucagacugagcgccggcggcgacaucugggugaccagagagcccuacgugagcugcgaccccgacaagugcuaccaguucgcccugggccagggcaccacccugaacaacggccacagcaacgacaccgugcacgacagaacccccuacagaacccugcugaugaacgagcugggcgugcccuuccaccugggcaccagacaggugugcaucgccuggagcagcagcagcugccacgacggcaaggccuggcugcacgugugcgugaccggcgacgacgagaacgccaccgccagcuucaucuacaacggcagacugguggacagcaucggcagcuggagcaagaagauccugagaacccaggagagcgagugcgugugcaucaacggcaccugcaccguggugaugaccgacggcagcgccagcggcaaggccgacaccaagauccuguucaucgaggagggcaagaucgugcacaucagcacccugagcggcagcgcccagcacguggaggagugcagcugcuaccccagauaccccggcgugagaugcgugugcagagacaacuggaagggcagcaacagacccaucguggacaucaacgugaaggacuacagcaucgugagcagcuacgugugcagcggccuggugggcgacacccccagaaagaacgacagcuucagcagcagccacugccuggaccccaacaacgaggagggcggccacggcgugaagggcugggccuucgacgacggcaacgacguguggaugggcagaaccaucagcgagaagcugagaagcggcuacgagaccuucaaggugaucgagggcuggagcaagcccaacagcaagcugcagaucaacagacaggugaucguggagagaggcaacagaagcggcuacagcggcaucuucagcguggagggcaagagcugcaucaacagaugcuucuacguggagcugaucagaggcagaaaggaggagaccgaggugugguggaccagcaacagcaucgugguguucugcggcaccagcggcaccuacggcaccggcagcuggcccgacggcgccgacaucaaccugaugcccaucuga

SEQ ID NO: 175668 - RNA, 1350 nt, Artificial Sequence
  derived and/or modified CDS sequence (opt4) from neuraminidase__InfluenzaA__ABL07021
augaaccccaaccagaagaucaucaccaucggcagcaucugcauggugaucggcaucgugagccugaugcugcagaucggcaacaugaucagcaucugggugagccacagcauccagaagggcaaccagcaccaggccgagagcaucagcaacaccaacccccugaccgagaaggccguggccagcaucacccuggccggcaacagcagccugugccccaucagaggcugggccgugcacagcaaggacaacaacaucagaaucggcagcaagggcgacguguucgugaucagagagcccuucaucagcugcagccaccuggagugcagaaccuucuuccugacccagggcgcccugcugaacgacaagcacagcaacggcaccgugaaggacagaagcccccacagaacccugaugagcugccccgugggcgaggcccccagccccuacaacagcagauucgagagcguggccuggagcgccagcgccugccacgacggcaccagcuggcugaccaucggcaucagcggccccgacaacgaggccguggccgugcugaaguacaacggcaucaucaccgacaccaucaagagcuggagaaacaacauccugagaacccaggagagcgagugcgccugcgugaacggcagcugcuucaccgugaugaccgacggccccagcaacggccaggccagcuacaagaucuucaagaugaagaagggcaagguggugaagagcguggagcuggacgcccccaacuaccacuacgaggagugcagcugcuaccccgacgccggcgagaucaccugcgugugcagagacaacuggcacggcagcaacagacccugggugagcuucaaccagaaccuggaguaccagaucggcuacaucugcagcggcguguucggcgacaaccccagacccaacgacggcaccggcagcugcggccccaugagccccaacggcgccuacggcgugaagggcuucagcuucaaguacggcaacggcguguggaucggcagaaccaagagcaccaacagcagaagcggcuucgagaugaucugggaccccaacggcuggaccggcaccgacagcagcuucagcgugaagcaggacaucguggccaucaccgacuggagcggcuacagcggcagcuucgugcagcaccccgagcugaccggccuggacugcaucagacccugcuucuggguggagcugaucagaggcagacccaaggagagcaccaucuggaccagcggcagcagcaucagcuucugcggcgugaacagcgacaccgugagcuggagcuggcccgacggcgccgagcugcccuucaccaucgacaaguga

SEQ ID NO: 175669 - RNA, 1350 nt, Artificial Sequence
  derived and/or modified CDS sequence (opt4) from neuraminidase__InfluenzaA__ABL07032
augaaccccaaccagaagaucaucaccaucggcagcaucugcauggugaucggcaucgugagccugaugcugcagaucggcaacauggugagcaccugggugagccacagcauccagaccggcaaccaguaccaggccgagagcaucagcaacaccaacccccugaccgagaaggccguggccagcgugacccuggccggcaacagcagccugugccccaucagaggcugggccgugcacagcaaggacaacaacaucagaaucggcagcaagggcgacguguucgugaucagagagcccuucaucagcugcagccaccuggagugcagaaccuucuuccugacccagggcgcccugcugaacgacaagcacagcaacggcaccgugaaggacagaagcccccacagaacccugaugagcugccccgugggcgaggcccccagccccuacaacagcagauucgagagcguggccuggagcgccagcgccugccacgacggcaccagcuggcugaccaucggcaucagcggccccgacaacgaggccguggccgugcugaaguacaacggcaucaucaccgacaccaucaagagcuggagaaacaacauccugagaacccaggagagcgagugcgccugcgugaacggcagcugcuucaccgugaugaccgacggccccagcaacggccaggccagcuacaagaucuucaagauggagaagggcaagguggugaagagcguggagcuggacgcccccaacuaccacuacgaggagugcagcugcuaccccgacgccggcgagaucaccugcgugugcagagacaacuggcacggcagcaacagacccugggugagcuucaaccagaaccuggaguaccagaucggcuacaucugcagcggcguguucggcgacaaccccagacccaacgacggcaccggcagcugcggccccaugagccccaacggcgccuacggcgugaagggcuucagcuucaaguacggcaacggcguguggaucggcagaaccaagagcaccaacagcagaagcggcuucgagaugaucugggaccccaacggcuggaccggcaccgacagcagcuucagcgugaagcaggacaucguggccaucaccgacuggagcggcuacagcggcagcuucgugcagcaccccgagcugaccggccuggacugcaucagacccugcuucuggguggagcugaucagaggcagacccaaggagagcaccaucuggaccagcggcagcagcaucagcuucugcggcgugaacagcgacaccgugagcuggagcuggcccgacggcgccgagcugcccuucaccaucgacaaguga

SEQ ID NO: 175670 - RNA, 1350 nt, Artificial Sequence
  derived and/or modified CDS sequence (opt4) from neuraminidase__InfluenzaA__ABL31746
augaaccccaaccagaagaucaucaccaucggcagcaucugcauggugaucggcaucgugagccugaugcugcagaucggcaacaugaucagcaucugggugagccacagcauccagaccggcaaccagcaccaggccgagagcaucagcaacaccaacccccugaccgagaaggccguggccagcgugacccuggccggcaacagcagccugugccccaucagaggcugggccgugcacagcaaggacaacaacaucagaaucggcagcaagggcgacguguucgugaucagagagcccuucaucagcugcagccaccuggagugcagaaccuucuuccugacccagggcgcccugcugaacgacaagcacagcaacggcaccgugaaggacagaagcccccacagaacccugaugagcugccccgugggcgaggcccccagccccuacaacagcagauucgagagcguggccuggagcgccagcgccugccacgacggcaacagcuggcugaccaucggcaucagcggccccgacaacgaggccguggccgugcugaaguacaacggcaucaucaccgacaccaucaagagcuggagaaagaacauccugagaacccaggagagcgagugcgccugcgugaacggcagcugcuucaccgugaugaccgacggccccagcaacggccaggccagcuacaagaucuucaagauggagaagggcaagguggugaagagcguggagcuggacgcccccaacuaccacuacgaggagugcagcugcuaccccgacgccggcgagaucaccugcgugugcagagacaacuggcacggcagcaacagacccugggugagcuucaaccagaaccuggaguaccagaucggcuacaucugcagcggcguguucggcgacaaccccagacccaacgacggcaccggcagcugcggccccaugagccccaacggcgccuacggcgugaagggcuucagcuucaaguacggcaacggcguguggaucggcagaaccaagagcaccaacagcagaagcggcuucgagaugaucugggaccccaacggcuggaccggcaccgacagcagcuucagcgugaagcaggacaucguggccaucaccgacuggagcggcuacagcggcagcuucgugcagcaccccgagcugaccggccuggacugcaucagacccugcuucuggguggagcugaucagaggcagacccaaggagagcaccaucuggaccagcggcagcagcaucagcuucugcggcgugaacagcgacaccgugagcuggagcuggcccgacggcgccgagcugcccuucaccaucgacaaguga

SEQ ID NO: 175671 - RNA, 1350 nt, Artificial Sequence
  derived and/or modified CDS sequence (opt4) from neuraminidase__InfluenzaA__ABL31757
augaaccccaaccagaagaucaucaccaucggcagcaucugcauggugaucggcaucgugagccugaugcugcagaucggcaacaugaucagcaucugggugagccacagcauccagaccggcaaccagcaccaggccgagagcaucagcaacaccaacccccugaccgagaaggccguggccagcgugacccuggccggcaacagcagccugugccccaucagaggcugggccgugcacagcaaggacaacaacaucagaaucggcagcaagggcgacguguucgugaucagagagcccuucaucagcugcagccaccuggagugcagaaccuucuuccugacccagggcgcccugcugaacgacaagcacagcaacggcaccgugaaggacagaagcccccacagaacccugaugagcugccccgugggcgaggcccccagccccuacaacagcagauucgagagcguggccuggagcgccagcgccugccacgacggcaccagcuggcugaccaucggcaucagcggccccgacaacgaggccguggccgugcugaaguacaacggcaucaucaccgacaccaucaagagcuggagaaacaacauccugagaacccaggagagcgagugcgccugcgugaacggcagcugcuucaccgugaugaccgacggccccagcaacggccaggccagcuacaagaucuucaagauggagaagggcaagguggugaagagcguggagcuggacgcccccaacuaccacuacgaggagugcagcugcuaccccgacgccggcgagaucaccugcgugugcagagacaacuggcacggcagcaacagacccugggugagcuucaaccagaaccuggaguaccagaucggcuacaucugcagcggcguguucggcgacaaccccagacccaacgacggcaccggcagcugcggccccaugagccccaacggcgccuacggcgugaagggcuucagcuucaaguacggcaacggcguguggaucggcagaaccaagagcaccaacagcagaagcggcuucgagaugaucugggaccccaacggcuggaccggcaccgacagcagcuucagcgugaagcaggacaucguggccaucaccgacuggagcggcuacagcggcagcuucgugcagcaccccgagcugaccggccuggacugcaucagacccugcuucuggguggagcugaucagaggcagacccaaggagagcaccaucuggaccagcggcagcagcaucagcuucugcggcgugaacagcgacaccgugagcuggagcuggcccgacggcgccgagcugcccuucaccaucgacaaguga

SEQ ID NO: 175672 - RNA, 1350 nt, Artificial Sequence; identical to SEQ ID NO: 175671
  derived and/or modified CDS sequence (opt4) from neuraminidase__InfluenzaA__ABL31768

SEQ ID NO: 175673 - RNA, 1410 nt, Artificial Sequence; identical to SEQ ID NO: 174651
  derived and/or modified CDS sequence (opt4) from neuraminidase__InfluenzaA__ABL67168

SEQ ID NO: 175674 - RNA, 1410 nt, Artificial Sequence; identical to SEQ ID NO: 174790
  derived and/or modified CDS sequence (opt4) from neuraminidase__InfluenzaA__ABL67179

SEQ ID NO: 175675 - RNA, 1413 nt, Artificial Sequence; identical to SEQ ID NO: 175616
  derived and/or modified CDS sequence (opt4) from neuraminidase__InfluenzaA__ABL67190

SEQ ID NO: 175676 - RNA, 1410 nt, Artificial Sequence
  derived and/or modified CDS sequence (opt4) from neuraminidase__InfluenzaA__ABL67201
augaaccccaaccagaagaucaucaccaucagcagcgugagccugaccaucagcaccaucugcuucuucaugcagaucgccauccugaucaccaccgugacccugcacuucaagcaguacgaguucaacagcccccccaacaaccaggugaugcugugcgagcccaccaucaucgagagaaacaucaccgagaucguguaccugaccaacaccaccaucgagaaggagaucugccccaagcuggccgaguacagaaacuggagcaagccccagugcgacaucaccggcuucgcccccuucagcaaggacaacagcaucagacugagcgccggcggcgacaucugggugaccagagagcccuacgugagcugcgaccccgacaagugcuaccaguucgcccugggccagggcaccacccugaacaacgugcacagcaacgacaccgugcacgacagaacccccuacagaacccugcugaugaacgagcugggcgugcccuuccaccugggcaccaagcaggugugcaucgccuggagcagcagcagcugccacgacggcaaggccuggcugcacgugugcgugaccggcgacgacaagaacgccaccgccagcuucaucuacaacggcagacugguggacagcaucgugagcuggagcaagaagauccugagaacccaggagagcgagugcgugugcaucaacggcaccugcaccguggugaugaccgacggcagcgccagcggcaaggccgacaccaagauccuguucaucgaggagggcaagaucgugcacaccagcacccugagcggcagcgcccagcacguggaggagugcagcugcuaccccagauaccccggcgugagaugcgugugcagagacaacuggaagggcagcaacagacccaucguggacaucaacaucaaggacuacagcaucgugagcagcuacgugugcagcggccuggugggcgacacccccagaaagaacgacagcagcagcagcagccacugccuggaccccaacaacgaggagggcggccacggcgugaagggcugggccuucgacgacggcaacgacguguggaugggcagaaccaucagcgagaagcugagaagcggcuacgagaccuucaaggugaucgagggcuggagcaaccccaacagcaagcugcagaucaacagacaggugaucguggacagaggcaacagaagcggcuacagcggcaucuucagcguggagggcaagagcugcaucaacagaugcuucuacguggagcugaucagaggcagaaaggaggagaccgaggugcuguggaccagcaacagcaucgugguguucugcggcaccagcggcaccuacggcaccggcagcuggcccgacggcgccgacaucaaccugaugcccaucuga

SEQ ID NO: 175677 - RNA, 1413 nt, Artificial Sequence; identical to SEQ ID NO: 175616
  derived and/or modified CDS sequence (opt4) from neuraminidase__InfluenzaA__ABL67212

SEQ ID NO: 175678 - RNA, 1413 nt, Artificial Sequence; identical to SEQ ID NO: 175119
  derived and/or modified CDS sequence (opt4) from neuraminidase__InfluenzaA__ABL67256

SEQ ID NO: 175679 - RNA, 1413 nt, Artificial Sequence; identical to SEQ ID NO: 175119
  derived and/or modified CDS sequence (opt4) from neuraminidase__InfluenzaA__ABL67267

SEQ ID NO: 175680 - RNA, 1410 nt, Artificial Sequence; identical to SEQ ID NO: 174121
  derived and/or modified CDS sequence (opt4) from neuraminidase__InfluenzaA__ABL67278

SEQ ID NO: 175681 - RNA, 1410 nt, Artificial Sequence
  derived and/or modified CDS sequence (opt4) from neuraminidase__InfluenzaA__ABL67289
augaaccccaaccagaagaucaucaccaucggcagcgugagccugaccaucgccaccaucugcuuccugaugcagaucgccauccuggugaccaccgugacccugcacuucaagcaguacgagugcaacagcccccccaacaaccaggugaugcuguacgagcccaccaucaucgagagaaacaucaccgagaucguguaccugaccaacaccaccaucgagaaggagaucugccccaagcuggccgaguacagaaacuggagcaagccccagugcaacaucaccggcuucgcccccuucagcaaggacaacagcaucagacugagcgccggcggcgacaucugggugaccagagagcccuacgugagcugcgaccccgacaagugcuaccaguucgcccugggccagggcaccacccugaacaacggccacagcaacgacaccgugcacgacagaacccccuacagaacccugcugaugaacgagcugggcgugcccuuccaccugggcaccagacaggugugcaucgccuggagcagcagcagcugccacgacggcaaggccuggcugcacgugugcgugaccggcgacgacgagaacgccaccgccagcuucaucuacaacggcagacugguggacagcaucggcagcuggagcaagaagauccugagaacccaggagagcgagugcgugugcaucaacggcaccugcaccguggugaugaccgacggcagcgccagcggcaaggccgacaccaagauccuguucaucgaggagggcaagaucgugcacaucagcacccugagcggcagcgcccagcacguggaggagugcagcugcuaccccagauaccccggcgugagaugcgugugcagagacaacuggaagggcagcaacagacccaucguggacaucaacgugaaggacuacagcaucgugagcagcuacgugugcagcggccuggugggcgacacccccagaaagaacgacagcuucagcagcagccacugccuggaccccaacaacgaggagggcggccacggcgugaagggcugggccuucgacgacggcaacgacguguggaugggcagaaccaucagcgagaagcugagaagcggcuacgagaccuucaaggugaucgagggcuggagcaagcccaacagcaagcugcagaucaacagacaggugaucguggagagaggcaacagaagcggcuacagcggcaucuucagcguggagggcaagagcugcaucaacagaugcuucuacguggagcugaucagaggcagaaaggaggagaccgaggugugguggaccagcaacagcaucgugguguucugcggcaccagcggcaccuacggcaccggcagcuggcccgacggcgccgacaucaaccugaugcccaucuga

SEQ ID NO: 175682 - RNA, 1410 nt, Artificial Sequence
  derived and/or modified CDS sequence (opt4) from neuraminidase__InfluenzaA__ABL67300
augaaccccaaccagaagaucaucaccaucggcagcgugagccugaccaucgccaccaucugcuuccugaugcagaucgccauccuggugaccaccgugacccugcacuucaagcaguacgagugcaacagcccccccaacaaccaggugaugcugugcgagcccaccaucaucgagagaaacaucaccgagaucguguaccugaccaacaccaccaucgagaaggagaucugccccaagcuggccgaguacagaaacuggagcaagccccagugcaacaucaccggcuucgcccccuucagcaaggacaacagcaucagacugagcgccggcggcgacaucugggugaccagagagcccuacgugagcugcgaccccgacaagugcuaccaguucgcccugggccagggcaccacccugaacaacggccacagcaacgacaccgugcacgacagaacccccuacagaacccugcugaugaacgagcugggcgugcccuuccaccugggcaccagacaggugugcaucgccuggagcagcagcagcugccacgacggcaaggccuggcugcacgugugcgugaccggcgacgacgagaacgccaccgccagcuucaucuacaacggcagacugguggacagcaucggcagcuggagcaagaacauccugagaacccaggagagcgagugcgugugcaucaacggcaccugcaccguggugaugaccgacggcagcgccagcggcaaggccgacaccaagauccuguucaucgaggagggcaagaucgugcacaucagcacccugagcggcagcgcccagcacguggaggagugcagcugcuaccccagauaccccggcgugagaugcgugugcagagacaacuggaagggcagcaacagacccaucguggacaucaacgugaaggaccacagcaucgugagcagcuacgugugcagcggccuggugggcgacacccccagaaagaacgacagcuucagcagcagccacugccuggaccccaacaacgaggagggcggccacggcgugaagggcugggccuucgacgacggcaacgacguguggaugggcagaaccaucagcgagaagcugagaagcggcuacgagaccuucaaggugaucgagggcuggagcaagcccaacagcaagcugcagaucaacagacaggugaucguggagagaggcaacagaagcggcuacagcggcaucuucagcguggagggcaagagcugcaucaacagaugcuucuacguggagcugaucagaggcagaaaggaggagaccgaggugugguggaccagcaacagcaucgugguguucugcggcaccagcggcaccuacggcaccggcagcuggcccgacggcgccgacaucaaccugaugcccaucuga

SEQ ID NO: 175683 - RNA, 1410 nt, Artificial Sequence; identical to SEQ ID NO: 174240
  derived and/or modified CDS sequence (opt4) from neuraminidase__InfluenzaA__ABL67311

SEQ ID NO: 175684 - RNA, 1410 nt, Artificial Sequence
  derived and/or modified CDS sequence (opt4) from neuraminidase__InfluenzaA__ABL67322
augaaccccaaccagaagaucaucaccaucggcagcgugagccugaccaucgccaccaucugcuuccugaugcagaucgccauccuggugaccaccgugacccugcacuucaagcaguacgagugcaaccccccccccaacaaccaggugaugcugugcgagcccaccaucaucgagagaaacaucaccgagaucguguaccugaccaacaccaccaucgagaaggagaucugccccaagcuggccgaguacagaaacuggagcaagccccagugcaacaucaccggcuucgcccccuucagcaaggacaacagcaucagacugagcgccggcggcgacaucugggugaccagagagcccuacgugagcugcgaccccgacaagugcuaccaguucgcccugggccagggcaccacccugaacaacggccacagcaacgacaccgugcacgacagaacccccuacagaacccugcugaugaacgagcugggcgugcccuuccaccugggcaccagacaggugugcaucgccuggagcagcagcagcugccacgacggcaaggccuggcugcacgugugcgugaccggcgacgacgagaacgccaccgccagcuucaucuacaacggcagacugguggacagcaucggcagcuggagcaagaagauccugagaacccaggagagcgagugcgugugcaucaacggcaccugcaccguggugaugaccgacggcagcgccagcggcaaggccgacaccaagauccuguucaucgaggagggcaagaucgugcacaccagcacccugagcggcagcgcccagcacguggaggagugcagcugcuaccccagauaccccggcgugagaugcgugugcagagacaacuggaagggcagcaacagacccaucguggacaucaacgugaaggacuacagcaucgugagcagcuacgugugcagcggccuggugggcgacacccccagaaagaacgacagcuucagcagcagccacugccuggaccccaacaacgaggagggcggccacggcgugaagggcugggccuucgacgacggcaacgacguguggaugggcagaaccaucagcgagaagcugagaagcggcuacgagaccuucaaggugaucgagggcuggagcaagcccaacagcaagcugcagaccaacagacaggugaucguggagagaggcaacagaagcggcuacagcggcaucuucagcguggagggcaagagcugcaucaacagaugcuucuacguggagcugaucagaggcagaaaggaggagaccgaggugugguggaccagcaacagcaucgugguguucugcggcaccagcggcaccuacggcaccggcagcuggcccgacggcgccgacaucaaccugaugcccaucuga

SEQ ID NO: 175685 - RNA, 1410 nt, Artificial Sequence
  derived and/or modified CDS sequence (opt4) from neuraminidase__InfluenzaA__ABL67333
augaaccccaaccagaagaucaucaccaucggcagcgugagccugaccaucgccaccaucugcuuccugaugcagaucgccauccuggugaucaccgugacccugcacuucaagcaguacgagugcaacagcccccccaacaaccaggugaugcugugcgagcccaccaucaucgagagaaacaucaccgagaucguguaccugaccaacaccaccaucgagaaggagaucugccccaagcuggccgaguacagaaacuggagcaagccccagugcaacaucaccggcuucgcccccuucagcaaggacaacagcaucagacugagcgccggcggcgacaucugggugaccagagagcccuacgugagcugcgaccccgacaagugcuaccaguucgcccugggccagggcaccacccugaacaacggccacagcaacgacaccgugcacgacagaacccccuacagaacccugcugaugaacgagcugggcgugcccuuccaccugggcaccagacaggugugcaucgccuggagcagcagcagcugccacgacggcaaggccuggcugcacgugugcgugaccggcgacgacgagaacgccaccgccagcuucaucuacaacggcaagcugguggacagcaucggcagcuggagcaagaagauccugagaacccaggagagcgagugcgugugcaucaacggcaccugcgccguggugaugaccgacggcagcgccagcggcaaggccgacaccaagauccuguucaucgaggagggcaagaucgugcacaucagcacccugagcggcagcgcccagcacguggaggagugcagcugcuaccccagauaccccggcgugagaugcgugugcagagacaacuggaagggcagcaacagacccaucguggacaucaacgugaaggacuacagcaucgugagcagcuacgugugcagcggccuggugggcgacacccccagaaagaacgacagcuucagcagcagccacugccuggaccccaacaacgaggagggcggccacggcgugaagggcugggccuucgacgacggcaacgacguguggaugggcagaaccaucagcgagaagcugagaagcggcuacgagaccuucaaggugaucgagggcuggagcaagcccaacagcaagcugcagaccaacagacaggugaucguggagagaggcaacagaagcggcuacagcggcaucuucagcguggagggcaagagcugcaucaacagaugcuucuacguggagcugaucagaggcagaaaggaggagaccgaggugugguggaccagcaacagcaucgugguguucugcggcaccagcggcaccuacggcaccggcagcuggcccgacggcgccgacaucaaccugaugcccaucuga

SEQ ID NO: 175686 - RNA, 1410 nt, Artificial Sequence; identical to SEQ ID NO: 174651
  derived and/or modified CDS sequence (opt4) from neuraminidase__InfluenzaA__ABL67344

SEQ ID NO: 175687 - RNA, 1410 nt, Artificial Sequence
  derived and/or modified CDS sequence (opt4) from neuraminidase__InfluenzaA__ABL67355
augaaccccaaccagaagaucaucaccaucggcagcgugagccugaccaucgccaccaucugcuuccugaugcagaucgccauccuggugaccaccgugacccugcacuucaagcagcacgagugcaacagcccccccaacaaccaggugaugcugugcgagcccaccaucaucgagagaaacaucaccgagaucguguaccugaccaacaccaccaucgagaaggagaucugccccaagcugguggaguacagaaacuggagcaagccccagugcaacaucaccggcuucgcccccuucagcaaggacaacagcaucagacugagcgccggcggcgacaucugggugaccagagagcccuacgugagcugcgaccccgagaagugcuaccaguucgcccugggccagggcaccacccugaacaacggccacagcaacgacaccgugcacgacagaacccccuacagaacccugcugaugaacgagcugggcgugcccuuccaccugggcaccaagcaggugugcaucgccuggagcagcagcagcugccacgacggcaaggccuggcugcacgugugcgugaccggcgacgacaagaacgccaccgccagcuucaucuacaacggcagacugguggacagcaucggcagcuggagcaagaagauccugagaacccaggagagcgagugcgugugcaucaacggcaccugcaccguggugaugaccgacggcagcgccagcggcaaggccgacaccaagauccuguucaucgaggagggcaagaucgugcacaucagcacccugagcggcagcgcccagcacguggaggagugcagcugcuaccccagauaccccggcgugagaugcgugugcagagacaacuggaagggcagcaacagacccaucguggacaucaacgugaaggacuacagcaucgugagcagcuacgugugcagcggccuggugggcgacacccccagaaagaacgacagcuucagcagcagccacugccuggaccccaacaacgaggagggcggccacggcgugaagggcugggccuucgacgacggcaacgacguguggaugggcagaaccaucagcgagaagcugagaagcggcuacgagaccuucaaggugaucgagggcuggagcaagcccaacagcaagcugcagaucaacagacaggugaucguggagagaggcaacagaagcggcuacagcggcaucuucagcguggagggcaagagcugcaucaacagaugcuucuacguggagcugaucagaggcagaaaggaggagaccgaggugugguggaccagcaacagcaucgugguguucugcggcaccagcggcaccuacggcaccggcagcuggcccgacggcgccgacaucaaccugaugcccaucuga

SEQ ID NO: 175688 - RNA, 1410 nt, Artificial Sequence
  derived and/or modified CDS sequence (opt4) from neuraminidase__InfluenzaA__ABL67366
augaaccccaaccagaagaucaucaccaucggcagcgugagccugaccaucgccaccaucugcuuccugaugcagaucgccauccuggugaccaccgugacccugcacuucaagcagcacgagugcaacagcccccccaacaaccaggugaugcugugcgagcccaccaucaucgagagaaacaucaccgagaucguguaccugaccaacaccaccaucgagaaggagaucugccccaagcuggccgaguacagaaacuggagcaagccccagugcaacaucaccggcuucgcccccuucagcaaggacaacagcaucagacugagcgccggcggcgacaucugggugaccagagagcccuacgugagcugcgaccccgacaagugcuaccaguucgcccugggccagggcaccacccugaacaacggccacagcaacgacaccgugcacgacagaacccccuacagaacccugcugaugaacgagcugggcgugcccuuccaccugggcaccagacaggugugcaucgccuggagcagcagcagcugccacgacggcaaggccuggcugcacgugugcgugaccggcgacgacaagaacgccaccgccagcuucaucuacaacggcagacugguggacagcaucggcagcuggagcaagaagauccugagaacccaggagagcgagugcgugugcaucaacggcaccugcaccguggugaugaccgacggcagcgccagcggcaaggccgacaccagaauccuguucaucgaggagggcaagaucgugcacaucagcacccugagcggcagcgcccagcacguggaggagugcagcugcuaccccagauaccccggcgugagaugcgugugcagagacaacuggaagggcagcaacagacccaucguggacaucaacgugaaggacuacagcaucgugagcagcuacgugugcagcggccuggugggcgacacccccagaaagaacgacagcuucagcagcagccacugccuggaccccaacaacgaggagggcggccacggcgugaagggcugggccuucgacgacggcaacgacguguggaugggcagaaccaucagcgagaagcugagaagcggcuacgagaccuucaaggugaucgagggcuggagcaagcccaacagcaagcugcagaucaacagacaggugaucguggagagaggcaacagaagcggcuacagcggcaucuucagcguggagggcaagagcugcaucaacagaugcuucuacguggagcugaucagaggcagaaaggaggagaccgaggugugguggaccagcaacagcaucgugguguucugcggcaccagcggcaccuacggcaccggcagcuggcccgacggcgccgacaucaaccugaugcccaucuga

SEQ ID NO: 175689 - RNA, 1410 nt, Artificial Sequence
  derived and/or modified CDS sequence (opt4) from neuraminidase__InfluenzaA__ABL67377
augaaccccaaccagaagaucaucaccaucggcagcgccagccugaccaucgccaucaucugcuuccugauccagaucgccauccuggugaccaccgugacccugcacuucaagcagcacgagugcaacagcccccccaacaaccaggugaugcugugcgagcccaccaucaucgagagaaacaucaccgagaucguguaccugaccaacaccaccaucgagaaggagaucugccccaagcuggccgaguacagaaacuggagcaagccccagugcaacaucaccggcuucgcccccuucagcaaggacaacagcaucagacugagcgccggcggcgacaucugggugaccagagagcccuacgugagcugcgaccccgacaagugcuaccaguucgcccugggccagggcaccacccugaacaacggccacagcaacgacaccgugcacgacagaacccccuacagaacccugcugaugaacgagcugggcgugcccuuccaccugggcaccagacaggugugcaucgccuggagcagcagcagcugccacgacggcaaggccuggcugcacgugugcgugaccggcgacgacaagaacgccaccgccagcuucaucuacaacggcagacugguggacagcaucagcagcuggagcaagaagauccugagaacccaggagagcgagugcgugugcaucaacggcaccugcaccguggugaugaccgacggcagcgccagcggcaaggccgacaccaagauccuguucaucgaggagggcaagaucauccacaucagcacccugagcggcagcgcccagcacguggaggagugcagcugcuaccccagauaccccggcgugagaugcgugugcagagacaacuggaagggcagcaacagacccaucguggacaucaacgugaaggacuacagcaucgugagcagcuacgugugcagcggccuggugggcgacacccccagaaagaacgacagcuucagcagcagccacugccuggaccccaacaacgaggagggcggccacggcgugaagggcugggccuucgacgacggcaacgacguguggaugggcagaaccaucagcgagaagcugagaagcggcuacgagaccuucaaggugaucgagggcuggagcaaccccaacagcaagcugcagaucaacagacaggugaucguggagagaggcaacagaagcggcuacagcggcaucuucagcguggagggcaagagcugcaucaacagaugcuucuacguggagcugaucagaggcagaaaggaggagaccgaggugugguggaccagcaacagcaucgugguguucugcggcaccagcggcaccuacggcaccggcagcuggcccgacggcgccgaccugaaccugaugcccaucuga

SEQ ID NO: 175690 - RNA, 1410 nt, Artificial Sequence; identical to SEQ ID NO: 174387
  derived and/or modified CDS sequence (opt4) from neuraminidase__InfluenzaA__ABL67388

SEQ ID NO: 175691 - RNA, 1410 nt, Artificial Sequence; identical to SEQ ID NO: 174387
  derived and/or modified CDS sequence (opt4) from neuraminidase__InfluenzaA__ABL67399

SEQ ID NO: 175692 - RNA, 1410 nt, Artificial Sequence; identical to SEQ ID NO: 174772
  derived and/or modified CDS sequence (opt4) from neuraminidase__InfluenzaA__ABL67410

SEQ ID NO: 175693 - RNA, 1410 nt, Artificial Sequence
  derived and/or modified CDS sequence (opt4) from neuraminidase__InfluenzaA__ABL67421
augaaccccaaccagaagaucaucaccaucggcagcaucagccugaccaucagcaccaucugcuucuucaugcagaucgccauccugaucaccaccgugacccugcacuucaagcaguacgaguucaacagcccccccaacaaccaggugaugcugugcgagcccaccaucaucgagagaaacaucaccgagaucguguaccugaccaacaccaccaucgagaaggagaucugccccaagcuggccgaguacagaaacuggagcaagccccagugcaacaucaccggcuucgcccccuucagcaaggacaacagcaucagacugagcgccggcggcgacaucugggugaccagagagcccuacgugagcugcgaccccgacaagugcuaccaguucgcccugggccagggcaccacccugaacaacgugcacagcaacgacaccgugcacgacagaacccccuacagaacccugcugaugaacgagcugggcgugcccuuccaccugggcaccaagcaggugugcaucgccuggagcagcagcagcugccacgacggcaaggccuggcugcacgugugcgugaccggcgacgacaagaacgccaccgccagcuucaucuacaacggcagacugguggacagcaucgugagcuggagcaaggagauccugagaacccaggagagcgagugcgugugcaucaacggcaccugcaccguggugaugaccgacggcagcgccagcggcaaggccgacaccaagauccuguucaucgaggagggcaagaucgugcacaccagcacccugagcggcagcgcccagcacguggaggagugcagcugcuaccccagauaccccggcgugagaugcgugugcagagacaacuggaagggcagcaacagacccaucguggacaucaacaucaaggacuacagcaucgugagcagcuacgugugcagcggccuggugggcgacacccccagaaagaacgacagcagcagcagcagccacugccuggaccccaacaacgaggagggcggccacggcgugaagggcugggccuucgacgacggcaacgacguguggaugggcagaaccaucagcgagaagcugagaagcggcuacgagaccuucaaggugaucgagggcuggagcaaccccaacagcaagcugcagaucaacagacaggugaucguggacagaggcaacagaagcggcuacagcggcaucuucagcguggagggcaagagcugcaucaacagaugcuucuacguggagcugaucagaggcagaaaggaggagaccgaggugcuguggaccagcaacagcaucgugguguucugcggcaccagcggcaccuacggcaccggcagcuggcccgacggcgccgacaucaaccugaugcccaucuga

SEQ ID NO: 175694 - RNA, 1350 nt, Artificial Sequence
  derived and/or modified CDS sequence (opt4) from neuraminidase__InfluenzaA__ABL67772
augaaccccaacaagaagaucaucaccaucggcagcaucugcauggugaccggcauggugagccugaugcugcagaucggcaaccugaucagcaucugggugagccacagcauccacaccggcaaccagcacaaggccgagcccaucagcaacaccaacuuccugaccgagaaggccguggccagcgugaagcuggccggcaacagcagccugugccccaucaacggcugggccguguacagcaaggacaacagcaucagaaucggcagcaagggcgacguguucgugaucagagagcccuucaucagcugcagccaccuggagugcagaaccuucuuccugacccagggcgcccugcugaacgacaagcacagcaacggcaccgugaaggacagaagcccccacagaacccugaugagcugccccgugggcgaggcccccagccccuacaacagcagauucgagagcguggccuggagcgccagcgccugccacgacggcaccagcuggcugaccaucggcaucagcggccccgacaacggcgccguggccgugcugaaguacaacggcaucaucaccgacaccaucaagagcuggagaaacaacauccugagaacccaggagagcgagugcgccugcgugaacggcagcugcuucaccgugaugaccgacggccccagcaacggccaggccagccacaagaucuucaagauggagaagggcaagguggugaagagcguggagcuggacgcccccaacuaccacuacgaggagugcagcugcuaccccgacgccggcgagaucaccugcgugugcagagacaacuggcacggcagcaacagacccugggugagcuucaaccagaaccugaaguaccagaucggcuacaucugcagcggcguguucggcgacaaccccagacccaacgacggcaccggcagcugcggccccgugagcagcaacggcgccuacggcgugaagggcuucagcuucaaguacggcaacggcguguggaucggcagaaccaagagcaccaacagcagaagcggcuucgagaugaucugggaccccaacggcuggaccgagaccgacagcagcuucagcgugaagcaggacaucguggccaucaccgacuggagcggcuacagcggcagcuucgugcagcaccccgagcugaccggccuggacugcaucagacccugcuucuggguggagcugaucagaggcagacccaaggagagcaccaucuggaccagcggcagcagcaucagcuucugcggcgugaacagcgacaccgugggcuggagcuggcccgacggcgccgagcugcccuucaccaucgacaaguga

SEQ ID NO: 175695 - RNA, 1350 nt, Artificial Sequence
  derived and/or modified CDS sequence (opt4) from neuraminidase__InfluenzaA__ABL67783
augaaccccaacaagaagaucaucaccaucggcagcaucugcauggugaccggcauggugagccugaugcugcagaucggcaaccugaucagcaucugggugagccacagcauccacaccggcaaccagcacaaggccgagcccaucagcaacaccaacuuccugaccgagaaggccguggccagcgugaagcuggccggcaacagcagccugugccccaucaacggcugggccguguacagcaaggacaacagcaucagaaucggcagcaagggcgacguguucgugaucagagagcccuucaucagcugcagccaccuggagugcagaaccuucuuccugacccagggcgcccugcugaacgacaagcacagcaacggcaccgugaaggacagaagcccccacagaacccugaugagcugccccgugggcgaggcccccagccccuacaacagcagauucgagagcguggccuggagcgccagcgccugccacgacggcaccagcuggcugaccaucggcaucagcggccccgacagcggcgccguggccgugcugaaguacaacggcaucaucaccgacaccaucaagagcuggagaaacaacauccugagaacccaggagagcgagugcgccugcgugaacggcagcugcuucaccgugaugaccgacggccccagcaacggccaggccagccacaagaucuucaagauggagaagggcaagguggugaagagcguggagcuggacgcccccaacuaccacuacgaggagugcagcugcuaccccgacgccggcgagaucaccugcgugugcagagacaacuggcacggcagcaacagacccugggugagcuucaaccagaaccuggaguaccagaucggcuacaucugcagcggcguguucggcgacaaccccagacccaacgacggcaccggcagcugcggccccgugagcagcaacggcgccuacggcgugaagggcuucagcuucaaguacggcaacggcguguggaucggcagaaccaagagcaccaacagcagaagcggcuucgagaugaucugggaccccaacggcuggaccgagaccgacagcagcuucagcgugaagcaggacaucguggccaucaccgacuggagcggcuacagcggcagcuucgugcagcaccccgagcugaccggccuggacugcaucagacccugcuucuggguggagcugaucagaggcagacccaaggagagcaccaucuggaccagcggcagcagcaucagcuucugcggcgugaacagcgacaccgugggcuggagcuggcccgacggcgccgagcugcccuucaccaucgacaaguga

SEQ ID NO: 175696 - RNA, 1350 nt, Artificial Sequence
  derived and/or modified CDS sequence (opt4) from neuraminidase__InfluenzaA__ABL67796
augaaccccaacaagaagaucaucaccaucggcagcaucugcauggugaccggcauggugagccugaugcugcagaucggcaaccugaucagcaucugggugagccacagcauccacaccggcaaccagcacaaggccgagcccaucagcaacaccaacuuccugaccgagaaggccguggccagcgugaagcuggccggcaacagcagccugugccccaucaacggcugggccguguacagcaaggacaacagcaucagaaucggcagcaagggcgacguguucgugaucagagagcccuucaucagcugcagccaccuggagugcagaaccuucuuccugacccagggcgcccugcugaacgacaagcacagcaacggcaccgugaaggacagaagcccccacagaacccugaugagcugccccgugggcgaggcccccagccccuacaacagcagauucgagagcguggccuggagcgccagcgccugccacgacggcaccagcuggcugaccaucggcaucagcggccccgacaacggcgccguggccgugcugaaguacaacggcaucaucaccgacaccaucaagagcuggagaaacaacauccugagaacccaggagagcgagugcgccugcgugaacggcagcugcuucaccgugaugaccgacggccccagcaacggccaggccagccacaagaucuucaagauggagaagggcaagguggugaagagcguggagcuggacgcccccaacuaccacuacgaggagugcagcugcuaccccgacgccggcgagaucaccugcgugugcagagacaacuggcacggcagcaacagacccugggugagcuucaaccagaaccuggaguaccagaucggcuacaucugcagcggcguguucggcgacaaccccagacccaacgacggcaccggcagcugcggccccgugagcuacaacggcgccuacggcgugaagggcuucagcuucaaguacggcaacggcguguggaucggcagaaccaagagcaccaacagcagaagcggcuucgagaugaucugggaccccaacggcuggaccgagaccgacagcagcuucagcgugaagcaggacaucguggccaucaccgacuggagcggcuacagcggcagcuucgugcagcaccccgagcugaccggccuggacugcaucagacccugcuucuggguggagcugaucagaggcagacccaaggagagcaccaucuggaccagcggcagcagcaucagcuucugcggcgugaacagcgacaccgugggcuggagcuggcccgacggcgccgagcugcccuucaccaucgacaaguga

SEQ ID NO: 175697 - RNA, 1350 nt, Artificial Sequence
  derived and/or modified CDS sequence (opt4) from neuraminidase__InfluenzaA__ABL67807
augaaccccaacaagaagaucaucaccaucggcagcaucugcauggugaccggcauggugagccugaugcugcagaucggcaaccugaucagcaucugggugagccacagcauccacaccggcaaccagcacaaggccgagcccaucagcaacaccaaccugcugaccgagaaggccguggccagcgugaagcuggccggcaacagcagccugugccccaucgacggcugggccguguacagcaaggacaacagcaucagaaucggcagcaagggcgacguguucguggugagagagcccuucaucagcugcagccaccuggagugcagaaccuucuuccugacccagggcgcccugcugaacgacaagcacagcaacggcaccgugaaggacagaagcccccacagaacccugaugagcugccccgugggcgaggcccccagccccuacaacagcagauucgagagcguggccuggagcgccagcgccugccacgacggcaccagcuggcugaccaucggcaucagcggccccgacaacggcgccguggccgugcugaaguacaacggcaucaucaccgacaccaucaagagcuggagaaacaacauccugagaacccaggagagcgagugcgccugcgugaacggcagcugcuucaccgugaugaccgacggccccagcaacggccaggccagccacaagaucuucaagauggagaagggcaagguggugaagagcguggagcuggacgcccccaacuaccacuacgaggagugcagcugcuaccccgacgccggcgagaucaccugcgugugcagagacaacuggcacggcagcaacagacccugggugagcuucaaccagaaccuggaguaccagaucggcuacaucugcagcggcguguucggcgacaaccccagacccaacgacggcgccggcagcugcggccccgugagcagcaacggcgccuacggcgugaagggcuucagcuucaaguacggcaacggcguguggaucggcagaaccaagagcaccaacagcagaagcggcuucgagaugaucugggaccccaacggcuggaccgagaccgacagcagcuucagcgugaagcaggacaucguggccaucaccgacuggagcggcuacagcggcagcuucgugcagcaccccgagcugaccggccuggacugcaucagacccugcuucuggguggagcugaucagaggcagacccaaggagagcaccaucuggaccagcggcagcagcaucagcuucugcggcgugaacagcgacaccgugggcuggagcuggcccgacggcgccgagcugcccuucaccaucgacaaguga

SEQ ID NO: 175698 - RNA, 1350 nt, Artificial Sequence
  derived and/or modified CDS sequence (opt4) from neuraminidase__InfluenzaA__ABL67818
augaaccccaacaagaagaucaucaccaucggcagcaucugcauggugaccggcauggugagccugaugcugcagaucggcaaccugaucagcaucugggugagccacagcauccacaccggcaaccagcacaaggccgagcccaucagcaacaccaaccugcugaccgagaaggccguggccagcgugaagcuggccggcaacagcagccugugccccaucgacggcugggccguguacagcaaggacaacagcaucagaaucggcagcaagggcgacguguucguggugagagagcccuucaucagcugcagccaccuggagugcagaaccuucuuccugacccagggcgcccugcugaacgacaagcacagcaacggcaccgugaaggacagaagcccccacagaacccugaugagcugccccgugggcgaggcccccagccccuacaacagcagauucgagagcguggccuggagcgccagcgccugccacgacggcaccagcuggcugaccaucggcaucagcggccccgacaacggcgccguggccgugcugaaguacaacggcaucaucaccgacaccaucaagagcuggagaaacaacauccugagaacccaggagagcgagugcgccugcgugaacggcuacugcuucaccgugaugaccgacggccccagcaacggccaggccagccacaagaucuucaagauggagaagggcaagguggugaagagcguggagcuggacgcccccaacuaccacuacgaggagugcagcugcuaccccgacgccggcgagaucaccugcgugugcagagacaacuggcacggcagcaacagacccugggugagcuucaaccagaaccuggaguaccagaucggcuacaucugcagcggcguguucggcgacaaccccagacccaacgacggcgccggcagcugcggccccgugagcagcaacggcgccuacggcgugaagggcuucagcuucaaguacggcaacggcguguggaucggcagaaccaagagcaccaacagcagaagcggcuucgagaugaucugggaccccaacggcuggaccgagaccgacagcagcuucagcgugaagcaggacaucguggccaucaccgacuggagcggcuacagcggcagcuucgugcagcaccccgagcugaccggccuggacugcaucagacccugcuucuggguggagcugaucagaggcagacccaaggagagcaccaucuggaccagcggcagcagcaucagcuucugcggcgugaacagcgacaccgugggcuggagcuggcccgacggcgccgagcugcccuucaccaucgacaaguga

SEQ ID NO: 175699 - RNA, 1350 nt, Artificial Sequence
  derived and/or modified CDS sequence (opt4) from neuraminidase__InfluenzaA__ABL67829
augaaccccaacaagaagaucaucaccaucggcagcaucugcauggugaccggcauggugagccugaugcugcagaucggcaaccugaucagcaucugggugagccacagcauccacaccggcaaccagcacaaggccgagcccaucagcaacaccaaccugcugaccgagaaggccguggccagcgugaagcuggccggcaacagcagccugugccccaucaacggcugggccguguacagcaaggacaacagcaucagaaucggcagcaagggcgacguguucguggugagagagcccuucaucagcugcagccaccuggagugcagaaccuucuuccugacccagggcgcccugcugaacgacaagcacagcaacggcaccgugaaggacagaagcccccacagaacccugaugagcugccccgugggcgaggcccccagccccuacaacagcagauucgagagcguggccuggagcgccagcgccugccacgacggcaccagcuggcugaccaucggcaucagcggccccgacaacggcgccguggccgugcugaaguacaacggcaucaucaccgacaccaucaagagcuggagaaacaacauccugagaacccaggagagcgagugcgccugcgugaacggcuucugcuucaccgugaugaccgacggccccagcaacggccaggccagccacaagaucuucaagauggagaagggcaagguggugaagagcguggagcuggacgcccccaacuaccacuacgaggagugcagcugcuaccccgacgccggcgagaucaccugcgugugcagagacaacuggcacggcagcaacagacccugggugagcuucaaccagaaccuggaguaccagaucggcuacaucugcagcggcguguucggcgacaaccccagacccaacgacggcgccggcagcugcggccccguggccagcaacggcgccuacggcgugaagggcuucagcuucaaguacggcaacggcguguggaucggcagaaccaagagcaccaacagcagaagcggcuucgagaugaucugggaccccaacggcuggaccgagaccgacagcagcuucagcgugaagcaggacaucguggccaucaccgacuggagcggcuacagcggcagcuucgugcagcaccccgagcugaccggccuggacugcaucagacccugcuucuggguggagcugaucagaggcagacccaaggagagcaccaucuggaccagcggcagcagcaucagcuucugcggcgugaacagcgacaccgugggcuggagcuggcccgacggcgccgagcugcccuucaccaucgacaaguga

SEQ ID NO: 175700 - RNA, 1410 nt, Artificial Sequence; identical to SEQ ID NO: 174772
  derived and/or modified CDS sequence (opt4) from neuraminidase__InfluenzaA__ABM22018

SEQ ID NO: 175701 - RNA, 1413 nt, Artificial Sequence; identical to SEQ ID NO: 175616
  derived and/or modified CDS sequence (opt4) from neuraminidase__InfluenzaA__ABM22029

SEQ ID NO: 175702 - RNA, 1410 nt, Artificial Sequence; identical to SEQ ID NO: 174774
  derived and/or modified CDS sequence (opt4) from neuraminidase__InfluenzaA__ABM22040

SEQ ID NO: 175703 - RNA, 1410 nt, Artificial Sequence; identical to SEQ ID NO: 175681
  derived and/or modified CDS sequence (opt4) from neuraminidase__InfluenzaA__ABM22062

SEQ ID NO: 175704 - RNA, 1410 nt, Artificial Sequence
  derived and/or modified CDS sequence (opt4) from neuraminidase__InfluenzaA__ABM22073
augaaccccaaccagaagaucaucaccaucggcagcgugagccugaccaucgccaccaucugcuuccugaugcagaucgccauccuggugaccaccgugacccugcacuucaagcaguacgagugcaacagcccccccaacaaccaggugaugcugugcgagcccaccaucaucgagagaaacaucaccgagaucguguaccugaccaacaccaccaucgagaaggagaucugccccaagcuggccgaguacagaaacuggagcaagccccagugcaacaucaccggcuucgcccccuucagcaaggacaacagcaucagacugagcgccggcggcgacaucugggugaccagagagcccuacgugagcugcgaccccgacaagugcuaccaguucgcccugggccagggcaccacccugaacaacggccacagcaacgacaccgugcacgacagaacccccuacagaacccugcugaugaacgagcugggcgugcccuucaaccugggcaccagacaggugugcaucgccuggagcagcagcagcugccacgacggcaaggccuggcugcacgugugcgugaccggcgacgacgagaacgccaccgccagcuucaucuacaacggcaagcugguggacagcaucggcagcuggagcaagaagauccugagaacccaggagagcgagugcgugugcaucaacggcaccugcgccguggugaugaccgacggcagcgccagcggcaaggccgacaccaagauccuguucaucgaggagggcaagaucgugcacaucagcacccugagcggcagcgcccagcacguggaggagugcagcugcuaccccagauaccccggcgugagaugcgugugcagagacaacuggaagggcagcaacagacccaucguggacaucaacgugaaggacuacagcaucgugagcagcuacgugugcagcggccuggugggcgacacccccagaaagaacgacagcuucagcagcagccacugccuggaccccaacaacgaggagggcggccacggcgugaagggcugggccuucgacgacggcaacgacguguggaugggcagaaccaucagcgagaagcugagaagcggcuacgagaccuucaaggugaucgagggcuggagcaagcccaacagcaagcugcagaccaacagacaggugaucguggagagaggcaacagaagcggcuacagcggcaucuucagcguggagggcaagagcugcaucaacagaugcuucuacguggagcugaucagaggcagaaaggaggagaccgaggugugguggaccagcaacagcaucgugguguucugcggcaccagcggcaccuacggcaccggcagcuggcccgacggcgccgacaucaaccugaugcccaucuga

SEQ ID NO: 175705 - RNA, 1410 nt, Artificial Sequence; identical to SEQ ID NO: 174651
  derived and/or modified CDS sequence (opt4) from neuraminidase__InfluenzaA__ABM22084

SEQ ID NO: 175706 - RNA, 1410 nt, Artificial Sequence
  derived and/or modified CDS sequence (opt4) from neuraminidase__InfluenzaA__ABM22095
augaaccccaaccagaagaucaucaccaucggcagcgugagccugaccaucgccaccaucugcuuccugaugcagaucgccauccuggugaccaccgugacccugcacuucaagcagcacgagugcaacagcccccccaacaaccaggccaugcugugcgagcccaccaucaucgagagaaacaucaccgagaucgugcaccugaccaacaccaccaucgagaaggagaucugccccaagcugguggaguacagaaacuggagcaagccccagugcaacaucaccggcuucgcccccuucagcaaggacaacagcaucagacugagcgccggcggcgacaucugggugaccagagagcccuacgugagcugcgaccccgacaagugcuaccaguucgcccugggccagggcaccacccugaacaacggccacagcaacgacaccgugcacgacagaacccccuacagaacccugcugaugaacgagcugggcgugcccuuccaccugggcaccagacaggugugcaucgccuggagcagcagcagcugccacgacggcaaggccuggcugcacgugugcgugaccggcgacgacaagaacgccaccgccagcuucaucuacaacggcagacugguggacagcaucggcagcuggagcaagaagauccugagaacccaggagagcgagugcgugugcaucaacggcaccugcaccguggugaugaccgacggcagcgccagcggcaaggccgacaccaagauccuguucaucgaggagggcaagaucgugcacaucagcacccugagcggcagcgcccagcacguggaggagugcagcugcuaccccagauaccccggcgugagaugcgugugcagagacaacuggaagggcagcaacagacccaucguggacaucaacgugaaggacuacagcaucgugagcagcuacgugugcagcggccuggugggcgacacccccagaaagaacgacagcuucagcagcagccacugccuggaccccaacaacgaggagggcggccacggcgugaagggcugggccuucgacgacggcaacgacguguggaugggcagaaccaucagcgagaagcugagaagcggcuacgagaccuucaaggugaucgagggcuggagcaagcccaacagcaagcugcagaucaacagacaggugaucguggagagaggcaacagaagcggcuacagcggcaucuucagcguggagggcaagagcugcaucaacagaugcuucuacguggagcugaucagaggcagaaaggaggagaccgaggugugguggaccagcaacagcaucgugguguucugcggcaccagcggcaccuacggcaccggcagcuggcccgacggcgccgacaucaaccugaugcccaucuga

SEQ ID NO: 175707 - RNA, 1410 nt, Artificial Sequence; identical to SEQ ID NO: 174651
  derived and/or modified CDS sequence (opt4) from neuraminidase__InfluenzaA__ABM22106

SEQ ID NO: 175708 - RNA, 1410 nt, Artificial Sequence; identical to SEQ ID NO: 174651
  derived and/or modified CDS sequence (opt4) from neuraminidase__InfluenzaA__ABM22117

SEQ ID NO: 175709 - RNA, 1410 nt, Artificial Sequence; identical to SEQ ID NO: 175662
  derived and/or modified CDS sequence (opt4) from neuraminidase__InfluenzaA__ABM22128

SEQ ID NO: 175710 - RNA, 1410 nt, Artificial Sequence
  derived and/or modified CDS sequence (opt4) from neuraminidase__InfluenzaA__ABM22139
augaaccccaaccagaagaucaucaccaucggcagcgugagccugaccaucagcaccaucugcuucuucaugcagaucgccauccugaucaccaccgugacccugcacuucaagcaguacgaguucaacagcccccccaacaaccaggugaugcugugcgagcccaccaucaucgagagaaacaucaccgagaucguguaccugaccaacaccaccaucgagaaggagaucugccccaagcuggccgaguacagaaacuggagcaagccccagugcaacaucaccggcuucgcccccuucagcaaggacaacagcaucagacugagcgccggcggcgacaucugggugaccagagagcccuacgugagcugcgaccccgacaagugcuaccaguucgcccugggccagggcaccacccugaacaacgugcacagcaacgacaccgugcacgacagaacccccuacagaacccugcugaugaacgagcugggcgugcccuuccaccugggcaccaagcaggugugcaucgccuggagcagcagcagcugccacgacggcaaggccuggcugcacgugugcgugaccggcgacgacaagaacgccaccgccagcuucaucuacaacggcagacugguggacagcaucgugagcuggagcaaggagauccugagaacccaggagagcgagugcgugugcaucaacggcaccugcaccguggugaugaccgacggcagcgccagcgagaaggccgacaccaagauccuguucaucgaggagggcaagaucgugcacaccagcacccugagcggcagcgcccagcacguggaggagugcagcugcuaccccagauaccccggcgugagaugcgugugcagagacaacuggaagggcagcaacagacccaucguggacaucaacaucaaggacuacagcaucgugagcagcuacgugugcagcggccuggugggcgacacccccagaaagaacgacagcagcagcagcagccacugccuggaccccaacaacgaggagggcggccacggcgugaagggcugggccuucgacgacggcaacgacguguggaugggcagaaccaucagcgagaagcugagaagcggcuacgagaccuucaaggugaucgagggcuggagcaaccccaacagcaagcugcagaucaacagacaggugaucguggacagaggcaacagaagcggcuacagcggcaucuucagcguggagggcaagagcugcaucaacagaugcuucuacguggagcugaucagaggcagaaaggaggagaccgaggugcuguggaccagcaacagcaucgugguguucugcggcaccagcggcaccuacggcaccggcagcuggcccgacggcgccgacaucaaccugaugcccaucuga

SEQ ID NO: 175711 - RNA, 1410 nt, Artificial Sequence
  derived and/or modified CDS sequence (opt4) from neuraminidase__InfluenzaA__ABM22150
augaaccccaaccagaagaucaucaccaucggcagcgugagccugaccaucagcaccaucugcuucuucaugcagaucgccauccugaucaccaccgugacccugcacuucaagcaguacgaguucaacagccugcccaacaaccaggugaugcugugcgagcccaccaucaucgagagaaacaucaccgagaucguguaccugaccaacaccaccaucgagaaggagaucugccccgagcuggccgaguacagaaacuggagcaagccccagugcgacaucaccggcuucgcccccuucagcaaggacaacagcaucagacugagcgccggcggcgacaucugggugaccagagagcccuacgugagcugcgaccccgacaagugcuaccaguucgcccugggccagggcaccacccugaacaacgugcacagcaacgacaccgugcacgacagaacccccuacagaacccugcugaugaacgagcugggcgugcccuuccaccugggcaccaagcaggugugcaucgccuggagcagcagcagcugccacgacggcaaggccuggcugcacgugugcgugaccggcgacgacaagaacgccaccgccagcuucaucuacaacggcagacugguggacagcaucgugagcuggagcaagaagauccugagaacccaggagagcgagugcgugugcaucaacggcaccugcaccguggugaugaccgacggcagcgccagcggcaaggccgacaccaagauccuguucaucgaggagggcaagaucgugcacaccagcacccugagcggcagcgcccagcacguggaggagugcagcugcuaccccagauaccccggcgugagaugcgugugcagagacaacuggaagggcagcaacagacccaucguggacaucaacaucaaggacuacagcaucgugagcagcuacgugugcagcggccuggugggcgacacccccagaaagaacgacagcagcagcagcagccacugccuggaccccaacaacgaggagggcggccacggcgugaagggcugggccuucgacgacggcaacgacguguggaugggcagaaccaucagcgagaagcugagaagcggcuacgagaccuucaaggugaucgagggcuggagcaaccccaacagcaagcugcagaucaacagacaggugaucguggacagaggcaacagaagcggcuacagcggcaucuucagcguggagggcaagagcugcaucaacagaugcuucuacguggagcugaucagaggcagaaaggaggagaccgaggugcuguggaccagcaacagcaucgugguguucugcggcaccagcggcaccuacggcaccggcagcuggcccgacggcgccgacaucaaccugaugcccaucuga

SEQ ID NO: 175712 - RNA, 1413 nt, Artificial Sequence; identical to SEQ ID NO: 175119
  derived and/or modified CDS sequence (opt4) from neuraminidase__InfluenzaA__ABM22161

SEQ ID NO: 175713 - RNA, 1413 nt, Artificial Sequence; identical to SEQ ID NO: 175119
  derived and/or modified CDS sequence (opt4) from neuraminidase__InfluenzaA__ABM22172

SEQ ID NO: 175714 - RNA, 1413 nt, Artificial Sequence; identical to SEQ ID NO: 175119
  derived and/or modified CDS sequence (opt4) from neuraminidase__InfluenzaA__ABM22183

SEQ ID NO: 175715 - RNA, 1413 nt, Artificial Sequence; identical to SEQ ID NO: 175119
  derived and/or modified CDS sequence (opt4) from neuraminidase__InfluenzaA__ABM22194

SEQ ID NO: 175716 - RNA, 1413 nt, Artificial Sequence; identical to SEQ ID NO: 175119
  derived and/or modified CDS sequence (opt4) from neuraminidase__InfluenzaA__ABM22205

SEQ ID NO: 175717 - RNA, 1413 nt, Artificial Sequence; identical to SEQ ID NO: 175119
  derived and/or modified CDS sequence (opt4) from neuraminidase__InfluenzaA__ABM22216

SEQ ID NO: 175718 - RNA, 1413 nt, Artificial Sequence; identical to SEQ ID NO: 175119
  derived and/or modified CDS sequence (opt4) from neuraminidase__InfluenzaA__ABM22227

SEQ ID NO: 175719 - RNA, 1413 nt, Artificial Sequence; identical to SEQ ID NO: 175119
  derived and/or modified CDS sequence (opt4) from neuraminidase__InfluenzaA__ABM22238

SEQ ID NO: 175720 - RNA, 1413 nt, Artificial Sequence
  derived and/or modified CDS sequence (opt4) from neuraminidase__InfluenzaA__ABM22271
augaaccccaaccagaagaucaucaccaucggcagcaucagcaucgugaucggcaucaucagccugauccugcagaucggcaacaucaucagcaucugggccagccacagcauccagaccggcagccagaaccacaccggcaucugcaaccagagaaucaucaccuacgagaacagcaccugggugaaccagaccuacgugaacaucaacaacaccaacgugguggccggcaaggacaagaccagcaugacccuggccggcaacagcagccugugccccaucagaggcugggccaucuacaccaaggacaacagcaucagaaucggcagcaagggcgacguguucgugaucagagagcccuucaucagcugcagccaccuggagugcagaaccuucuuccugacccagggcgcccugcugaacgacaagcacagcaacggcaccgugaaggacagaagccccuacagagcccugaugagcugcccccugggcgaggcccccagccccuacaacagcagauucgagagcguggccuggagcgccagcgccugccacgacggccugggcuggcugaccaucggcaucagcggccccgacaacggcgccguggccgugcugaaguacaacggcaucaucaccgagaccaucaagagcuggaagaagagaauccugagaacccaggagagcgagugcgugugcaugaacggcagcugcuucaccaucaugaccgacggccccagcaacggcgccgccagcuacagaaucuucaagaucgagaagggcagagugaccaagagcaucgagcugggcgcccccaacuaccacuacgaggagugcagcugcuaccccgacaccggcaccgugaugugcgugugcagagacaacuggcacggcagcaacagacccugggugagcuucaaccagaaccuggacuaccagaucggcuacaucugcagcggcguguucggcgacaaccccagacccaaggacggcgagggcagcugcaaccccgugaccguggacggcgccgacggcgugaagggcuucagcuacagauacggcaacggcguguggaucggcagaaccaagagcaacagacugagaaagggcuucgagaugaucugggaccccaacggcuggaccgacaccgacagcgacuucagcaugaagcaggacaucguggccaugaccgacuggagcggcuacagcggcagcuucgugcagcaccccgagcugaccggccuggacugcaugagacccugcuucuggguggagcuggugagaggccugcccagagagaacaccaccaucuggaccagcggcagcagcaucagcuucugcggcgugaacagcgacaccgccaacuggagcuggcccgacggcgccgagcugcccuucaccaucgacaaguga

SEQ ID NO: 175721 - RNA, 1413 nt, Artificial Sequence; identical to SEQ ID NO: 175028
  derived and/or modified CDS sequence (opt4) from neuraminidase__InfluenzaA__ABM22282

SEQ ID NO: 175722 - RNA, 1410 nt, Artificial Sequence; identical to SEQ ID NO: 174403
  derived and/or modified CDS sequence (opt4) from neuraminidase__InfluenzaA__ABM22304

SEQ ID NO: 175723 - RNA, 1410 nt, Artificial Sequence; identical to SEQ ID NO: 174403
  derived and/or modified CDS sequence (opt4) from neuraminidase__InfluenzaA__ABM22315

SEQ ID NO: 175724 - RNA, 1410 nt, Artificial Sequence; identical to SEQ ID NO: 174403
  derived and/or modified CDS sequence (opt4) from neuraminidase__InfluenzaA__ABM22326

SEQ ID NO: 175725 - RNA, 1410 nt, Artificial Sequence; identical to SEQ ID NO: 174403
  derived and/or modified CDS sequence (opt4) from neuraminidase__InfluenzaA__ABM22337

SEQ ID NO: 175726 - RNA, 1410 nt, Artificial Sequence; identical to SEQ ID NO: 174406
  derived and/or modified CDS sequence (opt4) from neuraminidase__InfluenzaA__ABM22348

SEQ ID NO: 175727 - RNA, 1410 nt, Artificial Sequence; identical to SEQ ID NO: 174406
  derived and/or modified CDS sequence (opt4) from neuraminidase__InfluenzaA__ABM22359

SEQ ID NO: 175728 - RNA, 1410 nt, Artificial Sequence; identical to SEQ ID NO: 174406
  derived and/or modified CDS sequence (opt4) from neuraminidase__InfluenzaA__ABM22370

SEQ ID NO: 175729 - RNA, 1413 nt, Artificial Sequence; identical to SEQ ID NO: 174985
  derived and/or modified CDS sequence (opt4) from neuraminidase__InfluenzaA__ABM66867

SEQ ID NO: 175730 - RNA, 1413 nt, Artificial Sequence; identical to SEQ ID NO: 175119
  derived and/or modified CDS sequence (opt4) from neuraminidase__InfluenzaA__ABM66900

SEQ ID NO: 175731 - RNA, 1413 nt, Artificial Sequence; identical to SEQ ID NO: 175119
  derived and/or modified CDS sequence (opt4) from neuraminidase__InfluenzaA__ABM66911

SEQ ID NO: 175732 - RNA, 1410 nt, Artificial Sequence; identical to SEQ ID NO: 174406
  derived and/or modified CDS sequence (opt4) from neuraminidase__InfluenzaA__ABM66922

SEQ ID NO: 175733 - RNA, 1410 nt, Artificial Sequence; identical to SEQ ID NO: 174406
  derived and/or modified CDS sequence (opt4) from neuraminidase__InfluenzaA__ABM66933

SEQ ID NO: 175734 - RNA, 1410 nt, Artificial Sequence; identical to SEQ ID NO: 174406
  derived and/or modified CDS sequence (opt4) from neuraminidase__InfluenzaA__ABM66944

SEQ ID NO: 175735 - RNA, 1410 nt, Artificial Sequence; identical to SEQ ID NO: 174406
  derived and/or modified CDS sequence (opt4) from neuraminidase__InfluenzaA__ABM66955

SEQ ID NO: 175736 - RNA, 1410 nt, Artificial Sequence; identical to SEQ ID NO: 174406
  derived and/or modified CDS sequence (opt4) from neuraminidase__InfluenzaA__ABM66966

SEQ ID NO: 175737 - RNA, 1410 nt, Artificial Sequence; identical to SEQ ID NO: 174406
  derived and/or modified CDS sequence (opt4) from neuraminidase__InfluenzaA__ABM66977

SEQ ID NO: 175738 - RNA, 1410 nt, Artificial Sequence; identical to SEQ ID NO: 174406
  derived and/or modified CDS sequence (opt4) from neuraminidase__InfluenzaA__ABM66988

SEQ ID NO: 175739 - RNA, 1410 nt, Artificial Sequence; identical to SEQ ID NO: 174406
  derived and/or modified CDS sequence (opt4) from neuraminidase__InfluenzaA__ABM66999

SEQ ID NO: 175740 - RNA, 1410 nt, Artificial Sequence; identical to SEQ ID NO: 174406
  derived and/or modified CDS sequence (opt4) from neuraminidase__InfluenzaA__ABM67010

SEQ ID NO: 175741 - RNA, 1410 nt, Artificial Sequence; identical to SEQ ID NO: 174406
  derived and/or modified CDS sequence (opt4) from neuraminidase__InfluenzaA__ABM67021

SEQ ID NO: 175742 - RNA, 1413 nt, Artificial Sequence
  derived and/or modified CDS sequence (opt4) from neuraminidase__InfluenzaA__ABM67054
augaaccccaaccagaagaucaucaccaucggcagcaucagcaucgccaucggcaccaucagccugaugcugcagaucggcaacaugaucagcaucugggccagccacagcauccagaccggcagccagaaccacaccggcaucugcaaccagagaaucaucaccuacgagaacagcaccugggugaaccacaccuacgugaacaucaacaacaccaacgugguggccggcaaggacaagaccagcgugacccuggccggcaacagcagccugugcagcaucagcggcugggccaucuacaccaaggacaacagcaucagaaucggcagcaagggcgacguguucgugaucagagagcccuucaucagcugcagccaccuggagugcagaaccuucuuccugacccagggcgcccugcugaacgacaagcacagcaacggcaccgugaaggacagaagccccuacagagcccugaugagcugcccccugggcgaggcccccagccccuacaacagcaaguucgagagcguggccuggagcgccagcgccugccacgacggcaugggcuggcugaccaucggcaucagcggccccgacaacggcgccguggccgugcugaaguacaacggcaucaucaccgagaccaucaagagcuggaagaagagaauccugagaacccaggagagcgagugcgugugcgugaacggcagcugcuucaccaucaugaccgacggccccagcaacggcgccgccagcuacaagaucuucaagaucgagaagggcaaggugaccaagagcaucgagcugaacgcccccaacuuccacuacgaggagugcagcugcuaccccgacaccggcaccgugaugugcgugugcagagacaacuggcacggcagcaacagacccugggugagcuucaaccagaaccuggacuaccagaucggcuacaucugcagcggcguguucggcgacaaccccagacccaaggacggcaagggcagcugcaaccccgugaccguggacggcgccgacggcgugaagggcuucagcuacaaguacggcaacggcguguggaucggcagaaccaagagcaacagacugagaaagggcuucgagaugaucugggaccccaacggcuggaccgacaccgacagcgacuucagcgugaagcaggacgugguggccaucaccgacuggagcggcuacagcggcagcuucgugcagcaccccgagcugaccggccuggacugcaucagacccugcuucuggguggagcuggugagaggccugcccagagagaacaccaccaucuggaccagcggcagcagcaucagcuucugcggcguggacagcgacaccgccaacuggagcuggcccgacggcgccgagcugcccuucaccaucgacaaguga

SEQ ID NO: 175743 - RNA, 1350 nt, Artificial Sequence
  derived and/or modified CDS sequence (opt4) from neuraminidase__InfluenzaA__ABM68048
augaaccccaaccagaagaucaucaccaucggcagcaucugcauggugaucggcaucgugagccugaugcugcagaucggcaacaucaucagcaucuggaucagccacagcauccagaccggcaaccagugccaggccggccccaucagcaacaccaaguuccugaccgagaaggccguggccagcgugacccuggccggcaacagcagccugugccccaucagcggcugggccguguacagcaaggacaacagcaucagaaucggcagcagaggcgacguguucgugaucagagagagcuucaucagcugcagccaccuggagugcagaaccuucuuccugacccagggcgcccugcugaacgacaagcacagcaacggcaccgugaaggacagaagcccccacagaacccugaugagcugccccgugggcgaggcccccagccccuacaacagcagauucgagagcguggccuggagcgccagcgccugccacgacggcaccagcuggcugaccaucggcaucagcggccccgacaacggcgccguggccgugcugaaguacaacggcaucaucaccgacaccaucaagagcuggagaaacaacauccugagaacccaggagagcgagugcgccugcgugaacggcagcugcuucaccgugaugaccgacggccccagcaacggccaggccagcuacaagaucuucaagauggagaagggcaagguggugaagagcguggagcuggacgcccccaacuaccacuacgaggagugcagcugcuaccccgacgccggcgagaucaccugcgugugcagagacagcuggcacggcagcaacagacccugggugagcuucaaccagaaccuggaguaccagaucggcuacaucugcagcggcguguucggcgacaaccccagacccaacgacggcaccggcagcugcggccccgugagccccaacggcgccuacggcgugaagggcuucagcuucaaguacggcaacggcguguggaucggcagaaccaagagcaccaacagcagaagcggcuucgagaugaucugggaccccaacggcuggaccggcaccgacagcagcuucagcgugaagcaggacaucguggccaucaccgacuggagcggcuacagcggcagcuucgugcagcaccccgagcugaccggccuggacugcaucagacccugcuucuggguggagcugaucagaggcagacccaaggagagcaccaucuggaccagcggcagcagcaucagcuucugcggcgugaacagcgacaccgugagcuggagcuggcccgacggcgccgagcugcccuucaccaucgacaaguga

SEQ ID NO: 175744 - RNA, 1350 nt, Artificial Sequence
  derived and/or modified CDS sequence (opt4) from neuraminidase__InfluenzaA__ABM68049
augaaccccaaccagaagaucaucaccaucggcagcaucugcauggugaucggcaucgugagccugaugcugcagaucggcaacaucaucagcaucuggaucagccacagcauccagaccggcaaccagugccaggccgagcccaucagcaacaccaaguuccugaccgagaaggccguggccagcgugacccuggccggcaacagcagccugugccccaucagcggcugggccguguacagcaaggacaacagcaucagaaucggcagcagaggcgacguguucgugaucagagagcccuucaucagcugcagccaccuggagugcagaaccuucuuccugacccagggcgcccugcugaacgacaagcacagcaacggcaccgugaaggacagaagcccccacagaacccugaugagcugccccgugggcgaggcccccagccccuacaacagcagauucgagagcguggccuggagcgccagcgccugccacgacggcaccagcuggcugaccaucggcaucagcggccccgacaacggcgccguggccgugcugaaguacaacggcaucaucaccgacaccaucaagagcuggagaaacaacauccugagaacccaggagagcgagugcgccugcgugaacggcagcugcuucaccgugaugaccgacggccccagcagcggccaggccagcuacaagaucuucaagauggagaagggcaagguggugaagagcguggagcuggacgcccccaacuaccacuacgaggagugcagcugcuaccccgacgccggcgagaucaccugcgugugcagagacagcuggcacggcagcaacagacccugggugagcuucaaccagaaccuggaguaccagaucggcuacaucugcagcggcguguucggcgacaaccccagacccaacgacggcaccggcagcugcggccccgugagccccaacggcgccuacggcgugaagggcuucagcuucaaguacggcaacggcguguggaucggcagaaccaagagcaccaacagcagaagcggcuucgagaugaucugggaccccaacggcuggaccggcaccgacagcagcuucagcgugaagcaggacaucguggccaucaccgacuggagcggcuacagcggcagcuucgugcagcaccccgagcugaccggccuggacugcaucagacccugcuucuggguggagcugaucagaggcagacccaaggagagcaccaucuggaccagcggcagcagcaucagcuucugcggcgugaacagcgacaccgugagcuggagcuggcccgacggcgccgagcugcccuucaccaucgacaaguga

SEQ ID NO: 175745 - RNA, 1350 nt, Artificial Sequence
  derived and/or modified CDS sequence (opt4) from neuraminidase__InfluenzaA__ABM90436
augaaccccaaccagaagaucaucaccaucggcagcaucugcauggugaucggcaucgugagccugaugcugcagaucggcaacaugaucagcaucugggugagccacagcauccagaagggcaaccagcaccaggccgagagcaucagcaacaccaacccccugaccgagaaggccguggccagcgugacccuggccggcaacagcagccugugccccaucagaggcugggccgugcacagcaaggacaacaacaucagaaucggcagcaagggcgacguguucgugaucagagagcccuucaucagcugcagccaccuggagugcagaaccuucuuccugacccagggcgcccugcugaacgacaagcacagcaacggcaccgugaaggacagaagcccccacagaacccugaugagcugccccgugggcgaggcccccagccccuacaacagcagauucgagagcguggccuggagcgccagcgccugccacgacggcaccagcuggcugaccaucggcaucagcggccccgacaacgaggccguggccgugcugaaguacaacggcaucaucaccgacaccaucaagagcuggagaaacaacauccugagaacccaggagagcgagugcgccugcgugaacggcagcugcuucaccgugaugaccgacggccccagcaacggccaggccagcuacaagaucuucaagaugaagaagggcaagguggugaagagcguggagcuggacgcccccaacuaccacuacgaggagugcagcugcuaccccgacgccggcgagaucaccugcgugugcagagacaacuggcacggcagcaacagacccugggugagcuucaaccagaaccuggaguaccagaucggcuacaucugcagcggcguguucggcgacaaccccagacccaacgacggcaccggcagcugcggccccaugagccccaacggcgccuacggcgugaagggcuucagcuucaaguacggcaacggcguguggaucggcagaaccaagagcaccaacagcagaagcggcuucgagaugaucugggaccccaacggcuggaccggcaccgacagcagcuucagcgugaagcaggacaucguggccaucaccgacuggagcggcuacagcggcagcuucgugcagcaccccgagcugaccggccuggacugcaucagacccugcuucuggguggagcugaucagaggcagacccaaggagagcaccaucuggaccagcggcagcagcaucagcuucugcggcgugaacagcgacaccgugagcuggagcuggcccgacggcgccgagcugcccuucaccaucgacaaguga

SEQ ID NO: 175746 - RNA, 1350 nt, Artificial Sequence; identical to SEQ ID NO: 175745
  derived and/or modified CDS sequence (opt4) from neuraminidase__InfluenzaA__ABM90447

SEQ ID NO: 175747 - RNA, 1350 nt, Artificial Sequence; identical to SEQ ID NO: 175745
  derived and/or modified CDS sequence (opt4) from neuraminidase__InfluenzaA__ABM90458

SEQ ID NO: 175748 - RNA, 1350 nt, Artificial Sequence; identical to SEQ ID NO: 175745
  derived and/or modified CDS sequence (opt4) from neuraminidase__InfluenzaA__ABM90469

SEQ ID NO: 175749 - RNA, 1350 nt, Artificial Sequence
  derived and/or modified CDS sequence (opt4) from neuraminidase__InfluenzaA__ABM90491
augaaccccaaccagaagaucaucaccaucggcagcaucugcauggugaucggcaucgugagccugaugcugcagaucggcaacaugaucagcaucugggugagccacagcauccagaagggcaaccagcaccaggccgagagcaucagcaacaccaacccccugaccgagaaggccguggccagcgugacccuggccggcaacagcagccugugccccaucagaggcugggccgugcacagcaaggacaacaacaucagaaucggcagcaagggcgacguguucgugaucagagagcccuucaucagcugcagccaccuggagugcagaaccuucuuccugacccagggcgcccugcugaacgacaagcacagcaacggcaccgugaaggacagaagcccccacagaacccugaugagcugccccgugggcgaggcccccagccccuacaacagcagauucgagagcguggccuggagcgccagcgccugccacgacggcaccagcuggcugaccaucggcaucagcggccccgacaacgaggccguggccgugcugaaguacaacggcaucaucaccgacaccaucaagagcuggagaaacaacauccugagaacccaggagagcgagugcgccugcgugaacggcagcugcuucaccgugaugaccgacggccccagcaacggccaggccagcuacaagaucuucaagaugaagaagggcaaggugaucaagagcguggagcuggacgccaccaacuaccacuacgaggagugcagcugcuaccccgacgccggcgagaucaccugcgugugcagagacaacuggcacggcagcaacagacccugggugagcuucaaccagaaccuggaguaccagaucggcuacaucugcagcggcguguucggcgacaaccccagacccaacgacggcaccggcagcugcggccccaugagccccaacggcgccuacggcgugaagggcuucagcuucaaguacggcaacggcguguggaucggcagaaccaagagcaccaacagcagaagcggcuucgagaugaucugggaccccaacggcuggaccggcaccgacagcagcuucagcgugaagcaggacaucguggccaucaccgacuggagcggcuacagcggcagcuucgugcagcaccccgagcugaccggccuggacugcaucagacccugcuucuggguggagcugaucagaggcagacccaaggagagcaccaucuggaccagcggcagcagcaucagcuucugcggcgugaacagcgacaccgugagcuggagcuggcccgacggcgccgagcugcccuucaccaucgacaaguga

SEQ ID NO: 175750 - RNA, 1350 nt, Artificial Sequence; identical to SEQ ID NO: 175749
  derived and/or modified CDS sequence (opt4) from neuraminidase__InfluenzaA__ABM90502

SEQ ID NO: 175751 - RNA, 1350 nt, Artificial Sequence
  derived and/or modified CDS sequence (opt4) from neuraminidase__InfluenzaA__ABM90524
augaaccccaaccagaagaucaucaccaucggcagcaucugcauggugaucggcaucgugagccugaugcugcagaucggcaacaugaucagcaucugggugagccacagcauccagaccggcaaccagcaccaggccgagagcaucagcaacaccaacccccugaccgagaaggccguggugagcgugacccuggccggcaacagcagccugugccccaucagaggcugggccgugcacagcaaggacaacaacaucagaaucggcagcaagggcgacguguucgugaucagagagcccuucaucagcugcagccaccuggagugcagaaccuucuuccugacccagggcgcccugcugaacgacaagcacagcaacggcaccgugaaggacagaagcccccacagaacccugaugagcugccccgugggcgaggcccccagccccuacaacagcagauucgagagcguggccuggagcgccagcgccugccacgacggcaccagcuggcugaccaucggcaucagcggccccgacaacgaggccguggccgugcugaaguacaacggcaucaucaccgacaccaucaagagcuggagaaacaacauccugagaacccaggagagcgagugcgccugcgugaacggcagcugcuucaccgugaugaccgacggccccagcaacggccaggccagcuacaagaucuucaagauggagaagggcaagguggugaagagcguggagcuggacgcccccaacuaccacuacgaggagugcagcugcuaccccgacgccggcgagaucaccugcgugugcagagacaacuggcacggcagcaacagacccugggugagcuucaaccagaaccuggaguaccagaucggcuacaucugcagcggcguguucggcgacaaccccagacccaacgacggcaccggcagcugcggccccaugagccccaacggcgccuacggcgugaagggcuucagcuucaaguacggcaacggcguguggaucggcagaaccaagagcaccaacagcagaagcggcuucgagaugaucugggaccccaacggcuggaccggcaccgacagcagcuucagcgugaagcaggacaucguggccaucaccgacuggagcggcuacagcggcagcuucgugcagcaccccgagcugaccggccuggacugcaucagacccugcuucuggguggagcugaucagaggcagacccaaggagagcaccaucuggaccagcggcagcagcaucagcuucugcggcgugaacagcgacaccgugagcuggagcuggcccgacggcgccgagcugcccuucaccaucgacaaguga

SEQ ID NO: 175752 - RNA, 1350 nt, Artificial Sequence; identical to SEQ ID NO: 175751
  derived and/or modified CDS sequence (opt4) from neuraminidase__InfluenzaA__ABM90535

SEQ ID NO: 175753 - RNA, 1350 nt, Artificial Sequence; identical to SEQ ID NO: 175751
  derived and/or modified CDS sequence (opt4) from neuraminidase__InfluenzaA__ABM90546

SEQ ID NO: 175754 - RNA, 1413 nt, Artificial Sequence
  derived and/or modified CDS sequence (opt4) from neuraminidase__InfluenzaA__ABN50759
augaaccccaaccagaagaucaucaccaucggcagcaucugcauggccaucggcaucaucagccugauccugcagaucggcaacaucaucagcaucugggugagccacagcauccagaccggcagccagaaccacaccggcaucugcaaccagagaaucaucaccuacgagaacagcaccugggugaaccagaccuacgugaacaucagcaacaccaacgugguggccggcaaggacaccaccagcaugacccuggccggcaacagcagccugugccccaucagaggcugggccaucuacagcaaggacaacagcaucagaaucggcagcaagggcgacguguucgugaucagagagcccuucaucagcugcagccaccuggagugcagaaccuucuuccugacccagggcgcccugcugaacgacaagcacagcaacggcaccgugaaggacagaagccccuacagagcccugaugagcugccccaucggcgaggcccccagccccuacaacagcagauucgagagcguggccuggagcgccagcgccugccacgacggcaugggcuggcugaccaucggcaucagcggccccgacgacggcgccguggccgugcugaaguacaacggcaucaucaccgagaccaucaagagcuggagaaagcagauccugagaacccaggagagcgagugcgugugcgugaacggcagcugcuucaccaucaugaccgacggccccagcgacggccaggccagcuacagaaucuucaagaucgagaagggcaagaucaccaagagcaucgagcuggacgcccccaacagccacuacgaggagugcagcugcuaccccgacaccggcaccgugaugugcgugugcagagacaacuggcacggcagcaacagacccugggugagcuucaaccagaaccuggacuaccagaucggcuacaucugcagcggcguguucggcgacaaccccagacccaaggacggcaagggcagcugcgaccccgugaacguggacggcgccgacggcgugaagggcuucagcuacagauacggcaacggcguguggaucggcagaaccaagagcaacagcagcagaaagggcuucgagaugaucugggaccccaacggcuggaccgacaccgacagcaacuuccuggugaagcaggacgugguggccaugaccgacuggagcggcuacagcggcagcuucgugcagcaccccgagcugaccggccuggacugcaucagacccugcuucuggguggagcugaucagaggcagacccagagagaagaccaccaucuggaccagcggcagcagcaucagcuucugcggcgugaacagcgacaccgugaacuggagcuggcccgacggcgccgagcugcccuucaccaucgacaaguga

SEQ ID NO: 175755 - RNA, 1410 nt, Artificial Sequence
  derived and/or modified CDS sequence (opt4) from neuraminidase__InfluenzaA__ABN50770
augaaccccaaccagaagaucaucaccaucggcagcgugagccugaccaucagcaccaucugcuucuucaugcagaucgccauccugaucaccaccgugacccugcacuucaagcaguacgaguucaacagcccccccaacaaccaggugaugcugugcgagcccaccaucaucgagagaaacaucaccgagaucguguaccugaccaacaccaccaucgagaaggagaucugccccaagcuggccgaguacagaaacuggagcaagccccagugcgacaucaccggcuucgcccccuucagcaaggacaacagcaucagacugagcgccggcggcgacaucugggugaccagagagcccuacgugagcugcgaccccgacaagugcuaccaguucgcccugggccagggcaccacccugaacaacgugcacagcaacgacaccgugcacgacagaacccccuacagaacccugcugaugaacgagcugggcgugcccuuccaccugggcaccaagcaggugugcaucgccuggagcagcagcagcugccacgacggcaaggccuggcugcacgugugcgugaccggcgacgacaagaacgccaccgccagcuucaucuacaacggcagacugguggacagcguggugagcuggagcaagaagauccugagaacccaggagagcgagugcgugugcaucaacggcaccugcaccguggugaugaccgacggcagcgccagcggcaaggccgacaccaagauccuguucaucgaggagggcaagaucgugcacaccagcacccugagcggcagcgcccagcacguggaggagugcagcugcuaccccagauaccccggcgugagaugcgugugcagagacaacuggaagggcagcaacagacccaucguggacaucaacaucaaggacuacagcaucgugagcagcuacgugugcagcggccuggugggcgacacccccagaaagaacgacagcagcagcagcagccacugccuggaccccaacaacgaggagggcggccacggcgugaagggcugggccuucgacgacggcaacgacguguggaugggcagaaccaucagcgagaagcugagaagcggcuacgagaccuucaaggugaucgagggcuggagcaaccccaacagcaagcugcagaucaacagacaggugaucguggacagaggcaacagaagcggcuacagcggcaucuucagcguggagggcaagagcugcaucaacagaugcuucuacguggagcugaucagaggcagaaaggaggagaccgaggugcuguggaccagcaacagcaucgugguguucugcggcaccagcggcaccuacggcaccggcagcuggcccgacggcgccgacaucaaccugaugcccaucuga

SEQ ID NO: 175756 - RNA, 1413 nt, Artificial Sequence
  derived and/or modified CDS sequence (opt4) from neuraminidase__InfluenzaA__ABN50903
augaaccccaaccagaagaucaucaccaucggcagcaucugcauggccaucggcaucaucagccugauccugcagaucggcaacaucaucagcaucugggugagccacagcauccagaccggcagccagaaccacaccggcaucugcaaccagagaaucaucaccuacgagaacagcaccugggugaaccagaccuacgugaacaucaacaacaccaacgugguggccggcaaggacaccaccagcgugacccuggccggcaacagcagccugugccccgugagaggcugggccaucuacagcaaggacaacagcaucagaaucggcagcaagggcgacguguucgugaucagagagcccuucaucagcugcagccaccuggagugcagaaccuucuuccugacccagggcgcccugcugaacgacaagcacagcaacggcaccgugaaggacagaagccccuacagagcccugaugagcugccccaucggcgaggcccccagccccuacaacagcagauucgagagcguggccuggagcgccagcgccugccacgacggcaugggcuggcugaccaucggcaucagcggccccgacgacggcgccguggccgugcugaaguacaacggcaucaucaccgagaccaucaagagcuggagaaagagaauccugagaacccaggagagcgagugcgugugcgugaacggcagcugcuucaccaucaugaccgacggccccagcaacggccccgccagcuacagaaucuucaagaucgagaagggcaagaucaccaagagcaucgagcuggacgcccccaacagccacuacgaggagugcagcugcuaccccgacaccggcaccgugaugugcgugugcagagacaacuggcacggcagcaacagacccugggugagcuucaaccagaaccuggacuaccagaucggcuacaucugcagcggcguguucggcgacaaccccagacccaaggacggcaagggcagcugcggccccgugaccguggacggcgccgacggcgugaagggcuucagcuacagauacggcaacggcguguggaucggcagaaccaagagcaacagcagcagaaagggcuucgagaugaucugggaccccaacggcuggaccgacaccgacagcaacuuccuggugaagcaggacgugguggccaugaccgacuggagcggcuacagcggcagcuucauccagcaccccgagcugaccggccuggacugcaugagacccugcuucuggguggagcugaucagaggcagacccagagagaagaccaccaucuggaccagcggcagcagcaucagcuucugcggcgugaacagcgacaccgugaacuggagcuggcccgacggcgccgagcugcccuucaccaucgacaaguga

SEQ ID NO: 175757 - RNA, 1413 nt, Artificial Sequence; identical to SEQ ID NO: 175119
  derived and/or modified CDS sequence (opt4) from neuraminidase__InfluenzaA__ABN50920

SEQ ID NO: 175758 - RNA, 1413 nt, Artificial Sequence
  derived and/or modified CDS sequence (opt4) from neuraminidase__InfluenzaA__ABN50931
augaaccccaaccagaagaucaucaccaucggcagcaucugcauggccaucggcaucaucagccugauccugcagaucggcaacaucgugagcaucuggaucagccacagcauccagaccggcagccagaacuacaccggcaucugcaaccagagaaucaucaccuacgagaacagcaccugggugaaccagaccuacgugaacaucaacaacaccaacgugguggccggccaggacaccaccagcguggcccuggccggcaacagcagccugugccccaucagcggcugggccaucuacagcaaggacaacagcaucagaaucggcagcaagggcgacguguucgugaucagagagcccuucaucagcugcagccaccuggagugcagaaccuucuuccugacccagggcgcccugcugaacgacaagcacagcaacggcaccgugaaggacagaagccccuacagagcccugaugagcugccccaucggcgaggcccccagccccuacaacagcagauucgagagcguggccuggagcgccagcgccugccacgacggcaugggcuggcugaccaucggcaucagcggccccgacgacggcgccguggccgugcugaaguacaacggcaucaucaccgagaccaucaagagcuggagaaagagaauccugagaacccaggagagcgagugcgugugcgugaacggcagcugcuucaccaucaugaccgacggccccaacaacggccccgccagcuacaagaucuucaagaucgagaagggcaagaucaccaagagcaucgagcuggacgcccccaacagccacuacgaggagugcagcugcuaccccgacgccggcaccgugaugugcgugugcagagacaacuggcacggcagcaacagacccugggugagcuucaaccagaaccuggacuaccagaucggcuacaucugcagcggcguguucggcgacaaccccagacccaaggacggcaagggcagcugcggccccgugaccguggacggcgccgacggcgugaagggcuucagcuacagauacggcaacggcguguggaucggcagaaccaagagcaacagcagcagaagaggcuucgagaugaucugggaccccaacggcuggaccgacaccgacagcaaguuccuggugaagcaggacgugguggccaucaccgacuggagcggcuacagcggcagcuucgugcagcaccccgagcugaccggccuggacugcaugagacccugcuucuggguggagcugaucagaggcagacccagagagaacaccaccaucuggaccagcggcagcagcaucagcuucugcggcgugaacggcgacaccgccaacuggagcuggcccgacggcgccgagcugcccuucaccaucgacaaguga

SEQ ID NO: 175759 - RNA, 1413 nt, Artificial Sequence
  derived and/or modified CDS sequence (opt4) from neuraminidase__InfluenzaA__ABN50943
augaaccccaaccagaagaucaucaccaucggcagcaucugcauggccaucggcaucaucagccugauccugcagaucggcaacaucgugagcaucuggaucagccacagcauccagaccggcagccagaacuacaccggcaucugcaaccagagaaucaucaccuacgagaacagcaccugggugaaccagaccuacgugaacaucaacaacaccaacgugguggccggccaggacaccaccagcguggcccuggccggcaacagcagccugugccccaucagcggcugggccaucuacagcaaggacaacagcaucagaaucggcagcaagggcgacguguucgugaucagagagcccuucaucagcugcagccaccuggagugcagaaccuucuuccugacccagggcgcccugcugaacgacaagcacagcaacggcaccgugaaggacagaagccccuacagagcccugaugagcugccccaucggcgaggcccccagccccuacaacagcagauucgagagcguggccuggagcgccagcgccugccacgacggcaugggcuggcugaccaucggcaucagcggccccgacgacggcgccguggccgugcugaaguacaacggcaucaucaccgagaccaucaagagcuggagaaagagaauccugagaacccaggagagcgagugcgugugcgugaacggcagcugcuucaccaucaugaccgacggccccaacaacggccccgccagcuacaagaucuucaagaucgagaagggcaagaucaccaagagcaucgagcuggacgcccccaacagccacuacgaggagugcagcugcuaccccgacgccggcaccgugaugugcgugugcagagacaacuggcacggcagcaacagacccugggugagcuucaaccagaaccuggacuaccagaucggcuacaucugcagcggcguguucggcgacaaccccagacccaaggacggcaagggcagcugcggccccgugaccguggacggcgccgacggcgugaagggcuucagcuacagauacggcaacggcguguggaucggcagaaccaagagcaacagcagcagaagaggcuucgagaugaucugggaccccaacggcuggaccgacaccgacagcaaguuccuggugaagcaggacgugguggccaugaccgacuggagcggcuacagcggcagcuucgugcagcaccccgagcugaccggccuggacugcaugagacccugcuucuggguggagcugaucagaggcagacccagagagaacaccaccaucuggaccagcggcagcagcaucagcuucugcggcgugaacggcgacaccgccaacuggagcuggcccgacggcgccgagcugcccuucaccaucgacaaguga

SEQ ID NO: 175760 - RNA, 1413 nt, Artificial Sequence; identical to SEQ ID NO: 175028
  derived and/or modified CDS sequence (opt4) from neuraminidase__InfluenzaA__ABN50954

SEQ ID NO: 175761 - RNA, 1413 nt, Artificial Sequence; identical to SEQ ID NO: 175028
  derived and/or modified CDS sequence (opt4) from neuraminidase__InfluenzaA__ABN50965

SEQ ID NO: 175762 - RNA, 1413 nt, Artificial Sequence; identical to SEQ ID NO: 175028
  derived and/or modified CDS sequence (opt4) from neuraminidase__InfluenzaA__ABN50976

SEQ ID NO: 175763 - RNA, 1410 nt, Artificial Sequence; identical to SEQ ID NO: 174403
  derived and/or modified CDS sequence (opt4) from neuraminidase__InfluenzaA__ABN50987

SEQ ID NO: 175764 - RNA, 1410 nt, Artificial Sequence; identical to SEQ ID NO: 174406
  derived and/or modified CDS sequence (opt4) from neuraminidase__InfluenzaA__ABN50998

SEQ ID NO: 175765 - RNA, 1410 nt, Artificial Sequence
  derived and/or modified CDS sequence (opt4) from neuraminidase__InfluenzaA__ABN51013
augaaccccaaccagaagaucaucaccaucggcagcgugagccugaccaucagcaccaucugcuucuucaugcagaucgccauccugaucaccaccgugacccugcacuucaagcaguacgaguucaacagcccccccaacaaccaggugaugcugugcgagcccaccaucaucgagagaaacaucaccgagaucguguaccugaccaacaccaccaucgagaaggagaucugccccaagcuggccgaguacagaaacuggagcaagccccagugcaacaucaccggcuucgcccccuucagcaaggacaacagcaucagacugagcgccggcggcgacaucugggugaccagagagcccuacgugagcugcgaccccgacaagugcuaccaguucgcccugggccagggcaccacccugaacaacgugcacagcaacgacaccgugcacgacagaacccccuacagaacccugcugaugaacgagcugggcgugcccuuccaccugggcaccaagcaggugugcaucgccuggagcagcagcagcugccacgacggcaaggccuggcugcacgugugcgugaccggcgacgacaagaacgccaccgccagcuucaucuacaacggcagacugguggacagcaucgugagcuggagcaaggagauccugagaacccaggagagcgagugcgugugcaucaacggcaccugcaccguggugaugaccgacggcagcgccagcggcaaggccgacaccaagauccuguucaucgaggagggcaagaucgugcacaccagcacccugagcggcagcgcccagcacguggaggagugcagcugcuaccccagauaccccggcgugagaugcgugugcagagacaacuggaagggcagcaacagacccaucguggacaucaacaucaaggacuacagcaucgugagcagcuacgugugcagcggccuggugggcgacacccccagaaagaacgacagcagcagcagcagccugugccuggaccccaacaacgaggagggcggccacggcgugaagggcugggccuucgacgacggcaacgacguguggaugggcagaaccaucagcgagaagcugagaagcggcuacgagaccuucaaggugaucgagggcuggagcaaccccaacagcaagcugcagaucaacagacaggugaucguggacagaggcaacagaagcggcuacagcggcaucuucagcguggagggcaagagcugcaucaacagaugcuucuacguggagcugaucagaggcagaaaggaggagaccgaggugcuguggaccagcaacagcaucgugguguucugcggcaccagcggcaccuacggcaccggcagcuggcccgacggcgccgacaucaaccugaugcccaucuga

SEQ ID NO: 175766 - RNA, 1410 nt, Artificial Sequence
  derived and/or modified CDS sequence (opt4) from neuraminidase__InfluenzaA__ABN51024
augaaccccaaccagaagaucaucaccaucggcagcgugagccugaccgugagcaccaucugcuucuucaugcagaucgccauccugaucaccaccgugacccugcacuucaagcaguacgaguucaacagcccccccaacaaccaggugaugcugugcgagcccaccaucaucgagagaaacaucaccgagaucguguaccugaccaacaccaccaucgagaaggagaucugccccaagcuggccgaguacagaaacuggagcaagccccagugcaacaucaccggcuucgcccccuucagcaaggacaacagcaucagacugagcgccggcggcgacaucugggugaccagagagcccuacgugagcugcgaccccgacaagugcuaccaguucgcccugggccagggcaccacccugaacaacgugcacagcaacgacaccgugcacgacagaacccccuacagaacccugcugaugaacgagcugggcgugcccuuccaccugggcaccaagcaggugugcaucgccuggagcagcagcagcugccacgacggcaaggccuggcugcacgugugcgugaccggcgacgacaagaacgccaccgccagcuucaucuacaacggcagacugguggacagcaucgugagcuggagcaaggagauccugagaacccaggagagcgagugcgugugcaucaacggcaccugcaccguggugaugaccgacggcagcgccagcggcaaggccgacaccaagauccuguucaucgaggagggcaagaucgugcacaccagcacccugagcggcagcgcccagcacguggaggagugcagcugcuaccccagauaccccggcgugagaugcgugugcagagacaacuggaagggcagcaacagacccaucguggacaucaacaucaaggacuacagcaucgugagcagcuacgugugcagcggccuggugggcgacacccccagaaagaacgacagcagcagcagcagccacugccuggaccccaacaacgaggagggcggccacggcgugaagggcugggccuucgacgacggcaacgacguguggaugggcagaaccaucagcgagaagcugagaagcggcuacgagaccuucaaggugaucgagggcuggagcaaccccaacagcaagcugcagaccaacagacaggugaucguggacagaggcaacagaagcggcuacagcggcaucuucagcguggagggcaagagcugcaucaacagaugcuucuacguggagcugaucagaggcagaaaggaggagaccgaggugcuguggaccagcaacagcaucgugguguucugcggcaccagcggcaccuacggcaccggcagcuggcccgacggcgccgacaucaaccugaugcccaucuga

SEQ ID NO: 175767 - RNA, 1410 nt, Artificial Sequence
  derived and/or modified CDS sequence (opt4) from neuraminidase__InfluenzaA__ABN51035
augaaccccaaccagaagaucaucaccaucggcagcgugagccugaccaucagcaccaucugcuucuucaugcagaucgccauccugaucaccaccgugacccugcacuucaagcaguacgaguucaacagcccccccaacaaccaggugaugcugugcgagcccaccaucaucgagagaaacaucaccgagaucguguaccugaccaacaccaccaucgagaaggagaucugccccaagcuggccgaguacagaaacuggagcaagccccagugcgacaucaccggcuucgcccccuucagcaaggacaacagcaucagacugagcgccggcggcgacaucugggugaccagagagcccuacgugagcugcgaccccgacaagugcuaccaguucgcccugggccagggcaccacccugaacaacgugcacagcaacgacaccgugcacgacagaacccccuacagaacccugcugaugaacgagcugggcgugcccuuccaccugggcaccaagcaggugugcaucgccuggagcagcagcagcugccacgacggcaaggccuggcugcacgugugcgugaccggcgacgacaagaacgccaccgccagcuucaucuacaacggcagacugguggacagcguggugagcuggagcaaggacauccugagaacccaggagagcgagugcgugugcaucaacggcaccugcaccguggugaugaccgacggcagcgccagcggcaaggccgacaccaagauccuguucaucgaggagggcaagaucgugcacaccagcacccugagcggcagcgcccagcacguggaggagugcagcugcuaccccagauaccccggcgugagaugcgugugcagagacaacuggaagggcagcaacagacccaucguggacaucaacaucaagaacuacagcaucgugagcagcuacgugugcagcggccuggugggcgacacccccagaaagaccgacagcagcagcagcagccacugccuggaccccaacaacgaggagggcggccacggcgugaagggcugggccuucgacgacggcaacgacguguggaugggcagaaccaucagcgagaagcugagacugggcuacgagaccuucaaggugaucgagggcuggagcaaccccaacagcaagcugcagaucaacagacaggugaucguggacagaggcaacagaagcggcuacagcggcaucuucagcguggagggcaagagcugcaucaacagaugcuucuacguggagcugaucagaggcagaaaggaggagaccgaggugcuguggaccagcaacagcaucgugguguucugcggcaccagcggcaccuacggcaccggcagcuggcccgacggcgccgacaucaaccugaugcccaucuga

SEQ ID NO: 175768 - RNA, 1410 nt, Artificial Sequence; identical to SEQ ID NO: 175767
  derived and/or modified CDS sequence (opt4) from neuraminidase__InfluenzaA__ABN51046

SEQ ID NO: 175769 - RNA, 1413 nt, Artificial Sequence
  derived and/or modified CDS sequence (opt4) from neuraminidase__InfluenzaA__ABN51069
augaaccccaaccagaagaucaucaccaucggcagcaucagcaucgccaucggcaucaucagccugauccugcagaucggcaacaucaucagcaucugggccagccacagcauccagaccggcagccagaaccacaccggcaucugcaaccagagaaucaucaccuacgagaacagcaccugggugaaccagaccuacgugaacaucaacaacaccaacgugguggccggcaaggacaagaccagcaugacccuggccggcaacagcagccugugccccaucagaggcugggccaucuacaccaaggacaacagcaucagaaucggcagcaagggcgacguguucgugaucagagagcccuucaucagcugcagccaccuggagugcagaaccuucuuccugacccagggcgcccugcugaacgacaagcacagcaacggcaccgugaaggacagaagccccuacagagcccugaugagcugcccccugggcgaggcccccagccccuacaacagcagauucgagagcguggccuggagcgccagcgccugccacgacggccugggcuggcugaccaucggcaucagcggccccgacaacggcgccguggccgugcugaaguacaacggcaucaucaccgagaccaucaagagcuggaagaagagaauccugagaacccaggagagcgagugcgugugcaugaacggcagcugcuucaccaucaugaccgacggccccagcaacggcgccgccagcuacagaaucuucaagaucgagaagggcagagugaccaagagcaucgagcuggacgcccccaacuaccacuacgaggagugcagcugcuaccccgacaccggcaccgugaugugcgugugcagagacaacuggcacggcagcaacagacccugggugagcuucaaccagaaccuggacuaccagaucggcuacaucugcagcggcguguucggcgacaaccccagacccaaggacggcgagggcagcugcaaccccgugaccguggacggcgccgacggcgugaagggcuucagcuacagauacggcaacggcguguggaucggcagaaccaagagcaacagacugagaaagggcuucgagauggugugggaccccaacggcuggaccgacaccgacagcgacuucagcaugaagcaggacaucguggccaugaccgacuggagcggcuacagcggcagcuucgugcagcaccccgagcugaccggccuggacugcaugagacccugcuucuggguggagcuggugagaggccugcccagagagaacaccaccaucuggaccagcggcagcagcaucagcuucugcggcgugaacagcgacaccgccaacuggagcuggcccgacggcgccgagcugcccuucaccaucgacaaguga

SEQ ID NO: 175770 - RNA, 1413 nt, Artificial Sequence
  derived and/or modified CDS sequence (opt4) from neuraminidase__InfluenzaA__ABN51080
augaaccccaaccagaagaucaucaccaucggcagcaucagcaucgccaucggcaucaucagccugaugcugcagaucggcaacaucaucagcaucugggccagccacagcauccagaccggcagccagaaccacaccggcgugugcaaccagagaaucaucaccuacgagaacagcaccugggugaaccacaccuacgugaacaucaacaacaccaacgugaucgccgagaaggacaagaccagcgugacccuggccggcaacagcagccugugcagcaucagcggcugggccaucuacaccaaggacaacagcaucagaaucggcagcaagggcgacguguucgugaucagagagcccuucaucagcugcagccaccuggagugcagaaccuucuuccugacccagggcgcccugcugaacgacaagcacagcaacggcaccgugaaggacagaagccccuacagagcccugaugagcugcccccugggcgaggcccccagccccuacaacagcaaguucgagagcguggccuggagcgccagcgccugccacgacggcaugggcuggcugaccaucggcaucagcggccccgacaacggcgccguggccgugcugaaguacaacggcaucaucaccgagaccaucaagagcuggaagaagcagauccugagaacccaggagagcgagugcgugugcgugaacggcagcugcuucaccaucaugaccgacggccccagcaacggcgccgccagcuacaagaucuucaagaucgagaagggcaaggugaccaagagcguggagcugaacgcccccaacuuccacuacgaggagugcagcugcuaccccgacaccggcaccgugaugugcgugugcagagacaacuggcacggcagcaacagacccugggugagcuucaaccagaaccuggacuaccagaucggcuacaucugcagcggcguguucggcgacaaccccagacccaaggacggcgagggcagcugcaaccccgugaccguggacggcgccaacggcgugaagggcuucagcuacaaguacggcaacggcguguggaucggcagaaccaagagcaacagacugagaaagggcuucgagaugaucugggaccccaacggcuggaccgacaccgacagcgacuucagcgugaagcaggacgugguggccaucaccgacuggagcggcuacagcggcagcuucgugcagcaccccgagcugaccggccuggacugcaucagacccugcuucuggguggagcuggugagaggccugcccaaggagaacaccaccaucuggaccagcggcagcagcaucagcuucugcggcgugaacagcgacaccgccaacuggagcuggcccgacggcgccgagcugcccuucaccaucgacaaguga

SEQ ID NO: 175771 - RNA, 1413 nt, Artificial Sequence; identical to SEQ ID NO: 174446
  derived and/or modified CDS sequence (opt4) from neuraminidase__InfluenzaA__ABN51091

SEQ ID NO: 175772 - RNA, 1410 nt, Artificial Sequence; identical to SEQ ID NO: 174155
  derived and/or modified CDS sequence (opt4) from neuraminidase__InfluenzaA__ABN51102

SEQ ID NO: 175773 - RNA, 1410 nt, Artificial Sequence; identical to SEQ ID NO: 174163
  derived and/or modified CDS sequence (opt4) from neuraminidase__InfluenzaA__ABN51113

SEQ ID NO: 175774 - RNA, 1410 nt, Artificial Sequence
  derived and/or modified CDS sequence (opt4) from neuraminidase__InfluenzaA__ABN51124
augaaccccaaccagaagaucaucaccaucggcagcgugagccugaccaucgccaccgugugcuuccugaugcagaucgccauccuggugaccaccgugacccugcacuucaagcaguacgagugcgacagccccgccagcaaccaggugaugcccugcgagcccaucaucaucgagagaaacaucaccgagaucguguaccugaacaacaccaccaucgagaaggagaucugccccaaggugguggaguacagaaacuggagcaagccccagugccagaucaccggcuucgcccccuucagcaaggacaacagcaucagacugagcgccggcggcgacaucugggugaccagagagcccuacgugagcugcgaccccggcaagugcuaccaguucgcccugggccagggcaccacccuggacaacaagcacagcaacgacaccauccacgacagagugccccacagaacccugcugaugaacgagcugggcgugcccuuccaccugggcaccagacaggugugcaucgccuggagcagcagcagcugccacgacggcaaggccuggcugcacgugugcaucaccggcgacgacaagaacgccaccgccagcuucaucuacgacggcagacugguggacagcaucggcagcuggagccagaacauccugagaacccaggagagcgagugcgugugcaucaacggcaccugcaccguggugaugaccgacggcagcgccagcggcagagccgacaccagaauccuguucaucgaggagggcaagaucgugcacaucagcccccugagcggcagcgcccagcacguggaggagugcagcugcuaccccagauaccccggcgugagaugcaucugcagagacaacuggaagggcagcaacagacccgugguggacaucaacauggaggacuacagcaucgacagcagcuacgugugcagcggccuggugggcgacacccccagaaacgacgacagaagcagcaacagcaacugcagaaaccccaacaacgagagaggcaaccagggcgugaagggcugggccuucgacaacggcgacgacguguggaugggcagaaccaucagcaaggaccugagaagcggcuacgagaccuucaaggugaucggcggcuggagcacccccaacagcaagagccagaucaacagacaggugaucguggacagcgacaacagaagcggcuacagcggcaucuucagcguggagggcaagagcugcaucaacagaugcuucuacguggagcugaucagaggcagaaagcaggagaccagagugugguggaccagcaacagcaucgugguguucugcggcaccagcggcaccuacggcaccggcagcuggcccgacggcgccaacaucaacuucaugcccaucuga

SEQ ID NO: 175775 - RNA, 1410 nt, Artificial Sequence; identical to SEQ ID NO: 174163
  derived and/or modified CDS sequence (opt4) from neuraminidase__InfluenzaA__ABN51135

SEQ ID NO: 175776 - RNA, 1413 nt, Artificial Sequence; identical to SEQ ID NO: 174456
  derived and/or modified CDS sequence (opt4) from neuraminidase__InfluenzaA__ABN51146

SEQ ID NO: 175777 - RNA, 1410 nt, Artificial Sequence
  derived and/or modified CDS sequence (opt4) from neuraminidase__InfluenzaA__ABN51157
augaaccccaaccagaagaucaucaccaucggcagcgugagccugaccaucgccaccaucugcuuccugaugcagaucgccauccuggugaccaccgugacccugcacuucaagcaguacgagugcaacagcccccccaacaaccaggugaugcugugcgagcccaccaucaucgagagaaacaucaccgagaucguguaccugaccaacaccaccaucgagaaggagaucugccccaagcuggccgaguacagaaacuggagcaagccccagugcaacaucaccggcuucgcccccuucagcaaggacaacagcaucagacugagcgccggcggcgacaucugggugaccagagagcccuacgugagcugcgaccccgacaagugcuaccaguucgcccugggccagggcaccacccugaacaacggccacagcaacgacaccgugcacgacagaacccccuacagaacccugcugaugaacgagcugggcgugcccuuccaccugggcaccagacaggugugcaucgccuggagcagcagcagcugccacgacggcaaggccuggcugcacgugugcgugaccggcgacgacgagaacgccaccgccagcuucaucuacaacggcagacugguggacagcaucggcagcuggagcaagaagauccugagaacccaggagagcgagugcgugugcaucaacggcaccugcaccguggugaugaccgacggcagcgccagcggcaaggccgagaccaagauccuguucaucgaggagggcaagaucgugcacaucagcacccugagcggcagcgcccagcacguggaggagugcagcugcuaccccagauaccccggcgugagaugcgugugcagagacaacuggaagggcagcaacagacccaucguggacaucaacgugaaggacuacagcaucgugagcagcuacgugugcagcggccuggugggcgacacccccagaaagaacgacagcuucagcagcagccacugccuggaccccaacaacgaggagggcggccacggcgugaagggcugggccuucgacgacggcaacgacguguggaugggcagaaccaucagcgagaagcugagaagcggcuacgagaccuucaaggugaucgagggcuggagcaagcccaacagcaagcugcagaccaacagacaggugaucguggagagaggcaacagaagcggcuacagcggcaucuucagcguggagggcaagagcugcaucaacagaugcuucuacguggagcugaucagaggcagaaaggaggagaccgaggugugguggaccagcaacagcaucgugguguucugcggcaccagcggcaccuacggcaccggcagcuggcccgacggcgccgacaucaaccugaugcccaucuga

SEQ ID NO: 175778 - RNA, 1410 nt, Artificial Sequence; identical to SEQ ID NO: 175766
  derived and/or modified CDS sequence (opt4) from neuraminidase__InfluenzaA__ABN59393

SEQ ID NO: 175779 - RNA, 1365 nt, Artificial Sequence
  derived and/or modified CDS sequence (opt4) from neuraminidase__InfluenzaA__ABN59415
augaaccccaaccagaagaucaucaccaucggcagcaucugccugguggugggccugaucagccugauccugcagaucggcaacaucaucagcaucuggaucagccacagcauccagaccggcagccagaaccacaccggcaucugcaaccagaacaucaucaccuacaagaacagcaccugggugaaggacaccaccagcgugauccugaccggcaacagcagccugugccccaucagaggcugggccaucuacagcaaggacaacagcaucagaaucggcagcaagggcgacguguucgugaucagagagcccuucaucagcugcagccaccuggagugcagaaccuucuuccugacccagggcgcccugcugaacgacaagcacagcagcggcaccgugaaggacagaagccccuacagagcccugaugagcugccccgugggcgaggcccccagccccuacaacagcagauucgagagcguggccuggagcgccagcgccugccacgacggcaugggcuggcugaccaucggcaucagcggccccgacaacggcgccguggccgugcugaaguacaacggcaucaucaccgagaccaucaagagcuggagaaagaagauccugagaacccaggagagcgagugcgccugcgugaacggcagcugcuucaccaucaugaccgacggccccagcgacggccuggccagcuacaagaucuucaagaucgagaagggcaaggugaccaagagcaucgagcugaacgcccccaacagccacuacgaggagugcagcugcuaccccgacaccggcaaggugaugugcgugugcagagacaacuggcacggcagcaacagacccugggugagcuucgaccagaaccuggacuaccagaucggcuacaucugcagcggcguguucggcgacaaccccagacccgaggacggcaccggcagcugcggccccguguacguggacggcgccaacggcgugaagggcuucagcuacagauacggcaacggcguguggaucggcagaaccaagagccacagcagcagacacggcuucgagaugaucugggaccccaacggcuggaccgagaccgacagcaaguucagcgugagacaggacgugguggccaugaccgacuggagcggcuacagcggcagcuucgugcagcaccccgagcugaccggccuggacugcaugagacccugcuucuggguggagcugaucagaggcagacccaaggagaagaccaucuggaccagcgccagcagcaucagcuucugcggcgugaacagcgacaccguggacuggagcuggcccgacggcgccgagcugcccuucagcaucgacaaguga

SEQ ID NO: 175780 - RNA, 1413 nt, Artificial Sequence; identical to SEQ ID NO: 175011
  derived and/or modified CDS sequence (opt4) from neuraminidase__InfluenzaA__ABN59426

SEQ ID NO: 175781 - RNA, 1410 nt, Artificial Sequence; identical to SEQ ID NO: 174313
  derived and/or modified CDS sequence (opt4) from neuraminidase__InfluenzaA__ABO32659

SEQ ID NO: 175782 - RNA, 1410 nt, Artificial Sequence
  derived and/or modified CDS sequence (opt4) from neuraminidase__InfluenzaA__ABO32670
augaaccccaaccagaagaucaucaccaucggcagcgugagccugaccaucagcaccaucugcuucuucaugcagaucgccauccuggugaccaccgugacccugcacuucaagcaguacgagugcaacagcccccccaacaaccaggugaugcugugcgagcccaccaucaucgagagaaacaucaccgagaucguguaccugaccaacaccaccaucgagaaggagaucugccccaagcuggccgaguacagaaacuggagcaagccccagugcaacaucaccggcuucgcccccuucagcaaggacaacagcaucagacugagcgccggcggcgacaucugggugaccagagagcccuacgugagcugcgaccccgacaagugcuaccaguucgcccugggccagggcaccacccugaacaacggccacagcaacgacaccgugcacgacagaacccccuacagaacccugcugaugaacgagcugggcgugcccuuccacaugggcaccaagcaggugugcaucgccuggagcagcagcagcugccacgacggcaaggccuggcugcacgugugcgugaccggcgacgacgagaacgccaccgccagcuucaucuacaacggcagacugguggacagcaucggcagcuggagcaagaagauccugagaacccaggagagcgagugcgugugcaucaacggcaccugcaccguggugaugaccgacggcagcgccagcggcaaggccgacaccaagauccuguucaucgaggagggcaagaucgugcacaccagcacccugagcggcagcgcccagcacguggaggagugcagcugcuaccccagauaccccggcgugagaugcgugugcagagacaacuggaagggcagcaacagacccaucguggacaucaacaucaaggacuacagcaucgugagcagcuacgugugcagcggccuggugggcgacacccccagaaagaacgacagcagcagcagcagccacugccuggaccccaacaacgaggagggcggccacggcgugaagggcugggccuucgacgacggcaacgacguguggaugggcagaaccaucagcgagaagcugagaagcggcuacgagaccuucaaggugaucgagggcuggagcaagcccaacagcaagcugcagaucaacagacaggugaucguggacagaggcaacagaagcggcuacagcggcaucuucagcguggagggcaagagcugcaucaacagaugcuucuacguggagcugaucagaggcagaaagcaggagaccgaggugcuguggaccagcaacagcaucgugguguucugcggcaccagcggcaccuacggcaccggcagcuggcccgacggcgccgacaucaaccugaugcccaucuga

SEQ ID NO: 175783 - RNA, 1413 nt, Artificial Sequence; identical to SEQ ID NO: 175634
  derived and/or modified CDS sequence (opt4) from neuraminidase__InfluenzaA__ABO32681

SEQ ID NO: 175784 - RNA, 1410 nt, Artificial Sequence
  derived and/or modified CDS sequence (opt4) from neuraminidase__InfluenzaA__ABO32695
augaaccccaaccagaagaucaucaccaucggcagcgugagccugaccaucagcaccaucugcuucuucaugcagaucgccauccugaucaccaccgugacccugcacuucaagcaguacgaguucaacagcccccccaacaaccaggugaugcugugcgagcccaccaucaucgagagaaacaucaccgagaucguguaccugaccaacaccaccaucgagaaggagaucugccccaagcuggccgaguacagaaacuggagcaagccccagugcaacaucaccggcuucgcccccuucagcaaggacaacagcaucagacugagcgccggcggcgacaucugggugaccagagagcccuacgugagcugcgaccccgacaagugcuaccaguucgcccugggccagggcaccacccugaacaacgugcacagcaacgacaccgugcacgacagaacccccuacagaacccugcugaugaacgagcugggcgugcccuuccaccugggcaccaagcaggugugcaucgccuggagcagcagcagcugccacgacggcaaggccuggcugcacgugugcgugaccggcgacgacaagaacgccaccgccagcuucaucuacaacggcagacugguggacagcaucgugagcuggagcaaggagauccugagaacccaggagagcgagugcgugugcaucaacggcaccugcaccguggugaugaccgacggcagcgccagcggcaaggccgacaccaagauccuguucaucgaggagggcaagaucgugcacaccagcacccugagcggcagcgcccagcacguggaggagugcagcugcuaccccagauaccccggcgugagaugcgugugcagagacaacuggaagggcagcaacagacccaucguggacaucaacaucaaggacuacagcaucgugagcagcuacgugugcagcggccuggugggcgacacccccagaaagaacgacagcagcagcagcagccacugcagcgaccccaacaacgaggagggcggccacggcgugaagggcugggccuucgacgacggcaacgacguguggaugggcagaaccaucagcgagaagcugagaagcggcuacgagaccuucaaggugaucgagggcuggagcaaccccaacagcaagcugcagaucaacagacaggugaucguggacagaggcaacagaagcggcuacagcggcaucuucagcguggagggcaagagcugcaucaacagaugcuucuacguggagcugaucagaggcagaaaggaggagaccgaggugcuguggaccagcaacagcaucgugguguucugcggcaccagcggcaccuacggcaccggcagcuggcccgacggcgccgacaucaaccugaugcccaucuga

SEQ ID NO: 175785 - RNA, 1410 nt, Artificial Sequence; identical to SEQ ID NO: 174790
  derived and/or modified CDS sequence (opt4) from neuraminidase__InfluenzaA__ABO32754

SEQ ID NO: 175786 - RNA, 1410 nt, Artificial Sequence; identical to SEQ ID NO: 174790
  derived and/or modified CDS sequence (opt4) from neuraminidase__InfluenzaA__ABO32765

SEQ ID NO: 175787 - RNA, 1410 nt, Artificial Sequence; identical to SEQ ID NO: 175662
  derived and/or modified CDS sequence (opt4) from neuraminidase__InfluenzaA__ABO32778

SEQ ID NO: 175788 - RNA, 1410 nt, Artificial Sequence
  derived and/or modified CDS sequence (opt4) from neuraminidase__InfluenzaA__ABO32793
augaaccccaaccagaagaucaucaccaucggcagcgugagccugaccaucagcaccaucugcuucuucaugcagaucgugauccugaucaccaccgugacccugcacuucaagcaguacgaguucaacagcccccccaacaaccaggugaugcugugcgagcccaccaucaucgagagaaacaucaccgagaucguguaccugaccaacaccaccaucgagaaggagaucugccccaagcuggccgaguacagaaacuggagcaagccccagugcgacaucaccggcuucgcccccuucagcaaggacaacagcaucagacugagcgccggcggcgacaucugggugaccagagagcccuacgugagcugcgaccccgacaagugcuaccaguucgcccugggccagggcaccacccugaacaacgugcacagcaacgacaccgugcacgacagaacccccuacagaacccugcugaugaacgagcugggcgugcccuuccaccugggcaccaagcaggugugcaucgccuggagcagcagcagcugccacgacggcaaggccuggcugcacgugugcgugaccggcgacgacaagaacgccaccgccagcuucaucuacaacggcagacugguggacagcaucgugagcuggagcaaggagauccugagaacccaggagagcgagugcgugugcaucaacggcaccugcaccguggugaugaccgacggcagcgccagcggcaagaccgacaccaagauccuguucaucgaggagggcaagaucgugcacaccagcacccugagcggcagcgcccagcacguggaggagugcagcugcuaccccagauaccccggcgugagaugcgugugcagagacaacuggaagggcagcaacagacccaucguggacaucaacaucaaggacuacagcaucgugagcagcuacgugugcagcggccuggugggcgacacccccagaaagaacgacagcagcagcagcagccacugccuggaccccaacaacgaggagggcggccacggcgugaagggcugggccuucgacgacggcaacgacguguggaugggcagaaccaucagcgagaagcugagaagcggcuacgagaccuucaaggugaucgagggcuggagcaaccccaacagcaagcugcagaucaacagacaggugaucguggacagaggcaacagaagcggcuacagcggcaucuucagcguggagggcaagagcugcaucaacagaugcuucuacguggagcugaucagaggcagaaaggaggagaccgaggugcuguggaccagcaacagcaucgugguguucugcggcaccagcggcaccuacggcaccggcagcuggcccgacggcgccgacaucaaccugaugcccaucuga

SEQ ID NO: 175789 - RNA, 1410 nt, Artificial Sequence; identical to SEQ ID NO: 174387
  derived and/or modified CDS sequence (opt4) from neuraminidase__InfluenzaA__ABO32806

SEQ ID NO: 175790 - RNA, 1410 nt, Artificial Sequence; identical to SEQ ID NO: 174774
  derived and/or modified CDS sequence (opt4) from neuraminidase__InfluenzaA__ABO32819

SEQ ID NO: 175791 - RNA, 1410 nt, Artificial Sequence; identical to SEQ ID NO: 174406
  derived and/or modified CDS sequence (opt4) from neuraminidase__InfluenzaA__ABO32830

SEQ ID NO: 175792 - RNA, 1410 nt, Artificial Sequence; identical to SEQ ID NO: 174772
  derived and/or modified CDS sequence (opt4) from neuraminidase__InfluenzaA__ABO32841

SEQ ID NO: 175793 - RNA, 1410 nt, Artificial Sequence; identical to SEQ ID NO: 174772
  derived and/or modified CDS sequence (opt4) from neuraminidase__InfluenzaA__ABO32852

SEQ ID NO: 175794 - RNA, 1410 nt, Artificial Sequence; identical to SEQ ID NO: 174772
  derived and/or modified CDS sequence (opt4) from neuraminidase__InfluenzaA__ABO32863

SEQ ID NO: 175795 - RNA, 1410 nt, Artificial Sequence; identical to SEQ ID NO: 175766
  derived and/or modified CDS sequence (opt4) from neuraminidase__InfluenzaA__ABO32874

SEQ ID NO: 175796 - RNA, 1410 nt, Artificial Sequence; identical to SEQ ID NO: 175766
  derived and/or modified CDS sequence (opt4) from neuraminidase__InfluenzaA__ABO32885

SEQ ID NO: 175797 - RNA, 1410 nt, Artificial Sequence; identical to SEQ ID NO: 175767
  derived and/or modified CDS sequence (opt4) from neuraminidase__InfluenzaA__ABO32896

SEQ ID NO: 175798 - RNA, 1410 nt, Artificial Sequence; identical to SEQ ID NO: 175767
  derived and/or modified CDS sequence (opt4) from neuraminidase__InfluenzaA__ABO32907

SEQ ID NO: 175799 - RNA, 1410 nt, Artificial Sequence
  derived and/or modified CDS sequence (opt4) from neuraminidase__InfluenzaA__ABO32918
augaaccccaaccagaagaucaucaccaucggcagcgugagccugaccaucagcaccaucugcuucuucaugcagaucgccauccugaucaccaccgugacccugcacuucaagcaguacgaguucaacagcccccccaacaaccaggugaugcugugcgagcccaccaucaucgagagaaacaucaccgagaucguguaccugaccaacaccaccaucgagaaggagaccugccccaagcuggccgaguacagaaacuggagcaagccccagugcaacaucaccggcuucgcccccuucagcaaggacaacagcaucagacugagcgccggcggcgacaucugggugaccagagagcccuacgugagcugcgaccccgacaagugcuaccaguucgcccugggccagggcaccacccugaacaacgugcacagcaacgacaccgugcacgacagaacccccuacagaacccugcugaugaacgagcugggcgugcccuuccaccugggcaccaagcaggugugcaucgccuggagcagcagcagcugccacgacggcaaggccuggcugcacgugugcgugaccggcgacgacaagaacgccaccgccagcuucaucuacaacggcagacugguggacagcaucgugagcuggagcaaggagauccugagaacccaggagagcgagugcgugugcaucaacggcaccugcaccguggugaugaccgacggcagcgccagcggcaaggccgacaccaagauccuguucaucgaggagggcaagaucgugcacaccagcacccugagcggcagcgcccagcacguggaggagugcagcugcuaccccagauaccccggcgugagaugcgugugcagagacaacuggaagggcagcaacagacccaucguggacaucaacaucaaggacuacagcaucgugagcagcuacgugugcagcggccuggugggcgacacccccagaaagaacgacagcagcagcagcagccacugccuggaccccaacaacgaggagggcggccacggcgugaagggcugggccuucgacgacggcaacgacguguggaugggcagaaccaucagcgagaagcugagaagcggcuacgagaccuucaaggugaucgagggcuggagcaacagcaacagcaagcugcagaccaacagacaggugaucguggacagaggcaacagaagcggcuacagcggcaucuucagcguggagggcaagagcugcaucaacagaugcuucuacguggagcugaucagaggcagaaaggaggagaccgaggugcuguggaccagcaacagcaucgugguguucugcggcaccagcggcaccuacggcaccggcagcuggcccgacggcgccgacaucaaccugaugcccaucuga

SEQ ID NO: 175800 - RNA, 1410 nt, Artificial Sequence; identical to SEQ ID NO: 175799
  derived and/or modified CDS sequence (opt4) from neuraminidase__InfluenzaA__ABO32929

SEQ ID NO: 175801 - RNA, 1410 nt, Artificial Sequence; identical to SEQ ID NO: 175799
  derived and/or modified CDS sequence (opt4) from neuraminidase__InfluenzaA__ABO32940

SEQ ID NO: 175802 - RNA, 1413 nt, Artificial Sequence
  derived and/or modified CDS sequence (opt4) from neuraminidase__InfluenzaA__ABO32951
augaaccccaaccagaagaucaucaccaucggcagcaucagcaucgccaucggcaucaucagccugaugcugcagaucggcaacaucaucagcaucugggccagccacagcauccagaccggcagccagaaccacaccggcgugugcaaccagagaaucaucaccuacgagaacagcaccugggugaaccacaccuacgugaacaucaacaacaccaacgugaucgccggcaaggacaagaccagcgugacccuggccggcaacagcagccugugcagcaucagcggcugggccaucuacaccaaggacaacagcaucagaaucggcagcaagggcgacguguucgugaucagagagcccuucaucagcugcagccaccuggagugcagaaccuucuuccugacccagggcgcccugcugaacgacaagcacagcaacggcaccgugaaggacagaagccccuacagagcccugaugagcugcccccugggcgaggcccccagccccuacaacagcaaguucgagagcguggccuggagcgccagcgccugccacgacggcaugggcuggcugaccaucggcaucagcggccccgacaacggcgccguggccgugcugaaguacaacggcaucaucaccgagaccaucaagagcuggaagaagcagauccugagaacccaggagagcgagugcgugugcgugaacggcagcugcuucaccaucaugaccgacggccccagcaacggcgccgccagcuacaagaucuucaagaucgagaagggcaaggugaccaagagcaucgagcugaacgcccccaacuuccacuacgaggagugcagcugcuaccccgacaccggcaccgugaugugcgugugcagagacaacuggcacggcagcaacagacccugggugagcuucaaccagaaccuggacuaccagaucggcuacaucugcagcggcguguucggcgacaaccccagacccaaggacggcgagggcagcugcaaccccgugaccguggacggcgccaacggcgugaagggcuucagcuacaaguacggcaacggcguguggaucggcagaaccaagagcaacagacugagaaagggcuucgagaugaucugggaccccaacggcuggaccgacaccgacagcgacuucagcgugaagcaggacgugguggccaucaccgacuggagcggcuacagcggcagcuucgugcagcaccccgagcugaccggccuggacugcaucagacccugcuucuggguggagcuggugagaggccugcccagagagaacaccaccaucuggaccagcggcagcagcaucagcuucugcggcgugaacagcgacaccgccaacuggagcuggcccgacggcgccgagcugcccuucaccaucgacaaguga

SEQ ID NO: 175803 - RNA, 1413 nt, Artificial Sequence
  derived and/or modified CDS sequence (opt4) from neuraminidase__InfluenzaA__ABO32962
augaaccccaaccagaagaucaucaccaucggcagcaucagcaucgccaucggcaucaucagccugaugcugcagaucggcaacaucaucagcaucugggccagccacagcauccagaccggcagcaagaaccacaccggcgugugcaaccagagaaucaucaccuacgagaacagcaccugggugaaccacaccuacgugaacaucaacaacaccaacgugguggccggcaaggacaagaccagcgugacccuggccggcaacagcagccugugcagcaucagcggcugggccaucuacaccaaggacaacagcaucagaaucggcagcaagggcgacguguucgugaucagagagcccuucaucagcugcagccaccuggagugcagaaccuucuuccugacccagggcgcccugcugaacgacaagcacagcaacggcaccgugaaggacagaagccccuacagagcccugaugagcugcccccugggcgaggcccccagccccuacaacagcaaguucgagagcguggccuggagcgccaacgccugccacgacggcaugggcuggcugaccaucggcaucagcggccccgacaacggcgccguggccgugcugaaguacaacggcaucaucaccgagaccaucaagagcuggaagaagcagauccugagaacccaggagagcgagugcgugugcgugaacggcagcugcuucaccaucaugaccgacggccccagcaacggcgccgccagcuacaagaucuucaagaucaagaagggcaaggugaccaagagcaucgagcugaacgcccccaacuuccacuacgaggagugcagcugcuaccccgacaccggcaccgugaugugcgugugcagagacaacuggcacggcagcaacagacccugggugagcuucaaccagaaccuggacuaccagaucggcuacaucugcagcggcguguucggcgacaaccccagacccaaggacggcgagggcagcugcaaccccgugaccguggacggcgccaacggcgugaagggcuucagcuacaaguacggcaacggcguguggaucggcagaaccaagagcaacagacugagaaagggcuucgagaugaucugggaccccaacggcuggaccgacaccgacagcgacuucagcgugagacaggacgugguggccaucaccgacuggagcggcuacagcggcagcuucgugcagcaccccgagcugaccggccuggacugcaucagacccugcuucuggguggagcuggugagaggccugcccagagagaacaccaccaucuggaccagcggcagcagcaucagcuucugcggcgugaacagcgacaccgccaacuggagcuggcccgacggcgccgagcugcccuucaccaucgacaaguga

SEQ ID NO: 175804 - RNA, 1413 nt, Artificial Sequence; identical to SEQ ID NO: 174446
  derived and/or modified CDS sequence (opt4) from neuraminidase__InfluenzaA__ABO32973

SEQ ID NO: 175805 - RNA, 1413 nt, Artificial Sequence; identical to SEQ ID NO: 175011
  derived and/or modified CDS sequence (opt4) from neuraminidase__InfluenzaA__ABO32984

SEQ ID NO: 175806 - RNA, 1413 nt, Artificial Sequence; identical to SEQ ID NO: 175011
  derived and/or modified CDS sequence (opt4) from neuraminidase__InfluenzaA__ABO32995

SEQ ID NO: 175807 - RNA, 1413 nt, Artificial Sequence
  derived and/or modified CDS sequence (opt4) from neuraminidase__InfluenzaA__ABO33009
augaaccccaaccagaagaucaucaccaucggcagcaucugcauggccaucggcaugaucagccugauccugcagaucggcaacaucaucagcaucugggugagccacagcauccagaccggcagccagaaccacaccggcaucugcaaccagagaaucaucaccuacgagaacagcaccugggugaaccagaccuacgugaacaucagcaacaccaacgugguggccggcaaggacaccaccagcaugacccuggccggcaacagcagccugugccccaucagaggcugggccaucuacagcaaggacaacagcaucagaaucggcagcaagggcgacguguucgugaucagagagcccuucaucagcugcagccaccuggagugcagaaccuucuuccugacccagggcgcccugcugaacgacaagcacagcaacggcaccgugaaggacagaagccccuacagagcccugaugagcugccccaucggcgaggcccccagccccuacaacagcagauucgagagcguggccuggagcgccagcgccugccacgacggcaugggcuggcugaccaucggcaucagcggccccgacgacggcgccguggccgugcugaaguacaacggcaucaucaccgagaccaucaagagcuggagaaagcagauccugagaacccaggagagcgagugcgugugcgugaacggcagcugcuucaccaucaugaccgacggccccagcgacggccccgccagcuacagaaucuucaagaucgagaagggcaagaucaccaagagcaucgagcuggacgcccccaacagccacuacgaggagugcagcugcuaccccgacaccggcaccgugaugugcgugugcagagacaacuggcacggcagcaacagacccugggugagcuucaaccagaaccuggacuaccagaucggcuacaucugcagcggcguguucggcgacaaccccagacccaaggacggcaagggcagcugcgaccccgugaacguggacggcgccgacggcgugaagggcuucagcuacagauacggcaacggcguguggaucggcagaaccaagagcaacagcagcagaaagggcuucgagaugaucugggaccccaacggcuggaccgacaccgacagcaacuuccuggugaagcaggacgugguggccaugaccgacuggagcggcuacagcggcagcuucgugcagcaccccgagcugaccggccuggacugcaugagacccugcuucuggguggagcugaucagaggcagacccagagagaagaccaccaucuggaccagcggcagcagcaucagcuucugcggcgugaacagcgacaccgugaacuggagcuggcccgacggcgccgagcugcccuucaccaucgacaaguga

SEQ ID NO: 175808 - RNA, 1410 nt, Artificial Sequence; identical to SEQ ID NO: 175578
  derived and/or modified CDS sequence (opt4) from neuraminidase__InfluenzaA__ABO33039

SEQ ID NO: 175809 - RNA, 1410 nt, Artificial Sequence
  derived and/or modified CDS sequence (opt4) from neuraminidase__InfluenzaA__ABO33050
augaaccccaaccagaagaucaucaccaucggcagcgugagccugaccaucgccaccaucugcuuccugaugcagaucgccauccuggugaccaccgugacccugcacuucaagcaguacgagugcaacagcccccccaacaaccaggugaugcugugcgagcccaccaucaucgagagaaacaucaccgagaucguguaccugaccaacaccaccaucgagaaggagaucugccccaagcuggccgaguacagaaacuggagcaagccccagugcaacaucaccggcuucgcccccuucagcaaggacaacagcaucagacugagcgccggcggcgacaucugggugaccagagagcccuacgugagcugcgaccccgacaagugcuaccaguucgcccugggccagggcaccacccugaacaacggccacagcaacgacaccgugcacgacagaacccccuacagaacccugcugaugaacgagcugggcgugcccuuccaccugggcaccaagcaggugugcaucgccuggagcagcagcagcugccacgacggcaaggccuggcugcacgugugcgugaccggcgacgacgagaacgccaccgccagcuucaucuacaacggcagacugguggacagcaucggcagcuggagcaagaagauccugagaacccaggagagcgagugcgugugcaucaacggcaccugcaccguggugaugaccgacggcagcgccagcggcaaggccgacaccaagauccuguucaucgaggagggcaagaucgugcacaccagcccccugagcggcagcgcccagcacguggaggagugcagcugcuaccccagauaccccggcgugagaugcgugugcagagacaacuggaagggcagcaacagacccaucguggacaucaacgugaaggacuacagcaucgugagcagcuacgugugcagcggccuggugggcgacacccccagaaagaacgacagcagcagcagcagccacugccuggaccccaacaacgaggagggcggccacggcgugaagggcugggccuucgacgacggcaacgacguguggaugggcagaaccaucagcgagaagcugagaagcggcuacgagaccuucaaggugaucgagggcuggagcaagcccaacagcaagcugcagaucaacagacaggugaucguggacagaggcaacagaagcggcuacagcggcaucuucagcguggagggcaagagcugcaucaacagaugcuucuacguggagcugaucagaggcagaaagcaggagaccgaggugcuguggaccagcaacagcaucgugguguucugcggcaccagcggcaccuacggcaccggcagcuggcccgacggcgccgacaucaaccugaugcccaucuga

SEQ ID NO: 175810 - RNA, 1410 nt, Artificial Sequence; identical to SEQ ID NO: 174790
  derived and/or modified CDS sequence (opt4) from neuraminidase__InfluenzaA__ABO33061

SEQ ID NO: 175811 - RNA, 1410 nt, Artificial Sequence
  derived and/or modified CDS sequence (opt4) from neuraminidase__InfluenzaA__ABO33072
augaaccccaaccagaagaucaucaccaucggcagcgugagccugaccaucgccaccaucugcuuccugaugcagaucgccauccuggugaccaccgugacccugcacuucaagcaguacgagugcggcagccccgccaacaaccaggugaugcccugcgagcccaucaucaucgagagaaacaucaccgagaucguguaccugaccaacaccaccaucgagaaggagaucugccccaagcugguggaguacagaaacuggagcaagccccagugcaagaucaccggcuucgcccccuucagcaaggacaacagcaucagacugagcgccggcggcgacaucugggugaccagagagcccuacgugagcugcgaccccggcaagugcuaccaguucgcccugggccagggcaccacccuggacaacaagcacagcaacgacaccauccacgacagaaccccccacagaacccugcugaugaacgagcugggcgugcccuuccaccugggcaccagacaggugugcaucgccuggagcagcagcagcugccacgacggcaaggccuggcugcacgugugcgugaccggcuacgacaagaacgccaccgccagcuucaucuacgacggcagacugguggacagcaucggcagcuggagcaagaacauccugagaacccaggagagcgagugcgugugcaucaacggcaccugcaccguggugaugaccgacggcagcgccagcgagagagccgacaccaagauccuguucaucgaggagggcaagaucgugcacaucagcccccugagcggcagcgcccagcacguggaggagugcagcugcuaccccagauaccccggcgugagaugcgugugcagagacaacuggaagggcagcaacagacccgugguggacaucaacgugaaggacuacagcaucgugagcagcuacgugugcagcggccuggugggcgacacccccagaaagaacgacagaagcagcagcagcuacugcagaaaccccaacaacgagaagggcaaccacggcgugaagggcugggccuucgacgacggcaacgacguguggaugggcagaaccaucagcgaggagagcagaagcggcuacgagaccuucaaggugaucggcggcuggagcacccccaacagcaagcugcagaucaacagacaggugaucguggacagcgacaacagaagcggcuacagcggcaucuucagcguggagggcaagagcugcaucaacagaugcuucuacguggagcugaucagaggcagagagcaggagaccagagugugguggaccagcaacagcaucgugguguucugcggcaccagcggcaccuacggcaccggcagcuggcccgacggcgccgacaucaaccugaugcccaucuga

SEQ ID NO: 175812 - RNA, 1413 nt, Artificial Sequence; identical to SEQ ID NO: 175119
  derived and/or modified CDS sequence (opt4) from neuraminidase__InfluenzaA__ABO37991

SEQ ID NO: 175813 - RNA, 1413 nt, Artificial Sequence
  derived and/or modified CDS sequence (opt4) from neuraminidase__InfluenzaA__ABO38013
augaaccccaaccagaagaucaucaccaucggcagcaucagcaucgccaucggcaucaucagccugauccugcagaucggcaacaucaucagcaucugggccagccacagcauccagaccggcagccagaaccacaccggcaucugcaaccagagaaucaucaccuacgagaacagcaccugggugaaccagaccuacgugaacaucaacaacaccaacgugguggccggcaaggacaagaccagcaugacccuggccggcaacagcagccugugccccaucagaggcugggccaucuacaccaaggacaacagcaucagaaucggcagcaagggcgacguguucgugaucagagagcccuucaucagcugcagccaccuggagugcagaaccuucuuccugacccagggcgcccugcugaacgacaagcacagcaacggcaccgugaaggacagaagccccuacagagcccugaugagcugcccccugggcgaggcccccagccccuacaacagcagauucgagagcguggccuggagcgccagcgccugccacgacggccugggcuggcugaccaucggcaucagcggccccgacaacggcgccguggccgugcugaaguacaacggcaucaucaccgagaccaucaagagcuggaagaagagaauccugagaacccaggagagcgagugcgugugcaugaacggcagcugcuucaccaucaugaccgacggccccagcaacggcgccgccagcuacagaaucuucaagaucgagaagggcagagugaccaagagcaucgagcuggacgcccccaacuaccacuacgaggagugcagcugcuaccccgacaccggcaccgugaugugcgugugcagagacaacuggcacggcagcaacagacccugggugagcuucaaccagaaccuggacuaccagaucggcuacaucugcagcggcguguucggcgacaaccccagacccaaggacggcgagggcagcugcaaccccgugaccguggacggcgccgacggcgugaagggcuucagcuacagauacggcaacggcguguggaucggcagaaccaagagcaacagacugagaaagggcuacgagaugaucugggaccccaacggcuggaccgacaccgacagcgacuucagcaugaagcaggacaucguggccaugaccgacuggagcggcuacagcggcagcuucgugcagcaccccgagcugaccggccuggacugcaugagacccugcuucuggguggagcuggugagaggccugcccagagagaacaccaccaucuggaccagcggcagcagcaucagcuucugcggcgugaacagcgacaccgccaacuggagcuggcccgacggcgccgagcugcccuucaccaucgacaaguga

SEQ ID NO: 175814 - RNA, 1413 nt, Artificial Sequence
  derived and/or modified CDS sequence (opt4) from neuraminidase__InfluenzaA__ABO38024
augaaccccaaccagaagaucaucaccaucggcagcaucagcaucgccaucggcaucaucagccugaugcugcagaucggcaacaucaucagcaucugggccagccacagcauccagaccggcagccagaaccacaccggcaucugcaaccagagaaucaucaccuacgagaacaacaccugggugaaccacaccuacgugaacaucaacaacaccaacaucguggccggcaaggacaagaccagcgugacccuggccggcaacagcagccugugcagcaucagcggcugggccaucuacaccaaggacaacagcaucagaaucggcagcaagggcgacguguucgugaucagagagcccuucaucagcugcagccaccuggagugcagaaccuucuuccugacccagggcgcccugcugaacgacaagcacagcaacggcaccgugaaggacagaagccccuacagagcccugaugagcugcccccugggcgaggcccccagccccuacaacagcaaguucgagagcguggccuggagcgccagcgccugccacgacggcaugggcuggcugaccaucggcaucagcggccccgacaacggcgccguggccgugcugaaguacaacggcaucaucaccgagaccaucaagagcuggaagaagagaauccugagaacccaggagagcgagugcgugugcgugaacggcagcugcuucaccaucaugaccgacggccccagcaacggcgccgccagcuacaagaucuucaagaucgagaagggcaaggugaccaagagcaucgagcugaacgcccccaacuuccacuacgaggagugcagcugcuaccccgacaccggcaccgugaugugcgugugcagagacaacuggcacggcagcaacagacccugggugagcuucaaccagaaccuggacuaccagaucggcuacaucugcagcggcguguucggcgacaaccccagacccaaggacggcgagggcagcugcaaccccgugaccguggacggcgccgacggcgugaagggcuucagcuacaaguacggcaacggcguguggaucggcagaaccaagagcaacagacugagaaagggcuucgagauggugugggaccccaacggcuggaccgacaccgacagcgacuucagcgugaagcaggacgugguggccaucaccgacuggagcggcuacagcggcagcuucgugcagcaccccgagcugaccggccuggacugcaucagacccugcuucuggguggagcuggugagaggccugcccagagagaacaccaccaucuggaccagcggcagcagcaucagcuucugcggcgugaacagcgacaccgccaacuggagcuggcccgacggcgccgagcugcccuucaccaucgacaaguga

SEQ ID NO: 175815 - RNA, 1413 nt, Artificial Sequence
  derived and/or modified CDS sequence (opt4) from neuraminidase__InfluenzaA__ABO38035
augaaccccaaccagaagaucaucaccaucggcagcaucagcaucgccaucggcaucaucagccugaugcugcagaucggcaacaucaucagcaucugggccagccacagcauccagaccggcagccagaaccacaccggcaccugcaaccagagaaucaucaccuacgagaacagcaccugggugaaccacaccuacgugaacaucaacaacaccaacgugguggccggcaaggacaagaccagcgugacccuggccggcaacagcagccugugcagcaucagcggcugggccaucuacaccaaggacaacagcaucagaaucggcagcaagggcgacguguucgugaucagagagcccuucaucagcugcagccaccuggagugcagaaccuucuuccugacccagggcgcccugcugaacgacaagcacagcaacggcaccgugaaggacagaagccccuacagagcccugaugagcugcccccugggcgaggcccccagccccuacaacagcaaguucgagagcguggccuggagcgccagcgccugccacgacggcaugggcuggcugaccaucggcaucagcggccccgacaacggcgccguggccgugcugaaguacaacggcaucaucaccgagaccaucaagagcuggaagaagagaauccugagaacccaggagagcgagugcgugugcgugaacggcagcugcuucaccaucaugaccgacggccccagcaacggcgccgccagcuacaagaucuucaagaucgagaagggcaaggugaccaagagcaucgagcugaacgcccccaacuuccacuacgaggagugcagcugcuaccccgacaccggcaccgugaugugcgugugcagagacaacuggcacggcagcaacagacccugggugagcuucaaccagaaccuggacuaccagaucggcuacaucugcagcggcguguucggcgacaaccccagacccaaggacggcgagggcagcugcaaccccgugaccguggacggcgccgacggcgugaagggcuucagcuacaaguacggcaacggcguguggaucggcagaaccaagagcaacagacugagaaagggcuucgaggugaucugggaccccaacggcuggaccgacaccgacagcgacuucagcgugaagcaggacgugguggccaucaccgacuggagcggcuacagcggcagcuucgugcagcaccccgagcugaccggccuggacugcaucagacccugcuucuggguggagcuggugagaggcaugcccagagagaacaccaccaucuggaccagcggcagcagcaucagcuucugcggcgugaacagcgacaccgccaacuggagcuggcccgacggcgccgagcugcccuucaccaucgacaaguga

SEQ ID NO: 175816 - RNA, 1413 nt, Artificial Sequence; identical to SEQ ID NO: 174456
  derived and/or modified CDS sequence (opt4) from neuraminidase__InfluenzaA__ABO38046

SEQ ID NO: 175817 - RNA, 1413 nt, Artificial Sequence; identical to SEQ ID NO: 175011
  derived and/or modified CDS sequence (opt4) from neuraminidase__InfluenzaA__ABO38068

SEQ ID NO: 175818 - RNA, 1410 nt, Artificial Sequence; identical to SEQ ID NO: 174387
  derived and/or modified CDS sequence (opt4) from neuraminidase__InfluenzaA__ABO38079

SEQ ID NO: 175819 - RNA, 1410 nt, Artificial Sequence
  derived and/or modified CDS sequence (opt4) from neuraminidase__InfluenzaA__ABO38090
augaaccccaaccagaagaucaucaccaucggcagcgugagccugaccaucgccaccaucugcuuccugaugcagaucgccauccuggugaccaccgugacccugcacuucaagcaguacgagugcaacagcccccccaacaaccaggugaugcugugcgagcccaccaucaucgagagaaacaucaccgagaucguguaccugaccaacaccaccaucgagaaggagaucugccccaagcuggccgaguacagaaacuggagcaagccccagugcaacaucaccggcuucgcccccuucagcaaggacaacagcaucagacugagcgccggcggcgacaucugggugaccagagagcccuacgugagcugcgaccccgacaagugcuaccaguucgcccugggccagggcaccacccugaacaacggccacagcaacgacaccgugcacgagagaacccccuacagaacccugcugaugaacgagcugggcgugcccuuccaccugggcaccaagcaggugugcaucgccuggagcagcagcagcugccacgacggcaaggccuggcugcacgugugcgugaccggcgacgacgagaacgccaccgccagcuucaucuacaacggcagacugguggacagcaucggcagcuggagcaagaagauccugagaacccaggagagcgagugcgugugcaucaacggcaccugcaccguggugaugaccgacggcagcgccagcggcaaggccgacaccaagauccuguucaucgaggagggcaagaucgugcacaccagccugcugagcggcagcgcccagcacguggaggagugcagcugcuaccccagauaccccggcgugagaugcgugugcagagacaacuggaagggcagcaacagacccaucguggacaucaacgugaaggacuacagcaucgugagcagcuacgugugcagcggccuggugggcgacacccccagaaagaacgacagcagcagcagcagccacugccuggaccccaacaacgaggagggcggccacggcgugaagggcugggccuucgacgacggcaacgacguguggaugggcagaaccaucagcgagaagcugagaagcggcuacgagaccuucaaggugaucgagggcuggagcaagcccaacagcaagcugcagaucaacagacaggugaucguggacagaggcaacagaagcggcuacagcggcaucuucagcguggagggcaagagcugcaucaacagaugcuucuacguggagcugaucagaggcagaaagcaggagaccgaggugcuguggaccagcaacagcaucgugguguucugcggcaccagcggcaccuacggcaccggcagcuggcccgacggcgccgacaucaaccugaugcccaucuga

SEQ ID NO: 175820 - RNA, 1410 nt, Artificial Sequence
  derived and/or modified CDS sequence (opt4) from neuraminidase__InfluenzaA__ABO38101
augaaccccaaccagaagaucaucaccaucggcagcgugagccugaccaucgccaccgugugcuuccugaugcagaucgccauccuggccaccaccgugacccugcacuucaagcagcacgagugcgacagccccgccagcaaccaggugaugcccugcgagcccaucaucaucgagagaaacaucaccgagaucguguaccugaacaacaccaccaucgagaaggagaucugccccgaggugguggaguacagaaacuggagcaagccccagugccagaucaccggcuucgcccccuucagcaaggacaacagcaucagacugagcgccggcggcgacaucugggugaccagagagcccuacgugagcugcgaccccggcaagugcuaccaguucgcccugggccagggcaccacccuggacaacaagcacagcaacggcaccauccacgacagaaucccccacagaacccugcugaugaacgagcugggcgugcccuuccaccugggcaccaagcaggugugcguggccuggagcagcagcagcugccacgacggcaaggccuggcugcacgugugcgugaccggcgacgacagaaacgccaccgccagcuucaucuacgacggcagacugguggacagcaucggcagcuggagccagaacauccugagaacccaggagagcgagugcgugugcaucaacggcaccugcaccguggugaugaccgacggcagcgccagcggcagagccgacaccagaauccuguucaucaaggagggcaagaucgugcacaucagcccccugagcggcagcgcccagcacaucgaggagugcagcugcuaccccagauaccccgacgugagaugcaucugcagagacaacuggaagggcagcaacagacccgugaucgacaucaacauggaggacuacagcaucgacagcagcuacgugugcagcggccuggugggcgacacccccagaaacgacgacagcagcagcaacagcaacugcagagaccccaacaacgagagaggcaaccccggcgugaagggcugggccuucgacaacggcgacgacguguggaugggcagaaccaucaacaaggacagcagaagcggcuacgagaccuucaaggugaucggcggcuggagcacccccaacagcaagagccaggugaacagacaggugaucguggacaacaacaacuggagcggcuacagcggcaucuucagcguggagggcaagagcugcaucaacagaugcuucuacguggagcugaucagaggcagaccccaggagaccagagugugguggaccagcaacagcaucgugguguucugcggcaccagcggcaccuacggcaccggcagcuggcccgacggcgccaacaucaacuucaugcccaucuga

SEQ ID NO: 175821 - RNA, 1410 nt, Artificial Sequence
  derived and/or modified CDS sequence (opt4) from neuraminidase__InfluenzaA__ABO38233
augaaccccaaccagaagaucaucaccaucggcagcgugagccugaccaucgccaccaucugcuuccugaugcagaucgccauccuggugaccaccgugacccugcacuucaagcaguacgagugcgacagccccgccaacaaccaggugaugcccugcgagcccaucaucaucgagagaaacaucaccgagaucguguaccugaccaacaccaccaucgagaaggagaucugccccaagcugguggaguacagaaacuggagcaagccccagugcaagaucaccggcuucgcccccuucagcaaggacaacagcaucagacugagcgccggcggcgacaucugggugaccagagagcccuacgugagcugcgaccccggcaagugcuaccaguucgcccugggccagggcaccacccuggacaacaagcacagcaacgacaccauccacgacagaaccccccacagaacccugcugaugaacgagcugggcgugcccuuccaccugggcaccagacaggugugcaucgccuggagcagcagcagcugccacgacggcaaggccuggcugcacgugugcgugaccggcuacgacaagaacgccaccgccagcuucaucuacgacggcagacugguggacagcaucggcagcuggagcaagaacauccugagaacccaggagagcgagugcgugugcaucaacggcaccugcaccguggugaugaccgacggcagcgccagcgagagagccgacaccaagauccuguucaucgaggagggcaagaucgugcacaucagcccccugagcggcagcgcccagcacguggaggagugcagcugcuaccccagauaccccggcgugagaugcgugugcagagacaacuggaagggcagcaacagacccgugguggacaucaacgugaaggacuacagcaucgccagcagcuacgugugcagcggccuggugggcgacacccccagaaagaacgacagauacagcagcagcuacugcagaaaccccaacaacgagaagggcaaccacggcgugaagggcugggccuucgacgacggcaacgacguguggaugggcagaaccaucagcgacgagagcagaagcggcuacgagaccuucaaggugaucggcggcuggagcacccccaacagcaagcugcagaucaacagacaggugaucguggacagcgacaacagaagcggcuacagcggcaucuucagcguggagggcaagagcugcaucaacagaugcuucuacguggagcugaucagaggcagagagcaggagaccagagugugguggaccagcaacagcaucgugguguucugcggcaccagcggcaccuacggcaccggcagcuggcccgacggcgccgacaucaaccugaugcccaucuga

SEQ ID NO: 175822 - RNA, 1410 nt, Artificial Sequence; identical to SEQ ID NO: 175171
  derived and/or modified CDS sequence (opt4) from neuraminidase__InfluenzaA__ABO38244

SEQ ID NO: 175823 - RNA, 1410 nt, Artificial Sequence; identical to SEQ ID NO: 174387
  derived and/or modified CDS sequence (opt4) from neuraminidase__InfluenzaA__ABO38255

SEQ ID NO: 175824 - RNA, 1410 nt, Artificial Sequence; identical to SEQ ID NO: 174772
  derived and/or modified CDS sequence (opt4) from neuraminidase__InfluenzaA__ABO38277

SEQ ID NO: 175825 - RNA, 1410 nt, Artificial Sequence; identical to SEQ ID NO: 175799
  derived and/or modified CDS sequence (opt4) from neuraminidase__InfluenzaA__ABO38288

SEQ ID NO: 175826 - RNA, 1410 nt, Artificial Sequence
  derived and/or modified CDS sequence (opt4) from neuraminidase__InfluenzaA__ABO38299
augaaccccaaccagaagaucaucaccaucggcagcgugagccugaccaucgccaccgugugcuucaucaugcagaucgccauccuggccaccaccgugacccugcacuucaagcagcacgagugcgacagccccgccagcaaccaggugaugcccugcgagcccaucaucaucgagagaaacaucaccgagaucguguaccugaacaacaccaccaucgagaaggagaucugccccgaggccguggaguacagaaacuggagcaagccccagugccagaucaccggcuucgcccccuucagcaaggacaacagcaucagacugagcgccggcggcgacaucugggugaccagagagcccuacgugagcugcgaccccggcaagugcuaccaguucgcccugggccagggcaccacccuggacaacaagcacagcaacggcaccauccacgacagaaucccccacagaacccugcugaugaacgagcugggcgugcccuuccaccugggcaccaagcaggugugcguggccuggagcagcagcagcugccacgacggcaaggccuggcugcacgugugcgugaccggcgacgacagaaacgccaccgccagcuucaucuacgacggcagacugguggacagcaucggcagcuggagccagaacauccugagaacccaggagagcgagugcgugugcaucaacggcaccugcaccguggugaugaccgacggcagcgccagcggcagagccgacaccagaauccuguucaucaaggagggcaagaucgugcacaucagcccccugagcggcagcgcccagcacguggaggagugcagcugcuaccccagauaccccgacgugagaugcaccugcagagacaacuggaagggcagcaacagacccgugaucgacaucaacauggaggacuacagcaucgacagcagcuacgugugcagcggccuggugggcgacacccccagaaacgacgacagcagcagcaacagcaacugcagagaccccaacaacgagagaggcaaccccggcgugaagggcugggccuucgacaacggcgacgacguguggaugggcagaaccaucaacaaggacagcagaagcggcuacgagaccuucaaggugaucggcggcuggagcacccccaacagcaagagccaggugaacagacaggugaucguggacaacaacaacuggagcggcuacagcggcaucuucagcguggagggcaagagcugcaucaacagaugcuucuacguggagcugaucagaggcagaccccaggagaccagagugugguggaccagcaacagcaucgugguguucugcggcaccagcggcaccuacggcaccggcagcuggcccgacggcgccaacaucaacuucaugcccaucuga

SEQ ID NO: 175827 - RNA, 1410 nt, Artificial Sequence
  derived and/or modified CDS sequence (opt4) from neuraminidase__InfluenzaA__ABO38310
augaaccccaaccagaagaucaucaccaucggcagcgugagccugaccaucgccaccgugugcuuccugaugcagaucgccauccuggccaccaccgugacccugcacuucaagcagcacgagugcgacagccccaccagcaaccaggugaugcccugcgagcccaucaucaucgagagaaacaucaccgagaucguguaccugaacaacaccaccaucgagaaggagaucugccccgaggugguggaguacagaaacuggagcaagccccagugccagaucaccggcuucgcccccuucagcaaggacaacagcaucagacugagcgccggcggcgacaucugggugaccagagagcccuacgugagcugcgaccccggcaagugcuaccaguucgcccugggccagggcaccacccuggacaacaagcacagcaacggcaccauccacgacagaaucccccacagaacccugcugaugaacgagcugggcgugcccuuccaccugggcaccaagcaggugugcguggccuggagcagcagcagcugccacgacggcaaggccuggcugcacgugugcgugaccggcgacgacagaaacgccaccgccagcuucaucuacgacggcagacugguggacagcaucggcagcuggagccagaacauccugagaacccaggagagcgagugcgugugcaucaacggcaccugcaccguggugaugaccgacggcagcgccagcggcagagccgacaccagaauccuguucaucaaggagggcaagaucgugcacaucagcccccugagcggcagcgcccagcacaucgaggagugcagcugcuaccccagauaccccgacgugagaugcaucugcagagacaacuggaagggcagcaacagacccgugaucgacaucaacauggaggacuacagcaucgacagcagcuacgugugcagcggccuggugggcgacacccccagaaacggcgacagcagcagcaacagcaacugcagagaccccaacaacgagagaggcaaccccggcgugaagggcugggccuucgacaacggcgacgacguguggaugggcagaaccaucaacaaggagagcagaagcggcuacgagaccuucaaggugaucggcggcuggagcacccccaacagcaagagccaggugaacagacaggugaucguggacaacaacaacuggagcggcuacagcggcaucuucagcguggagggcaagagcugcaucaacagaugcuucuacguggagcugaucagaggcagaccccaggagaccagagugugguggaccagcaacagcaucgugguguucugcggcaccagcggcaccuacggcaccggcagcuggcccgacggcgccaacaucaacuucaugcccaucuga

SEQ ID NO: 175828 - RNA, 1413 nt, Artificial Sequence; identical to SEQ ID NO: 174990
  derived and/or modified CDS sequence (opt4) from neuraminidase__InfluenzaA__ABO38332

SEQ ID NO: 175829 - RNA, 1413 nt, Artificial Sequence
  derived and/or modified CDS sequence (opt4) from neuraminidase__InfluenzaA__ABO38343
augaaccccaaccagaagaucaucaccaucggcagcaucugcaugaccaucggcaucaucagccugauccugcagaucggcaacaucaucagcaucugggugagccacagcauccagaccggcagccagaaccacaccggcaucugcaaccagagaaucaucaccuacgagaacagcaccugggugaaccagaccuacgugaacaucaacaacaccaacgugguggccggcaaggacaccaccagcgugacccuggccggcaacagcagccugugccccaucagaggcugggccaucuacagcaaggacaacagcaucagaaucggcagcaagggcgacguguucgugaucagagagcccuucaucagcugcagccaccuggagugcagaaccuucuuccugacccagggcgcccugcugaacgacaagcacagcaacggcaccgugaaggacagaagccccuacagagcccugaugagcugccccaucggcgaggcccccagccccuacaacagcagauucgagagcguggccuggagcgccagcgccugccacgacggcaugggcuggcugaccaucggcaucagcggccccgacgacggcgccguggccgugcugaaguacaacggcaucaucaccgagaccaucaagagcuggagaaagagaauccugagaacccaggagagcgagugcgugugcgugaacggcagcugcuucaccaucaugaccgacggccccagcaacggccccgccagcuacagaaucuucaagaucgagaagggcaagaucaccaagagcaucgagcuggacgcccccaacagccacuacgaggagugcagcugcuaccccgacaccggcaccgugaugugcgugugcagagacaacuggcacggcagcaacagacccugggugagcuucaaccagaaccuggacuaccagaucggcuacaucugcagcggcguguucggcgacaaccccagacccaaggacggcaagggcagcugcgaccccgugaccguggacggcgccgacggcgugaagggcuucagcuacagauacggcaacggcguguggaucggcagaaccaagagcaacagcagcagaaagggcuucgagaugaucugggaccccaacggcuggaccgacaccgacagcaacuuccuggugaagcaggacgugguggccaugaccgacuggagcggcuacagcggcagcuucgugcagcaccccgagcugaccggccuggacugcaugagacccugcuucuggguggagcuggugagaggcagacccagagagggcaccaccguguggaccagcggcagcagcaucagcuucugcggcgugaacagcgacaccgccaacuggagcuggcccgacggcgccgagcugcccuucaccaucgacaaguga

SEQ ID NO: 175830 - RNA, 1410 nt, Artificial Sequence
  derived and/or modified CDS sequence (opt4) from neuraminidase__InfluenzaA__ABO38354
augaaccccaaccagaagaucaucaccaucggcagcaucugcaugguggugggcaucaucagccugauccugcagaucggcaacaucaucagcaucuggaucagccacagcauccagaccggcagccagaaccacaccggcaucugcaaccagaacaucaucaccuacaagaacagcaccugggugaaccagaccuacgugaacaucagcaacaccaacgugguggccggccaggacaccaccagcgugauccugaccggcaacagcagccugugccccaucagaggcugggccaucuacagcaaggacaacagcaucagaaucggcagcaagggcgacguguucgugaucagagagcccuucaucagcugcagccaccuggagugcagaaccuucuuccugacccagggcgcccugcugaacgacagacacagcaacggcaccgugaaggacagaagccccuacagagcccugaugagcugccccgugggcgaggcccccagccccuacaacagcagauucgagagcguggccuggagcgccagcgccugccacgacggcaugggcuggcugaccaucggcaucagcggccccgacaacggcgccguggccgugcugaaguacaacggcaucaucaccgagaccaucaagagcuggagaaagaagauccugagaacccaggagagcgagugcgccugcgugaacggcagcugcuucaccaucaugaccgacggccccagcaacggccuggccagcuacaagaucuucaagaucgagaagggcaaggugaccaagagcaucgagcugaacgcccccaacagccacuacgaggagugcagcugcuaccccgacaccggcaaggugaugugcgugugcagagacaacuggcacggcagcaacagacccugggugagcuucgaccagaaccuggacuaccagaucggcuacaucugcagcggcguguucggcgacaaccccagacccaaggacggcaccggcagcugcggccccguguacguggacggcgccaacggcgugaagggcuucagcuacagauacggcaacggcguguggaucggcagaaccaagagcaacagcagcagacacggcuucgagaugaucugggaccccaacggcuggaccgagaccgacagcaaguucagcgugagacaggacgugguggccaugaccgacuggagcggcuacagcggcagcuucgugcagcaccccgagcugaccggccuggacugcaugagacccugcuucuggguggagcugaucagaggcagacccaaggagaacaccaucuggaccagcggcagcagcaucagcuucugcggcgugaacagcgacaccguggacuggagcuggcccgacggcgccgagcugcccuucaccaucgacaaguga

SEQ ID NO: 175831 - RNA, 1413 nt, Artificial Sequence
  derived and/or modified CDS sequence (opt4) from neuraminidase__InfluenzaA__ABO38365
augaaccccaaccagaagaucaucaccaucggcagcaucugcauggccaucggcaucaucagccugauccugcagaugggcaacaucaucagcaucugggugagccacagcauccagaccggcagccagaaccacaccggcaucugcaaccagagaaucaucaccuacgagaacagcaccugggugaaccagaccuacgugaacaucaacaacaccaacgugguggccggcaaggacaccaccagcgugacccuggccggcaacagcagccugugccccaucagaggcugggccaucuacagcaaggacaacagcaucagaaucggcagcaagggcgacguguucgugaucagagagcccuucaucagcugcagccaccuggagugcagaaccuucuuccugacccagggcgcccugcugaacgacaagcacagcaacggcaccgugaaggacagaagccccuacagagcccugaugagcugccccaucggcgaggcccccagccccuacaacagcagauucgagagcguggccuggagcgccagcgccugccacgacggcaugggcuggcugaccaucggcaucagcggccccgacgacggcgccguggccgugcugaaguacaacggcaucaucaccgagaccaucaagagcuggagaaagagaauccugagaacccaggagagcgagugcgugugcgugaacggcagcugcuucaccaucaugaccgacggccccagcaacggccccgccagcuacagaaucuucaagaucgagaagggcaagaucaccaagagcaucgagcuggacgcccccaacagccacuacgaggagugcagcugcuaccccgacaccggcaccgugaugugcgugugcagagacaacuggcacggcagcaacagacccugggugagcuucaaccagaaccuggacuaccagaucggcuacaucugcagcggcguguucggcgacaaccccagacccaaggacggcaagggcagcugcgaccccgugaccguggacggcgccgacggcgugaagggcuucagcuacagauacggcaacggcguguggaucggcagaaccaagagcaacagcagcagaaagggcuucgagaugaucugggaccccaacggcuggaccgacaccgacagcaacuuccuggugaagcaggacgugguggccaugaccgacuggagcggcuacagcggcagcuucgugcagcaccccgagcugaccggccuggacugcaugagacccugcuucuggguggagcugaucagaggcagacccagagagaagaccaccaucuggaccagcggcagcagcaucagcuucugcggcgugaacagcgacaccgccaacuggagcuggcccgacggcgccgagcugcccuucaccaucgacaaguga

SEQ ID NO: 175832 - RNA, 1410 nt, Artificial Sequence
  derived and/or modified CDS sequence (opt4) from neuraminidase__InfluenzaA__ABO38376
augaaccccaaccagaagaucaucaccaucggcagcaucugcaugguggugggcaucaucagccugauccugcagaucggcaacaucaucagcaucuggaucagccacagcauccagaccggcagccagaaccacaccggcaccugcaaccagagcaucaucaccuacaagaacagcaccugggugaaccagaccuacgugaacaucagcaacaccaacgugguggccggcaaggacaccaccagcgugauccuggccggcaacagcagccugugccccaucagaggcugggccaucuacagcaaggacaacggcgugagaaucggcagcaagggcgacguguucgugaucagagagcccuucaucagcugcagccaccuggagugcagaaccuucuuccugacccagggcgcccugcugaacgacaagcacagcaacggcaccgugaaggacagaagccccuacagagcccugaugagcugccccgugggcgaggcccccagccccuacaacagcagauucgagagcguggccuggagcgccagcgccugccacgacggcaugggcuggcugaccaucggcaucagcggccccgacgacggcgccguggccgugcugaaguacaacggcaucaucaccgagaccaucaagagcuggagaaaggagauccugagaacccaggagagcgagugcgccugcgugaacggcagcugcuucaccaucaugaccgacggccccagcggcggccccgccagcuacaagaucuucaagaucgagaagggcaaggugaccaagagcaucgagcuggacgcccccaacagccacuacgaggagugcagcugcuaccccgacaccggcaaggugaugugcgugugcagagacaacuggcacggcagcaacagacccugggugagcuucgaccagaaccuggacuaccagaugggcuacaucugcagcggcguguucggcgacaaccccagacccaaggacggcaagggcaacugcggccccguguacguggacggcgccaacggcgugaagggcuucagcuacagauacggcaacggcguguggaucggcagaaccaagagcaacagcagcagacagggcuucgagaugaucugggaccccaacggcuggaccgagaccgacagcaacuucuucgugaagcaggacgugguggccgugaccgacuggagcggcuacagcggcagcuucgugcagcaccccgagcugaccggccuggacugcaugagacccugcuucuggguggagcugaucagaggcagacccaaggagaagaccaucuggaccagcggcagcagcaucagcuucugcggcgugaacagcgacaccguggacuggagcuggcccgacggcgccgagcugcccuucaccaucgacaaguga

SEQ ID NO: 175833 - RNA, 1410 nt, Artificial Sequence
  derived and/or modified CDS sequence (opt4) from neuraminidase__InfluenzaA__ABO38387
augaaccccaaccagaagaucaucaccaucggcagcaucugcaugguggugggcaucaucagccugauccugcagaucggcaacaucaucagcaucuggaucagccacagcauccagaccggcagccagaaccacaccggcaucugcaaccagagcaucaucaccuacaagaacagcaccugggugaaccagaccuacgugaacaucagcaacaccaacgugguggccggccaggacaccaccagcgugauccugaccggcaacagcagccugugccccaucagaggcugggccaucuacagcaaggacaacggcaucagaaucggcagcaagggcgacguguucgugaucagagagcccuucaucagcugcagccaccuggagugcagaaccuucuuccugacccagggcgcccugcugaacgacaagcacagcaacggcaccgugaaggacagaagccccuacagagcccugaugagcugccccgugggcgaggcccccagccccuacaacagcagauucgagagcguggccuggagcgccagcgccugccacgacggcaugggcuggcugaccaucggcaucagcggccccgacaacgaggccguggccgugcugaaguacaacggcaucaucaccgagaccaucaagagcuggagaaagaagauccugagaacccaggagagcgagugcgccugcgugaacggcagcugcuucaccaucaugaccgacggccccagcgacggccuggccagcuacaagaucuucaagaucgagaagggcaaggugaccaagagcaucgagcugaacgcccccaacagccacuacgaggagugcagcugcuaccccgacaccggcaaggugaugugcgugugcagagacaacuggcacggcagcaacagacccugggugagcuucgaccagaaccuggacuaccagaucggcuacaucugcagcggcguguucggcgacaaccccagacccaaggacggcaccggcagcugcggccccguguacguggacggcgccaacggcgugaagggcuucagcuacagauacggcaacggcguguggaucggcagaaccaagagcaccagcagcagacacggcuucgagaugaucugggaccccaacggcuggaccgagaccgacagcaaguucagcgugagacaggacgugguggccaugaccgacuggagcggcuacagcggcagcuucgugcagcaccccgagcugaccggccuggacugcaugagacccugcuucuggguggagcugaucagaggccagcccaaggagaagaccaucuggaccagcggcagcagcaucagcuucugcggcgugaacagcgacaccguggacuggagcuggcccgacggcgccgagcugcccuucaccaucgacaaguga

SEQ ID NO: 175834 - RNA, 1413 nt, Artificial Sequence
  derived and/or modified CDS sequence (opt4) from neuraminidase__InfluenzaA__ABO38398
augaaccccaaccagaagaucaucaccaucggcagcaucugcauggccaucggcaucaucagccugauccugcagaucggcaacaucgugagcaucuggaucagccacagcauccagaccggcagccagaacuacaccggcaucugcaaccagagaaucaucaccuacgagaacagcaccugggugaaccagaccuacgugaacaucaacaacaccaacgugguggccggccaggacaccaccagcguggcccuggccggcaacagcagccugugccccaucagcggcugggccaucuacagcaaggacaacagcaucagaaucggcagcaagggcgacguguucgugaucagagagcccuucaucagcugcagccaccuggagugcagaaacuucuuccugacccagggcgcccugcugaacgacaagcacagcaacggcaccgugaaggacagaagccccuacagagcccugaugagcugccccaucggcgaggcccccagccccuacaacagcagauucgagagcguggccuggagcgccagcgccugccacgacggcaugggcuggcugaccaucggcaucagcggccccgacgacggcgccguggccgugcugaaguacaacggcaucaucaccgagaccaucaagagcuggagaaagagaauccugagaacccaggagagcgagugcgugugcgugaacggcagcugcuucaccaucaugaccgacggccccaacaacggccccgccagcuacaagaucuucaagaucgagaagggcaagaucaccaagagcaucgagcuggacgcccccaacagccacuacgaggagugcagcugcuaccccgacgccggcaccgugaugugcgugugcagagacaacuggcacggcagcaacagacccugggugagcuucaaccagaaccuggacuaccagaucggcuacaucugcagcggcguguucggcgacaaccccagacccaaggacggcaagggcagcugcgaccccgugaccguggacggcgccgacggcgugaagggcuucagcuacagauacggcaacggcguguggaucggcagaaccaagagcaacagcagcagaagaggcuucgagaugaucugggaccccaacggcuggaccgacaccgacagcaaguuccuggugaagcaggacgugguggccaugaccgacuggagcggcuacagcggcagcuucgugcagcaccccgagcugaccggccuggacugcaugagacccugcuucuggguggagcugaucagaggcagacccagagagaacaccaccaucuggaccagcggcagcagcaucagcuucugcggcgugaacggcgacaccgccaacuggagcuggcccgacggcgccgagcugcccuucaccaucgacaaguga

SEQ ID NO: 175835 - RNA, 1410 nt, Artificial Sequence; identical to SEQ ID NO: 174313
  derived and/or modified CDS sequence (opt4) from neuraminidase__InfluenzaA__ABO38420

SEQ ID NO: 175836 - RNA, 1410 nt, Artificial Sequence
  derived and/or modified CDS sequence (opt4) from neuraminidase__InfluenzaA__ABO38715
augaaccccaaccagaagaucaucaccaucggcagcgugagccugaccaucgccaccgugugcuuccugaugcagaucgccauccuggugaccaccgugacccugcacuucaagcagcacgagugcgacagccccgccagcaaccaggugaugcccugcgagcccaucaucaucgagagaaacaucaccgagaucguguaccugaacaacaccaccaucgagaaggagaccugccccaaggugguggaguacagaagcuggagcaagccccagugcaagaucaccggcuucgcccccuucagcaaggacaacagcaucagacugagcgccggcggcgacaucugggugaccagagagcccuacgugagcugcgaccccggcaagugcuaccaguucgcccugggccagggcaccacccuggacaacaagcacagcaacgacaccauccacgacagaaucccccacagaacccugcugaugaacgagcugggcgugcccuuccaccugggcaccagacaggugugcaucgccuggagcagcagcagcugccacgacggcaaggccuggcugcacgugugcgugaccggcgacgacaagaacgccaccgccagcuucaucuacgacggcagacugguggacagcaucggcagcuggagccagaacauccugagaacccaggagagcgagugcgugugcaucaacggcaccugcaccguggugaugaccgacggcagcgccagcggcagagccgacaccagaauccuguucaucgaggagggcaagaucgugcacaucagcccccugagcggcagcgcccagcacguggaggagugcagcugcuaccccagauaccccgacgugagaugcaucugcagagacaacuggaagggcagcaacagacccaucguggacaucaacauggaggacuacagcaucgacagcagcuacgugugcagcggccuggugggcgacacccccagaaacgacgacagaagcagcaacagcaacugcagaaaccccaacaacgagagaggcaaccagggcgugaagggcugggccuucgacaacggcgacgacguguggaugggcagaaccaucagcaaggaccugagaagcggcuacgagaccuucaaggugaucggcggcuggagcacccccaacagcaagagccagaucaacagacaggugaucguggacagcgacaacagaagcggcuacagcggcaucuucagcguggagggcaagagcugcaucaacagaugcuucuacguggagcugaucagaggcagaaagcaggagaccagagugugguggaccagcaacagcaucgugguguucugcggcaccagcggcaccuacggcaccggcagcuggcccgacggcgccaacaucaacuucaugcccaucuga

SEQ ID NO: 175837 - RNA, 1410 nt, Artificial Sequence; identical to SEQ ID NO: 175836
  derived and/or modified CDS sequence (opt4) from neuraminidase__InfluenzaA__ABO38726

SEQ ID NO: 175838 - RNA, 1413 nt, Artificial Sequence
  derived and/or modified CDS sequence (opt4) from neuraminidase__InfluenzaA__ABO44049
augaaccccaaccagaagaucaucaccaucggcagcaucagcaucgccaucggcaucaucagccugaugcugcagaucggcaacaucaucagcaucugggccagccacagcauccagaccggcagccagaaccacaccggcaucugcaaccagagaaucaucaccuacgagaacagcaccugggugaaccacaccuacgugaacaucaacaacaccaacgugguggccggcaaggacaagaccagcgugacccuggccggcaacagcagccugugcagcaucagcggcugggccaucuacaccaaggacaacagcaucagaaucggcagcaagggcgacguguucgugaucagagagcccuucaucagcugcagccaccuggagugcagaaccuucuuccugacccagggcgcccugcugaacgacaagcacagcaacggcaccgugaaggacagaagccccuacagagcccugaugagcugcccccugggcgaggcccccagccccuacaacagcaaguucgagagcguggccuggagcgccagcgccugccacgacggcaugggcuggcugaccaucggcaucagcggccccgacaacggcgccguggccgugcugaaguacaacggcaucaucaccgagaccaucaagagcuggaagaagagaauccugagaacccaggagagcgagugcgugugcgugaacggcagcugcuucaccaucaugaccgacggccccagcaacggcgccgccagcuacaagaucuucaagaucgagaagggcaaggugaccaagagcaucgagcugaacgcccccaacuuccacuacgaggagugcagcugcuaccccgacaccggcaccgugaucugcgugugcagagacaacuggcacggcagcaacagacccugggugagcuucaaccagaaccuggacuaccagaucggcuacaucugcagcggcguguucggcgacaaccccagacccaaggacggcgagggcagcugcaaccccgugaccguggacggcgccgacggcgugaagggcuucagcuacaaguacggcaacggcguguggaucggcagaaccaagagcaacagacugagaaagggcuucgagaugaucugggaccccaacggcuggaccgacaccgacagcaacuucagcgugaagcaggacgugguggccaucaccgacuggagcggcuacagcggcagcuucgugcagcaccccgagcugaccggccuggacugcaucagacccugcuucuggguggagcuggugagaggccugcccagagagaacaccaccaucuggaccagcggcagcagcaucagcuucugcggcgugaacagcgacaccgccaacuggagcuggcccgacggcgccgagcugcccuucaccaucgacaaguga

SEQ ID NO: 175839 - RNA, 1410 nt, Artificial Sequence
  derived and/or modified CDS sequence (opt4) from neuraminidase__InfluenzaA__ABO44060
augaaccccaaccagaagaucaucaccaucggcagcgugagccugaccaucgccaccgugugcuuccugaugcagaucgccauccuggugaccaccgugacccugcacuucaagcagcacgagugcgacagccccgccagcaaccaggugaugcccugcgagcccaucaucaucgagagaaacaucaccgagaucguguaccugaacaacaccaccaucgagaaggagaucugccccaaggugguggaguacagaaacuggagcaagccccagugcaagaucaccggcuucgcccccuucagcaaggacaacagcaucagacugagcgccggcggcgacaucugggugaccagagagcccuacgugagcugcgaccccggcaagugcuaccaguucgcccugggccagggcaccacccuggacaacaagcacagcaacgacaccauccacgacagaaucccccacagaacccugcugaugaacgagcugggcgugcccuuccaccugggcaccagacaggugugcaucgccuggagcagcagcagcugccacgacggcaaggccuggcugcacgugugcgugaccggcgacgacaagaacgccaccgccagcuucaucuacgacggcagacugguggacagcaucggcagcuggagccagaacauccugagaacccaggagagcgagugcgugugcaucaacggcaccugcaccguggugaugaccgacggcagcgccagcggcagagccgacaccaagauccuguucaucgaggagggcaagaucgugcacaucagcccccugagcggcagcgcccagcacguggaggagugcagcugcuaccccagauaccccgacgugagaugcaucugcagagacaacuggaagggcagcaacagacccgugguggacaucaacauggaggacuacagcaucgacagcagcuacgugugcagcggccuggugggcgacacccccagaaacgacgacagaagcagcaacagcaacugcagaaaccccaacaacgagagaggcaaccagggcgugaagggcugggccuucgacaacggcgacgacguguggaugggcagaaccaucagcaaggaccugagaagcggcuacgagaccuucaaggugaucggcggcuggagcacccccaacagcaagagccagaucaacagacaggugaucguggacagcgacaacagaagcggcuacagcggcaucuucagcguggagggcaagagcugcaucaacagaugcuucuacguggagcugaucagaggcagaaagcaggagaccagagugugguggaccagcaacagcaucgugguguucugcggcaccagcggcaccuacggcaccggcagcuggcccgacggcgccaacaucaaccugaugcccaucuga

SEQ ID NO: 175840 - RNA, 1410 nt, Artificial Sequence
  derived and/or modified CDS sequence (opt4) from neuraminidase__InfluenzaA__ABO44071
augaaccccaaccagaagaucaucaccaucggcuucguguuccugaccaucgccaccgugugcuuccugaugcagaucgccauccuggugaccaccgugacccugcacuucaagcaguacgagugcgacagccccgccagcaaccaggugaugcccugcgagcccaucaucaucgagagaaacaucaccgagaucguguaccugaacaacaccaccaucgagaaggagaucugccccaaggugguggaguacagaaacuggagcaagccccagugccagaucaccggcuucgcccccuucagcaaggacaacagcaucagacugagcgccggcggcgacaucugggugaccagagagcccuacgugagcugcgaccacggcaagugcuaccaguucgcccugggccagggcaccacccuggacaacaagcacagcaacgacaccauccacgacagaaucccccacagaacccugcugaugaacgagcugggcgugcccuuccaccugggcaccagacaggugugcaucgccuggagcagcagcagcugccacgacggcaaggccuggcugcacgugugcaucaccggcgacgacaagaacgccaccgccagcuucaucuacgacggcagacugguggacagcaucggcagcuggagccagaacauccugagaacccaggagagcgagugcgugugcaucaacggcaccugcaccguggugaugaccgacggcagcgccagcggcagagccgacaccagaauccuguucaucgaggagggcaagaucgugcacaucagcccccugagcggcagcgcccagcacguggaggagugcagcugcuaccccagauaccccggcgugagaugcaucugcagagacaacuggaagggcagcaacagacccgugguggacaucaacauggaggacuacagcaucgacagcagcuacgugugcagcggccuggugggcgacacccccagaaacgacgacagaagcagcaacagcaacugcaagaaccccaacaacgagagaggcaaccagggcgugaagggcugggccuucgacaacggcgacgacguguggaugggcagaaccaucagcaaggaccugagaagcggcuacgagaccuucaaggugaucggcggcuggagcacccccaacagcaagagccagaucaacagacaggugaucguggacagcgacaacagaagcggcuacagcggcaucuucagcguggagggcaagagcugcaucaacagaugcuucuacguggagcugaucagaggcagaaagcaggagaccagagugugguggaccagcaacagcaucgugguguucugcggcaccagcggcaccuacggcaccggcagcuggcccgacggcgccaacaucaacuucaugcccaucuga

SEQ ID NO: 175841 - RNA, 1410 nt, Artificial Sequence; identical to SEQ ID NO: 174406
  derived and/or modified CDS sequence (opt4) from neuraminidase__InfluenzaA__ABO44082

SEQ ID NO: 175842 - RNA, 1410 nt, Artificial Sequence
  derived and/or modified CDS sequence (opt4) from neuraminidase__InfluenzaA__ABO44093
augaaccccaaccagaagaucaucaccaucggcagcgugagccugaccaucgccaccgugugcuuccugaugcagaucgccauccuggccaccaccgugacccugcacuucaagcagcacgagugcgacagccccgccagcaaccaggugaugcccugcgagcccaucaucaucgagagaaacaucaccgagaucguguaccugaacaacaccaccaucgagaaggagaucugccccgaggugguggaguacagaaacuggagcaagccccagugccagaucaccggcuucgcccccuucagcaaggacaacagcaucagacugagcgccggcggcgacaucugggugaccagagagcccuacgugagcugcgaccccggcaagugcuaccaguucgcccugggccagggcaccacccuggacaacaagcacagcaacggcaccauccacgacagaaucccccacagaacccugcugaugaacgagcugggcgugcccuuccaccugggcaccaagcaggugugcguggccuggagcagcagcagcugccacgacggcaaggccuggcugcacgugugcgugaccggcgacgacagaaacgccaccgccagcuucaucuacgacggcagacugguggacagcaucggcagcuggagccagaacauccugagaacccaggagagcgagugcgugugcaucaacggcaccugcaccguggugaugaccgacggcagcgccagcggcagagccgacaccagaauccuguucaucaaggagggcaagaucgugcacaucagcccccugagcggcagcgcccagcacaucgaggagugcagcugcuaccccagauaccccgacgugagaugcaucugcagagacaacuggaagggcagcaacagacccgugcuggacaucagcauggaggacuacagcaucgacagcagcuacgugugcagcggccuggugggcgacacccccagaaacgacgacagcagcagcaacagcaacugcagagaccccaacaacgagagaggcaaccccggcgugaagggcugggccuucgacaacggcgacgacguguggaugggcagaaccaucagcaaggaccugagaagcggcuacgagaccuucaaggugaucggcggcuggagcacccccaacagcaagagccaggugaacagacaggugaucguggacaacaacaacuggagcggcuacagcggcaucuucagcguggagggcaagagcugcaucaacagaugcuucuacguggagcugaucagaggcagaagccaggagaccagagugugguggaccagcaacagcaucgugguguucugcggcaccagcggcaccuacggcaccggcagcuggcccgacggcgccaacaucaacuucaugcccaucuga

SEQ ID NO: 175843 - RNA, 1410 nt, Artificial Sequence
  derived and/or modified CDS sequence (opt4) from neuraminidase__InfluenzaA__ABO44104
augaaccccaaccagaagaucaucaccaucggcagcgccagccugaccaucgccaccgugugcuuccugaugcagaucgccauccuggugaccaccgugacccugcacuucaagcagcacgagugcgacagccccgccagcaaccaggugaugcccugcgagcccaucaucaucgagagaaacaucaccgagaucguguaccugaacaacaccaccaucgagaaggagaucugccccaaggugguggaguacagaaacuggagcaagccccagugcaagaucaccggcuucgcccccuucagcaaggacaacagcaucagacugagcgccggcggcgacaucugggugaccagagagcccuacgugagcugcgaccccggcaagugcuaccaguucgcccugggccagggcaccacccuggacaacaagcacagcaacgacaccauccacgacagaaucccccacagaacccugcugaugaacgagcugggcgugcccuuccaccugggcaccagacaggugugcaucgccuggagcagcagcagcugccacgacggcaaggccuggcugcacgugugcgugaccggcgacgacaagaacgccaccgccagcuucaucuacgacggcagacugguggacagcaucggcagcuggagccagaacauccugagaacccaggagagcgagugcgugugcaucaacggcaccugcaccguggugaugaccgacggcagcgccagcggcagagccgacaccagaauccuguucaucgaggagggcaagaucgugcacaucagcccccugagcggcagcgcccagcacguggaggagugcagcugcuaccccagauaccccgacgugagaugcaucugcagagacaacuggaagggcagcaacagacccgugguggacaucaacauggaggacuacagcaucgacagcagcuacgugugcagcggccuggugggcgacacccccagaaacgacgacagaagcagcaacagcaacugcagaaaccccaacaacgagaagggcaaccagggcgugaagggcugggccuucgacaacggcgacgacguguggaugggcagaaccaucagcaaggaccugagaagcggcuacgagaccuucaaggugaucggcggcuggagcacccccaacagcaagagccagaucaacagacaggugaucguggacagcgacaacagaagcggcuacagcggcaucuucagcguggagggcaagagcugcaucaacagaugcuucuacguggagcugaucagaggcagaaagcaggagaccagagugugguggaccagcaacagcaucgugguguucugcggcaccagcggcaccuacggcaccggcagcuggcccgacggcgccaacaucaaccugaugcccaucuga

SEQ ID NO: 175844 - RNA, 1413 nt, Artificial Sequence
  derived and/or modified CDS sequence (opt4) from neuraminidase__InfluenzaA__ABO44126
augaaccccaaccagaagaucaucaccaucggcagcaucugcauggccaucggcaucaucagccugauccugcagaucggcaacaucgugagcaucuggaucagccacagcauccagaccggcagccagaacuacaccggcaucugcaaccagagaaucaucaccuacgagaacagcaccugggugaaccagaccuacgugaacaucaacaacaccaacgugguggccggccaggacaccaccagcguggcccuggccggcaacagcagccugugccccaucagcggcugggccaucuacagcaaggacaacagcaucagaaucggcagcaagggcgacguguucgugaucagagagcccuucaucagcugcagccaccuggagugcagaaccuucuuccugacccagggcgcccugcugaacgacaagcacagcaacggcaccgugaaggacagaagccccuacagagcccugaugagcugccccaucggcgaggcccccagccccuacaacagcagauucgagagcguggccuggagcgccagcgccugccacgacggcaugggcuggcugaccaucggcaucagcggccccgacgacggcgccguggccgugcugaaguacaacggcaucaucaccgagaccaucaagagcuggagaaagagaauccugagaacccaggagagcgagugcgugugcgugaacggcagcugcuucaccaucaugaccgacggccccaacaacggccccgccagcuacaagaucuucaagaucgagaagggcaagaucaccaagagcaucgagcugaacgcccccaacagccacuacgaggagugcagcugcuaccccgacgccggcaccgugaugugcgugugcagagacaacuggcacggcagcaacagacccugggugagcuucaaccagaaccuggacuaccagaucggcuacaucugcagcggcguguucggcgacaaccccagacccaaggacggcaagggcagcugcggccccgugaccguggacggcgccgacggcgugaagggcuucagcuacagauacggcaacggcguguggaucggcagaaccaagagcaacagcagcagaagaggcuucgagaugaucugggaccccaacggcuggaccgacaccgacagcaaguuccuggugaagcaggacgugguggccaucaccgacuggagcggcuacagcggcagcuucgugcagcaccccgagcugaccggccuggacugcaugagacccugcuucuggguggagcugaucagaggcagacccagagagaacaccaccaucuggaccagcggcagcagcaucagcuucugcggcgugaacggcgacaccgccaacuggagcuggcccgacggcgccgagcugcccuucaccaucgacaaguga

SEQ ID NO: 175845 - RNA, 1413 nt, Artificial Sequence
  derived and/or modified CDS sequence (opt4) from neuraminidase__InfluenzaA__ABO52228
augaaccccaaccagaagaucaucaccaucggcagcaucagcaucgccaucggcaucaucagccugauccugcagaucggcaacaucaucagcaucugggccagccacagcauccagaccggcagccagaaccacaccggcaucugcaaccagagaaucaucaccuacgagaacagcaccugggugaaccagaccuacgugaacaucaacaacaccaacgugguggccggcaaggacaagaccagcaugacccuggccggcaacagcagccugugccccaucagaggcugggccaucuacaccaaggacaacagcaucagaaucggcagcaagggcgacguguucgugaucagagagcccuucaucagcugcagccaccuggagugcagaaccuucuuccugacccagggcgcccugcugaacgacaagcacagcaacggcaccgugaaggacagaagccccuacagagcccugaugagcugcccccugggcgaggcccccagccccuacaacagcaaguucgagagcguggccuggagcgccagcgccugccacgacggccugggcuggcugaccaucggcaucagcggccccgacaacggcgccguggccgugcugaaguacaacggcaucaucaccgagaccaucaagagcuggaagaagagaauccugagaacccaggagagcgagugcgugugcaugaacggcagcugcuucaccaucaugaccgacggccccagcaacggcgccgccagcuacagaaucuucaagaucgagaagggcagagugaccaagagcaucgagcuggacgcccccaacuaccacuacgaggagugcagcugcuaccccgacaccggcaccgugaugugcgugugcagagacaacuggcacggcagcaacagacccugggugagcuucaaccagaaccuggacuaccagaucggcuacaucugcagcggcguguucggcgacaaccccagacccaaggacggcgagggcagcugcaaccccgugaccguggacggcgccgacggcgugaagggcuucagcuacagauacggcaacggcguguggaucggcagaaccaagagcaacagacugagaaagggcuucgagaugaucugggaccccaacggcuggaccgacaccgacagcgacuucagcaugaagcaggacaucguggccaugaccgacuggagcggcuacagcggcagcuucgugcagcaccccgagcugaccggccuggacugcaugagacccugcuucuggguggagcuggugagaggccugcccagagagaacaccaccaucuggaccagcggcagcagcaucagcuucugcggcgugaacagcgacaccgccaacuggagcuggcccgacggcgccgagcugcccuucaccaucgacaaguga

SEQ ID NO: 175846 - RNA, 1410 nt, Artificial Sequence
  derived and/or modified CDS sequence (opt4) from neuraminidase__InfluenzaA__ABO52239
augaaccccaaccagaagaucaucaccaucggcagcgugagccugaccaucgccaccgugugcuucaucaugcagaucgccauccuggccaccaccgugacccugcacuucaagcagcacgagugcgacagccccgccagcaaccaggugaugcccugcgagcccaucaucaucgagagaaacaucaccgagaucguguaccugaacaacaccaccaucgagaaggagaucugccccgaggccguggaguacagaaacuggagcaagccccagugccagaucaccggcuucgcccccuucagcaaggacaacagcaucagacugagcgccggcggcgacaucugggugaccagagagcccuacgugagcugcgaccccggcaagugcuaccaguucgcccugggccagggcaccacccuggacaacaagcacagcaacggcaccauccacgacagaaucccccacagaacccugcugaugaacgagcugggcgugcccuuccaccugggcaccaagcaggugugcguggccuggagcagcagcagcugccacgacggcaaggccuggcugcacgugugcgugaccggcgacgacaagaacgccaccgccagcuucaucuacgacggcagacugguggacagcaucggcagcuggagccagaacauccugagaacccaggagagcgagugcgugugcaucaacggcaccugcaccguggugaugaccgacggcagcgccagcggcagagccgacaccagaauccuguucaucaaggagggcaagaucgugcacaucagcccccugagcggcagcgcccagcacguggaggagugcagcugcuaccccagauaccccgacgugagaugcaucugcagagacaacuggaagggcagcaacagacccgugaucgacaucaacauggaggacuacagcaucgacagcagcuacgugugcagcggccuggugggcgacacccccagaaacgacgacagcagcagcaacagcaacugcagagaccccaacaacgagagaggcaaccccggcgugaagggcugggccuucgacaacggcgacgacguguggaugggcagaaccaucaacaaggacagcagaagcggcuacgagaccuucaaggugaucggcggcuggagcacccccaacagcaagagccaggugaacagacaggugaucguggacaacaacaacuggagcggcuacagcggcaucuucagcguggagggcaagagcugcaucaacagaugcuucuacguggagcugaucagaggcagaccccaggagaccagagugugguggaccagcaacagcaucgugguguucugcggcaccagcggcaccuacggcaccggcagcuggcccgacggcgccaacaucaacuucaugcccaucuga

SEQ ID NO: 175847 - RNA, 1410 nt, Artificial Sequence; identical to SEQ ID NO: 175843
  derived and/or modified CDS sequence (opt4) from neuraminidase__InfluenzaA__ABO52250

SEQ ID NO: 175848 - RNA, 1413 nt, Artificial Sequence
  derived and/or modified CDS sequence (opt4) from neuraminidase__InfluenzaA__ABO52261
augaaccccaaccagaagaucaucaccaucggcagcaucugcauggccaucggcaucaucagccugauccugcagaucggcaacaucaucagcaucugggugagccacagcauccagaccggcagccagaaccacaccggcaucugcaaccagagaaucaucaccuacgagaacagcaccugggugaaccagaccuacgugaacaucaacaacaccaacgugguggccggcaaggacaccaccagcgugacccuggccggcaacagcagccugugccccaucagaggcugggccaucuacagcaaggacaacagcaucagaaucggcagcaagggcgacguguucgugaucagagagcccuucaucagcugcagccaccuggagugcagaaccuucuuccugacccagggcgcccugcugaacgacaagcacagcaacggcaccgugaaggacagaagccccuacagagcccugaugagcugccccaucggcgaggcccccagccccuacaacagcagauucgagagcguggccuggagcgccagcgccugccacgacggcaugggcuggcugaccaucggcaucagcggccccgacgacggcgccguggccgugcugaaguacaacggcaucaucaccgagaccaucaagagcuggagaaagagaauccugagaacccaggagagcgagugcgugugcgugaacggcagcugcuucaccaucaugaccgacggccccagcaacggccccgccagcuacagaaucuucaagaucgagaagggcaagaucaccaagagcaucgagcuggacgcccccaacagccacuacgaggagugcagcugcuaccccgacaccggcaccgugaugugcgugugcagagacaacuggcacggcagcaacagacccugggugagcuucaaccagaaccuggacuaccagaucggcuacaucugcagcggcguguucggcgacaaccccagacccaaggacggcaagggcagcugcgaccccgugaccguggacggcgccgacggcgugaagggcuucagcuacagauacggcaacggcguguggaucggcagaaccaagagcaacagcagcagaaagggcuucgagaugaucugggaccccgacggcuggaccgacaccgacagcaacuuccuggugaagcaggacgugguggccaugaccgacuggagcggcuacagcggcagcuucgugcagcaccccgagcugaccggccuggacugcaucagacccugcuucuggguggagcugaucagaggcagacccagagagaagaccaccaucuggaccagcggcagcagcaucagcuucugcggcgugaacagcgacaccgugaacuggagcuggcccgacggcgccgagcugcccuucaccaucgacaaguga

SEQ ID NO: 175849 - RNA, 1413 nt, Artificial Sequence
  derived and/or modified CDS sequence (opt4) from neuraminidase__InfluenzaA__ABO52283
augaaccccaaccagaagaucaucaccaucggcagcaucugcaugaccaucggcaccaucagccugauccugcagaucggcaacaucaucagcaucuggaucagccacagcauccagaccggcagccagaaccacaccggcaucugcaaccagagaaucaucaccuacgagaacaacaccugggugaaccagaccuacgugaacaucagcaacaccaacgugguggccggcaaggacaccaccagcaugauccuggccggcaacagcagccugugccccaucagaggcugggccaucuacagcaaggacaacagcaucagaaucggcagcaagggcgacguguucgugaucagagagcccuucaucagcugcagccaccuggagugcagaaccuucuuccugacccagggcgcccugcugaacgacaagcacagcaacggcaccgugaaggacagaagccccuacagagcccugaugagcugccccaucggcgaggcccccagccccuacaacagcagauucgagagcguggccuggagcgccagcgccugccacgacggcaugggcuggcugaccaucggcaucagcggccccgacgacggcgccguggccgugcugaaguacaacggcaucaucaccgagaucaucaagagcuggagaaagcagauccugagaacccaggagagcgagugcgugugcgugaacggcagcugcuucaccaucaugaccgacggccccagcgacggccccgccagcuacagaaucuucaagaucgagaagggcaagaucaccaagagcaucgagcuggacgcccccaacagccacuacgaggagugcagcugcuaccccgacaccggcaaggugaugugcgugugcagagacaacuggcacggcagcaacagacccugggugagcuucaaccagaaccuggacuaccagaucggcuacaucugcagcggcguguucggcgacaaccccagacccaaggacggcaagggcagcugcgaccccgugaacguggacggcgccgacggcgugaagggcuucagcuacagauacggcgacggcguguggaucggcagaaccaagagcaacagcagcagaaagggcuucgagaugaucugggaccccaacggcuggaccgacaccgacgacaacuuccuggugaagcaggacgugguggccaugaccgacuggagcggcuacagcggcagcuucgugcagcaccccgagcugaccggccuggacugcaugagacccugcuucuggguggagcugaucagaggcagacccagagagaagaccaccaucuggaccagcggcagcagcaucagcuucugcggcgugaacagcgacaccgugaacuggagcuggcccgacggcgccgagcugcccuucaccaucgacauguga

SEQ ID NO: 175850 - RNA, 1410 nt, Artificial Sequence; identical to SEQ ID NO: 175578
  derived and/or modified CDS sequence (opt4) from neuraminidase__InfluenzaA__ABO52294

SEQ ID NO: 175851 - RNA, 1410 nt, Artificial Sequence
  derived and/or modified CDS sequence (opt4) from neuraminidase__InfluenzaA__ABO52316
augaaccccaaccagaagaucaucaccaucggcagcgugagccugaccaucgccaccaucugcuuccugaugcagaucgccauccuggugaccaccgugacccugcacuucaagcaguacgagugcgacagccccgccaacaaccagaucaugcccugcgagcccaccaucaucgagagaaacaucaccgagaucguguaccugaccaacaucaccaucgagaaggagaucugccccaagcugguggaguacagaaacuggagcaagccccagugcaagaucaccggcuucgcccccuucagcaaggacaacagcaucagacugagcgccggcggcgacaucugggugaccagagagcccuacgugagcugcgaccccagcagaugcuaccaguucgcccugggccagggcaccacccuggacaacaagcacagcaacgacaccauccacgacagaaccccccacagaacccugcugaugaacgagcugggcgugcccuuccaccugggcaccagacaggugugcaucgccuggagcagcagcagcugccacgacggcaaggccuggcugcacgugugcgugaccggcuacgacaagaacgccaccgccagcuucaucuacgacggcagacugguggacagcaucggcagcuggagccagaacauccugagaacccaggagagcgagugcgugugcaucaacggcaccugcaccguggugaugaccgacggcagcgccagcggcagagccgacaccaagauccuguucaucgaggagggcaagaucgugcacaucagcccccugagcggcagcgcccagcacguggaggagugcagcugcuaccccagauaccccggcgugagaugcaucugcagagacaacuggaagggcagcaacagacccgugguggacaucaacgugaaggacuacagcaucgacagcagcuacgugugcagcggccuggugggcgacacccccagaaagaacgacagaagcagcaacagcuacugcagaaaccccaacaacgagaagggcaaccacggcgugaagggcugggccuucgacgacggcaacgacguguggaugggcagaaccaucagcgaggacagcagaagcggcuacgagaccuucaaggugaucggcggcuggagcacccccaacagcaagcugcagaucaacagacaggugaucguggacagcgacaacagaagcggcuacagcggcaucuucagcguggagggcaagagcugcaucaacagaugcuucuacguggagcugaucagaggcagagagcaggagaccagagugugguggaccagcaacagcaucgugguguucugcggcaccagcggcaccuacggcgccggcagcuggcccgacggcgccgacaucaaccugaugcccaucuga

SEQ ID NO: 175852 - RNA, 1410 nt, Artificial Sequence; identical to SEQ ID NO: 174174
  derived and/or modified CDS sequence (opt4) from neuraminidase__InfluenzaA__ABO52327

SEQ ID NO: 175853 - RNA, 1410 nt, Artificial Sequence
  derived and/or modified CDS sequence (opt4) from neuraminidase__InfluenzaA__ABO52338
augaaccccaaccagaagaucaucaccaucggcagcgugagccugaccaucgccaccaucugcuuccugaugcagaucgccauccuggugaccaccgugacccugcacuucaagcaguacgagugcgacagccccgccaacaaccaggugaugcccugcgagcccaucaucaucgagagaaacaucaccgagaucguguaccugaccaacaccaccaucgagaaggagaucugccccaagcugguggaguacagaaacuggagcaagccccagugcaagaucaccggcuucgcccccuucagcaaggacaacagcaucagacugagcgccggcggcgacaucugggugaccagagagcccuacgugagcugcgaccccggcaagugcuaccaguucgcccugggccagggcaccacccuggacaacaagcacagcaacgacaccauccacgacagaaccccccacagaacccugcugaugaacgagcugggcgugcccuuccaccugggcaccagacaggugugcaucgccuggagcagcagcagcugccacgacggcaaggccuggcugcacgugugcgugaccggcuacgacaagaacgccaccgccagcuucaucuacgacggcagacugguggacagcaucggcagcuggagcaagaacauccugagaacccaggagagcgagugcgugugcaucaacggcaccugcaccguggugaugaccgacggcagcgccagcggcagagccgacaccaagauccuguucaucgaggagggcaagaucgugcacaucagcccccugagcggcagcgcccagcacguggaggagugcagcugcuaccccagauaccccggcgugagaugcaucugcagagacaacuggaagggcagcaacagacccgugguggacaucaacgugaaggacuacagcaucgacagcagcuacgugugcagcggccuggugggcgacacccccagaaacaacgacagaagcagcagcagcuacugcagaaaccccaacaacgagaagggcaaccacggcgugaagggcugggccuucgacgacggcaacgacguguggaugggcagaaccaucagcgaggacagcagaagcggcuacgagaccuucaaggugaucggcggcuggagcacccccaacagcaagcugcagaucaacagacaggugaucguggacagcgacaacagaagcggcuacagcggcaucuucagcguggagggcaagagcugcaucaacagaugcuucuacguggagcugaucagaggcagagagcaggagaccagagugugguggaccagcaacagcaucgugguguucugcggcaccagcggcaccuacggcaccggcagcuggcccgacggcgccgacaucaaccugaugcccaucuga

SEQ ID NO: 175854 - RNA, 1410 nt, Artificial Sequence
  derived and/or modified CDS sequence (opt4) from neuraminidase__InfluenzaA__ABO52349
augaaccccaaccagaagaucaucaccaucggcagcgugagccugaccaucgccaccaucugcuuccugaugcagaucgccauccuggugaccaccgugacccugcacuucaagcaguacgagugcgacagccccgccaacaaccaggugaugcccugcgagcccaucaucaucgagagaaacgugaccgagaucguguaccugaccaacaccaccaucgagaaggagaucugccccaagcugguggaguacagaaacuggagcaagccccagugcaagaucaccggcuucgcccccuucagcaaggacaacagcaucagacugagcgccggcggcgacaucugggugaccagagagcccuacgugagcugcgaccccggcaagugcuaccaguucgcccugggccagggcaccacccuggacaacaagcacagcaacgacaccauccacgacagaacccccuacagaacccugcugaugaacgagcugggcgugcccuuccaccugggcaccagacaggugugcaucgccuggagcagcagcagcugccacgacggcaaggccuggcugcacgugugcgugaccggcuacgacaagaacgccaccgccagcuucaucuacgacggcagacugguggacagcaucggcagcuggagcaagaacauccugagaacccaggagagcgagugcgugugcaucaacggcaccugcaccguggugaugaccgacggcagcgccagcgagagagccgacaccaagauccuguucaucgaggagggcaagaucauccacaucagcccccugagcggcagcgcccagcacguggaggagugcagcugcuaccccagauaccccggcgugagaugcaucugcagagacaacuggaagggcagcaacagacccgugguggacaucaacaugagagacuacagcaucgugagcagcuacgugugcagcggccuggugggcgacacccccagaaagaacgacagaagcagcagcagcuacugcagaaaccccaacaacgagaagggcaaccacggcgugaagggcugggccuucgacgacggcaacgacguguggaugggcagaaccaucagcgaggagagcagaagcggcuacgagaccuucaaggugaucggcggcuggagcacccccaacagcaagcugcagaucaacagacaggugaucguggacagcaacaacagaagcggcuacagcggcaucuucagcguggagggcaagagcugcaucaacagaugcuucuacguggagcugaucagaggcagagagcaggagaccagagugugguggaccagcaacagcaucgugguguucugcggcaccagcggcaccuacggcaccggcagcuggcccgacggcgccgacaucaaccugaugcccaucuga

SEQ ID NO: 175855 - RNA, 1410 nt, Artificial Sequence
  derived and/or modified CDS sequence (opt4) from neuraminidase__InfluenzaA__ABO52360
augaaccccaaccagaagaucaucaccaucggcagcgugagccugaccaucgccaccgugugcuuccugaugcagaucgccauccuggugaccaccgugacccugcacuucaagcaguacgagugcgacagccccgccagcaaccaggugaugcccugcgagcccaucaucaucgagagaaacaucaccgagaucguguaccugaacaacaccaccaucgagaaggagaucugccccaaggugguggaguacagaaacuggagcaagccccagugccagaucaccggcuucgcccccuucagcaaggacaacagcaucagacugagcgccggcggcgacaucugggugaccagagagcccuacgugagcugcgaccacggcaagugcuaccaguucgcccugggccagggcaccacccuggacaacaagcacagcaacgacaccauccacgacagaaucccccacagaacccugcugaugaacgagcugggcgugcccuuccaccugggcaccagacaggugugcaucgccuggagcagcagcagcugccacgacggcaaggccuggcugcacgugugcaucaccggcgacgacaagaacgccaccgccagcuucaucuacgacggcagacugguggacagcaucggcagcuggagccagaacauccugagaacccaggagagcgagugcgugugcaucaacggcaccugcaccguggugaugaccgacggcagcgccagcggcagagccgacaccagaauccuguucaucgaggagggcaagaucgugcacaucagcccccugagcggcagcgcccagcacguggaggagugcagcugcuaccccagauaccccggcgugagaugcaucugcagagacaacuggaagggcagcaacagacccgugguggacaucaacauggaggacuacagcaucgacagcagcuacgugugcagcggccuggugggcgacacccccagaaacgacgacagaagcagcaacagcaacugcagaaaccccaacaacgagagaggcaaccagggcgugaagggcugggccuucgacaacggcaacgacguguggaugggcagaaccaucagcaaggaccugagaagcggcuacgagaccuucaaggugaucggcggcuggagcacccccaacagcaagagccagaucaacagacaggugaucguggacagcgacaacagaagcggcuacagcggcaucuucagcguggagggcaagagcugcaucaacagaugcuucuacguggagcugaucagaggcagaaagcaggagaccagagugugguggaccagcaacagcaucgugguguucugcggcaccagcggcaccuacggcaccggcagcuggcccgacggcgccaacaucaacuucaugcccaucuga

SEQ ID NO: 175856 - RNA, 1410 nt, Artificial Sequence
  derived and/or modified CDS sequence (opt4) from neuraminidase__InfluenzaA__ABO52371
augaaccccaaccagaagaucaucaccaucggcagcgugagccugaccaucgccaccgugugcuuccugaugcagaucgccauccuggugaccaccgugacccugcacuucagacaguacgagugcgacagccccgccaacaaccaggugaugcccugcgagcccaucaucaucgagagaaacaucaccgagaucguguaccugaacaacaccaccaucgagaaggagaucugccccaagcugguggaguacagaaacuggagcaagccccagugcaagaucaccggcuucgcccccuucagcaaggacaacagcaucagacugagcgccggcggcgacaucugggugaccagagagcccuacgugagcugcgaccccggcaagugcuaccaguucgcccugggccagggcaccacccuggacaacaagcacagcaacgacaccauccacgacagaaucccccacagaacccugcugaugaacgagcugggcgugcccuuccaccugggcaccagacaggugugcaucgccuggagcagcagcagcugccacgacggcaaggccuggcugcacgugugcgugaccggcgacgacaagaacgccaccgccagcuucaucuacgacggcaagcugguggacagcaucggcagcuggagccagaacauccugagaacccaggagagcgagugcgugugcaucaacggcaccugcaccguggugaugaccgacggcagcgccagcggcagagccgacaccagaauccuguucaucgaggagggcaagaucgugcacaucagcccccugagcggcagcgcccagcacguggaggagugcagcugcuaccccagauaccccggcgugagaugcaucugcagagacaacuggaagggcagcaacagacccgugguggacaucaacguggaggacuacagcaucgacagcagcuacgugugcagcggccuggugggcgacacccccagaaacaacgacagaagcggcaacagcaacugcagaaaccccaacaacgagagaggcaaccacggcgugaagggcugggccuucgacgacggcaacgacguguggaugggcagaaccaucaacaaggaccugagaagcggcuacgagaccuucaaggugaucggcggcuggagcacccccaacagcaagagccagaucaacagacaggugaucguggacagcgacaacagaagcggcuacagcggcaucuucagcguggagggcaagagcugcaucaacagaugcuucuacguggagcugaucagaggcagagagcaggagaccagagugugguggaccagcaacagcaucgugguguucugcggcaccagcggcaccuacggcaccggcagcuggcccgacggcgccgacaucaaccugaugcccaucuga

SEQ ID NO: 175857 - RNA, 1413 nt, Artificial Sequence
  derived and/or modified CDS sequence (opt4) from neuraminidase__InfluenzaA__ABO52800
augaaccccaaccagaagaucaucaccaucggcagcaucugcaugaccaucggcaucaucagccugauccugcagaucggcaacaucaucagcaucugggugagccacagcauccagaccggcagccagaaccacaccggcaucugcaaccagagaaucaucaccuacgagaacagcaccugggugaaccagaccuacgugaacaucaacaacaccaacgugguggccggcaaggacaccaccagcgugacccuggccggcaacagcagccugugccccaucagaggcugggccaucuacagcaaggacaacagcaucagaaucggcagcaagggcgacguguucgugaucagagagcccuucaucagcugcagccaccuggagugcagaaccuucuuccugacccagggcgcccugcugaacgacaagcacagcaacggcaccgugaaggacagaagccccuacagagcccugaugagcugccccaucggcgaggcccccagccccuacaacagcagauucgagagcguggccuggagcgccagcgccugccacgacggcaugggcuggcugaccaucggcaucagcggccccgacgacggcgccguggccgugcugaaguacaacggcaucaucaccgagaccaucaagagcuggagaaagagaauccugagaacccaggagagcgagugcgugugcgugaacggcagcugcuucaccaucaugaccgacggccccagcaacggccccgccagcuacagaaucuucaagaucgagaagggcaagaucaccaagagcaucgagcuggacgcccccaacagccacuacgaggagugcagcugcuaccccgacaccggcaccgugaugugcgugugcagagacaacuggcacggcagcaacagacccugggugagcuucaaccagaaccuggacuaccagaucggcuacaucugcagcggcguguucggcgacaaccccagacccaaggacggcaagggcagcugcgaccccgugaccguggacggcgccgacggcgugaagggcuucagcuacagauacggcaacggcguguggaucggcagaaccaagagcaacagcagcagaaagggcuucgagaugaucugggaccccaacggcuggaccgacaccgacagcaacuuccuggugaagcaggacgugguggccaugaccgacuggagcggcuacagcggcagcuucgugcagcaccccgagcugaccggccuggacugcaugagacccugcuucuggguggagcugaucagaggcagacccagagagagaaccaccaucuggaccagcggcagcagcaucagcuucugcggcgugaacagcgacaccgccaacuggagcuggcccgacggcgccgagcugcccuucaccaucgacaaguga

SEQ ID NO: 175858 - RNA, 1413 nt, Artificial Sequence; identical to SEQ ID NO: 174888
  derived and/or modified CDS sequence (opt4) from neuraminidase__InfluenzaA__ABP49220

SEQ ID NO: 175859 - RNA, 1413 nt, Artificial Sequence
  derived and/or modified CDS sequence (opt4) from neuraminidase__InfluenzaA__ABP49319
augaaccccaaccagaagaucaucaccaucggcagcaucugcauggccaucggcaucaucagccugauccugcagaucggcaacaucaucagcaucugggugagccacagcauccagaccggcagccagaaccacaccggcaucugcaaccagagaaucaucaccuacgagaacaacaccugggugaaccagaccuacgugaacaucagcaacaccaacgugguggccggcaaggacaccaccagcaugauccuggccggcaacagcagccugugccccaucagaggcugggccaucuacagcaaggacaacagcaucagaaucggcagcaagggcgacguguucgugaucagagagcccuucaucagcugcagccaccuggagugcagaaccuucuuccugacccagggcgcccugcugaacgacaagcacagcaacggcaccgugaaggacagaagccccuacagagcccugaugagcugccccaucggcgaggcccccagccccuacaacagcagauucgagagcguggccuggagcgccagcgccugccacgacggcaugggcuggcugaccaucggcaucagcggccccgacgacggcgccguggccgugcugaaguacaacggcaucaucaccgagaccaucaagagcuggagaaagcagauccugagaacccaggagagcgagugcgugugcgugaacggcagcugcuucaccaucaugaccgacggccccagcgacggccccgccagcuacagaaucuucaagaucgagaagggcaagaucaccaagagcaucgagcuggacgcccccaacagccacuacgaggagugcagcugcuaccccgacaccggcaaggugaugugcgugugcagagacaacuggcacggcagcaacagacccugggugagcuucaaccagaaccuggacuaccagaucggcuacaucugcagcggcguguucggcgacaaccccagacccaaggacggcaagggcagcugcgaccccgugaacguggacggcgccgacggcgugaagggcuucagcuacagauacggcaacggcguguggaucggcagaaccaagagcaacagcagcagaaagggcuucgagaugaucugggaccccaacggcuggaccgacaccgacggcaacuuccuggugaagcaggacgugguggccaugaccgacuggagcggcuacagcggcagcuucgugcagcaccccgagcugaccggccuggacugcaugagacccugcuucuggguggagcugaucagaggcagacccagagagaagaccaccaucuggaccagcggcagcagcaucagcuucugcggcgugaacagcgacaccgugaacuggagcuggcccgacggcgccgagcugcccuucaccaucgacaaguga

SEQ ID NO: 175860 - RNA, 1410 nt, Artificial Sequence
  derived and/or modified CDS sequence (opt4) from neuraminidase__InfluenzaA__ABP49330
augaaccccaaccagaagaucaucaccaucggcagcaucugcaugguggugggcaucaucagccugauccugcagaucggcaacaucaucagcaucuggaucagccacagcauccagaccggcagccagaaccacaccggcaucugcaaccagagcaucaucaccuacaagaacagcaccugggugaaccagaccuacgugaacaucagcaacaccaacgugguggccggcaagggcaccacccccgugauccuggccggcaacagcagccugugccccaucagaggcugggccaucuacagcaaggacaacggcaucagaaucggcagcaagggcgacguguucgugaucagagagcccuucaucagcugcagccaccuggagugcagaaccuucuuccugacccagggcgcccugcugaacgacaagcacagcaacggcaccgugaaggacagaagccccuacagagcccugaugagcugccccgugggcgaggcccccagccccuacaacagcagauucgagagcguggccuggagcgccugcgccugccacgacggcaugggcuggcugaccaucggcaucagcggccccgacgacgaggccguggccgugcugaaguacaacggcaucaucaccgagaccaucaagagcuggagaaagaagauccugagaacccaggagagcgagugcgugugcgugaacggcagcugcuucaccaucaugaccgacggccccagcgacggccccgccagcuacaagaucuucaagaucgagaagggcaaggugaccaagagcaucgagcuggacgcccccaacagccacuacgaggagugcagcugcuaccccgacaccggcaaggugaugugcgugugcagagacaacuggcacggcagcaacagacccugggugagcuucgaccagaaccuggacuaccagaucggcuacaucugcagcggcguguucggcgacaaccccagacccaaggacggcaagggcagcugcggccccguguacguggacggcgccaacggcgugaagggcuucagcuacagauacggcaacggcguguggaucggcagaaucaagagcaacagcagcagacagggcuucgagaugaucugggaccccaacggcuggaccgagaccgacagcagcuucuucgugaagcaggacgugguggccaugaccgacuggagcggcuacagcggcagcuucgugcagcaccccgagcugaccggccuggacugcaugagacccugcuucuggguggagcugaucagaggcagacccaaggagaagaccaucuggaccagcggcagcagcaucagcuucugcggcgugaacagcgacaccguggacuggagcuggcccgacggcgccgagcugcccuucaccaucgacaaguga

SEQ ID NO: 175861 - RNA, 1413 nt, Artificial Sequence
  derived and/or modified CDS sequence (opt4) from neuraminidase__InfluenzaA__ABP49352
augaaccccaaccagaagaucaucaccaucggcagcaucugcaugaccaucggcaucaucagccugauccugcagaucggcaacaucaucagcaucugggugagccacagcauccagaccggcagccagaaccacaccggcaucugcaaccagagaaucaucaccuacgagaacagcaccugggugaaccagaccuacgugaacaucaacaacaccaacgugguggccggcaaggacaccaccagcguggcccuggccggcaacagcagccugugccccaucagaggcugggccaucuacagcaaggacaacagcaucagaaucggcagcaagggcgacguguucgugaucagagagcccuucaucagcugcagccaccuggagugcagaaccuucuuccugacccagggcgcccugcugaacgacaagcacagcaacggcaccgugaaggacagaagccccuacagagcccugaugagcugccccaucggcgaggcccccagccccuacaacagcagauucgagagcguggccuggagcgccagcgccugccacgacggcaugggcuggcugaccaucggcaucagcggccccgacgacggcgccguggccgugcugaaguacaacggcaucaucaccgagaccaucaagagcuggagaaagagaauccugagaacccaggagagcgagugcgugugcgugaacggcagcugcuucaccaucaugaccgacggccccagcgacggccccgccagcuacagaaucuucaagaucgagaagggcaagaucaccaagagcaucgagcuggacgcccccaacagccacuacgaggagugcagcugcuaccccgacaccggcaccgugaugugcgugugcagagacaacuggcacggcagcaacagacccugggugagcuucaaccagaaccuggacuaccagaucggcuacaucugcagcggcguguucggcgacaaccccagacccaaggacggcaagggcagcugcggccccgugaccguggacggcgccgacggcgugaagggcuucagcuacaaguacggcaacggcguguggaucggcagaaccaagagcaacagcagcagaaagggcuucgagaugaucugggaccccaacggcuggaccgacaccgacagcaacuuccuggugaagcaggacgugguggccaugaccgacuggagcggcuacagcggcagcuucgugcagcaccccgagcugaccggccuggacugcaugagacccugcuucuggguggagcugaucagaggcagacccagagagagaaccaccaucuggaccagcggcagcagcaucagcuucugcggcguggacagcgacaccgccaacuggagcuggcccgacggcgccgagcugcccuucaccaucgacaaguga

SEQ ID NO: 175862 - RNA, 1413 nt, Artificial Sequence; identical to SEQ ID NO: 175758
  derived and/or modified CDS sequence (opt4) from neuraminidase__InfluenzaA__ABP49363

SEQ ID NO: 175863 - RNA, 1410 nt, Artificial Sequence; identical to SEQ ID NO: 174790
  derived and/or modified CDS sequence (opt4) from neuraminidase__InfluenzaA__ABP49374

SEQ ID NO: 175864 - RNA, 1413 nt, Artificial Sequence
  derived and/or modified CDS sequence (opt4) from neuraminidase__InfluenzaA__ABP49385
augaaccccaaccagaagaucaucaccaucggcagcaucagcguggccaucggcaucaucaaccugacccugcagaucggcaacaucaucagcaucugggccagccacagcauccagaccggcagccagaacuacaccggcaucugcaaccagagaaucaucaccuacgagaacagaaccugggugaaccagaccuacgugaacaucaacaacaccaacgugguggccggcaaggacaagaccagcaugacccuggccggcaacagcagccugugccccaucagaggcugggccaucuacaccaaggacaacagcaucagaaucggcagcaagggcgacguguucgugaucagagagcccuucaucagcugcagccaccuggagugcagaaccuucuuccugacccagggcgcccugcugaacgacaagcacagcaacggcaccaucaaggacagaagccccuucagagcccugaugagcugcccccugggcgaggcccccagccccuacaacagcagauucgagagcguggccuggagcgccagcgccugccacgacggccugggcuggcugaccaucggcaucagcggccccgacaacggcgccguggccgugcugaaguacaacggcaucaucaccgagaccaucaagagcuggaagaagcagauccugagaacccaggagagcgagugcgugugcgugaacggcagcugcuucaccaucaugaccgacggccccagcaacagagccgccagcuacagaaucuucaagaucgagaagggcagagugaccaagagcaucgagcuggacgcccccaacuaccacuacgaggagugcagcugcuaccccgacaccggcaccgugaugugcgugugcagagacaacuggcacggcagcaacagacccugggugagcuucaaccagaaccuggacuaccagaucggcuacaucugcagcggcguguucggcgacaaccccagacccaaggacggcgagggcagcugcaaccccgugaccguggacggcgccgacggcgugaagggcuucagcuacagauacggcaacggcguguggaucggcagaaccaagagcaacagacugagaaagggcuucgagaugaucugggaccccaacggcuggaccgacaccgacagcgacuucagcaugaagcaggacgugguggccaugaccgacuggagcggcuacagcggcagcuucgugcagcaccccgagcugaccggccuggacugcaugagacccugcuucuggguggagcuggugagaggccugcccagagagaacaccaccaucuggaccagcggcagcagcaucagcuucugcggcgugaacagcgagaccgccaacuggagcuggcccgacggcgccgagcugcccuucaccaucgacaaguga

SEQ ID NO: 175865 - RNA, 1413 nt, Artificial Sequence; identical to SEQ ID NO: 174446
  derived and/or modified CDS sequence (opt4) from neuraminidase__InfluenzaA__ABP49396

SEQ ID NO: 175866 - RNA, 1410 nt, Artificial Sequence
  derived and/or modified CDS sequence (opt4) from neuraminidase__InfluenzaA__ABP49407
augaaccccaaccagaagaucaucaccaucggcagcgugagccugaccaucagcaccaucugcuucuucaugcagaucgccauccugaucaccaccgugacccugcacuucaagcaguacgaguucaacagcccccccaacaaccaggugaugcugugcgagcccaccaucaucgagagaaacaucaccgagaucguguaccugaccaacaccaccaucgagaaggagaucugccccaagcuggccgaguacagaaacuggagcaagccccagugcgacaucaccggcuucgcccccuucagcaaggacaacagcaucagacugagcgccggcggcgacaucugggugaccagagagcccuacgugagcugcgaccccgacaagugcuaccaguucgcccugggccagggcaccacccugaacaacgugcacagcaacgacaccgugcacgacagaacccccuacagaacccugcugaugagcgagcugggcgugcccuuccaccugggcaccaagcaggugugcaucgccuggagcagcagcagcugccacgacggcaaggccuggcugcacgugugcgugaccggcgacgacaagaacgccaccgccagcuucaucuacaacggcagacugguggacagcaucgugagcuggagcaaggagauccugagaacccaggagagcgagugcgugugcaucaacggcaccugcaccguggugaugaccgacggcagcgccagcggcaaggccgacaccaagauccuguucaucgaggagggcaagaucgugcacaccagcacccugagcggcagcgcccagcacguggaggagugcagcugcuaccccagauaccccggcgugagaugcgugugcagagacaacuggaagggcagcaacagacccaucguggacaucaacaucaaggacuacagcaucgugagcagcuacgugugcagcggccuggugggcgacacccccagaaagaacgacagcagcagcagcagccacugccuggaccccaacaacgaggagggcggccacggcgugaagggcugggccuucgacgacggcaacgacguguggaugggcagaaccaucagcgagaagcugagaagcggcuacgagaccuucaaggugaucgagggcuggagcaaccccaacagcaagcugcagaucaacagacaggugaucguggacagaggcaacagaagcggcuacagcggcaucuucagcguggagggcaagaucugcaucaacagaugcuucuacguggagcugaucagaggcagaaaggaggagaccgaggugcuguggaccagcaacagcaucgugguguucugcggcaccagcggcaccuacggcaccggcagcuggcccgacggcgccgacaucaaccugaugcccaucuga

SEQ ID NO: 175867 - RNA, 1410 nt, Artificial Sequence; identical to SEQ ID NO: 174790
  derived and/or modified CDS sequence (opt4) from neuraminidase__InfluenzaA__ABP49418

SEQ ID NO: 175868 - RNA, 1410 nt, Artificial Sequence; identical to SEQ ID NO: 174790
  derived and/or modified CDS sequence (opt4) from neuraminidase__InfluenzaA__ABP49429

SEQ ID NO: 175869 - RNA, 1410 nt, Artificial Sequence
  derived and/or modified CDS sequence (opt4) from neuraminidase__InfluenzaA__ABP49440
augaaccccaaccagaagaucaucaccaucggcagcgugagccugaccaucgccaccgugugcuuccugauccagaucgccauccuggccaccaccgugacccugcacuucaagcagcacgagugcgacagccccgccagcaaccaggugaugcccugcgagcccaucaucaucgagagaaacaucaccgagaucguguaccugaacaacaccaccaucgagaaggagaucugccccgaggugguggaguacagaaacuggagcaagccccagugccagaucaccggcuucgcccccuucagcaaggacaacagcaucagacugagcgccggcggcgacaucugggugaccagagagcccuacgugagcugcgaccccggcaagugcuaccaguucgcccugggccagggcaccacccuggacaacaagcacagcaacggcaccauccacgacagaaucccccacagaacccugcugaugaacgagcugggcgugcccuuccaccugggcaccaagcaggugugcguggccuggagcagcagcagcugccacgacggcaaggccuggcugcacgugugcgugaccggcgacgacagaaacgccaccgccagcuucaucuacgacggcagacugguggacagcaucggcagcuggagccagaacauccugagaacccaggagagcgagugcgugugcaucaacggcaccugcaccguggugaugaccgacggcagcgccagcggcagagccgacaccagaauccuguucaucaaggagggcaagaucgugcacaucagcccccugagcggcagcgcccagcacaucgaggagugcagcugcuaccccagauaccccgacgugagaugcaucugcagagacaacuggaagggcagcaacagacccgugaucgacaucaacauggaggacuacagcaucgacagcagcuacgugugcagcggccuggugggcgacacccccagaaacgacgacagcagcagcaacagcaacugcagagaccccaacaacgagagaggcaaccccggcgugaagggcugggccuucgacaacggcgacgacguguggaugggcagaaccaucagcaaggacagcagaagcggcuacgagaccuucaaggugaucggcggcuggagcacccccaacagcaagagccaggccaacagacaggugaucguggacaagaacaacuggagcggcuacagcggcaucuucagcguggagggcaagagcugcaucaacagaugcuucuacguggagcugaucagaggcagaccccaggagaccagagugugguggaccagcaacagcaucgugguguucugcggcaccagcggcaccuacggcaccggcagcuggcccgacggcgccaacaucaacuucaugcccaucuga

SEQ ID NO: 175870 - RNA, 1413 nt, Artificial Sequence; identical to SEQ ID NO: 175011
  derived and/or modified CDS sequence (opt4) from neuraminidase__InfluenzaA__ABP49451

SEQ ID NO: 175871 - RNA, 1410 nt, Artificial Sequence
  derived and/or modified CDS sequence (opt4) from neuraminidase__InfluenzaA__ABP49462
augaaccccaaccagaagaucaucaccaucggcagcgugagccugaccaucgccaccgugugcuucaucaugcagaucgccauccuggccaccaccgugacccugcacuucaagcagcacgagugcgacagccccgccagcaaccaggugaugcccugcgagcccaucaucaucgagagaaacaucaccgagaucguguaccugaacaacaccaccaucgagaaggagaucugccccgaggccguggaguacagaaacuggagcaagccccagugccagaucaccggcuucgcccccuucagcaaggacaacagcaucagacugagcgccggcggcgacaucugggugaccagagagcccuacgugagcugcgaccccggcaagugcuaccaguucgcccugggccagggcaccacccuggacaacaagcacagcaacggcaccauccacgacagaaucccccacagaacccugcugaugaacgagcugggcgugcccuuccaccugggcaccaagcaggugugcguggccuggagcagcagcagcugccacgacggcaaggccuggcugcacgugugcgugaccggcgacgacagaaacgccaccgccagcuucaucuacgacggcagacugguggacagcaucggcagcuggagccagaacauccugagaacccaggagagcgagugcgugugcaucaacggcaccugcaccguggugaugaccgacggcagcgccagcggcagagccgacaccagaauccuguucaucaaggagggcaagaucgugcacaucagcccccugagcggcagcgcccagcacaucgaggagugcagcugcuaccccagauaccccgacgugagaugcaucugcagagacaacuggaagggcagcaacagacccgugaucgacaucaacauggaggacuacagcaucgacagcagcuacgugugcagcggccuggugggcgacacccccagaaacgacgacagcagcagcaacagcaacugcagagaccccaacaacgagagaggcaaccccggcgugaagggcugggccuucgacaacggcgacgacguguggaugggcagaaccaucaacaaggacagcagaagcggcuacgagaccuucaaggugaucggcggcuggagcacccccaacagcaagagccaggugaacagacaggugaucguggacaacaacaacuggagcggcuacagcggcaucuucagcguggagggcaagagcugcaucaacagaugcuucuacguggagcugaucagaggcagaccccaggagaccagagugugguggaccagcaacagcaucgugguguucugcggcaccagcggcaccuacggcaccggcagcuggcccgacggcgccaacaucaacuucaugcccaucuga

SEQ ID NO: 175872 - RNA, 1410 nt, Artificial Sequence; identical to SEQ ID NO: 175820
  derived and/or modified CDS sequence (opt4) from neuraminidase__InfluenzaA__ABP49473

SEQ ID NO: 175873 - RNA, 1410 nt, Artificial Sequence
  derived and/or modified CDS sequence (opt4) from neuraminidase__InfluenzaA__ABP49495
augaaccccaaccagaagaucaucaccaucggcagcgugagccugaccaucgccaccaucugcuuccugaugcagaucgccauccuggugaccaccgugacccugcacuucaagcaguacgagugcgacagccccgccaacaaccaggugaugcccugcgagcccaucaucaucgagagaaacaucaccgagaucguguaccugaccaacaccaccaucgagaaggagaucugccccaagcugguggaguacagaaacuggagcaagccccagugcaagaucaccggcuucgcccccuucagcaaggacaacagcaucagacugagcgccggcggcgacaucugggugaccagagagcccuacgugagcugcgaccccggcaagugcuaccaguucgcccugggccagggcaccacccuggacaacaagcacagcaacgacaccauccacgacagaaccccccacagaacccugcugaugaacgagcugggcgugcccuuccaccugggcaccagacaggugugcaucgccuggagcagcagcagcugccacgacggcaaggccuggcugcacgugugcgugaccggcuacgacaagaacgccaccgccagcuucaucuacgacggcagacugguggacagcaucggcagcuggagccagaacauccugagaacccaggagagcgagugcgugugcaucaacggcaccugcaccguggugaugaccgacggcagcgccagcggcagagccgacaccaagauccuguucaucgaggagggcaagaucgugcacaccagcccccugagcggcagcgcccagcacguggaggagugcagcugcuaccccagauaccccggcgugagaugcaucugcagagacaacuggagaggcagcaacagacccgugguggacaucaacgugaaggacuacagcaucgacagcagcuacgugugcagcggccuggugggcgacacccccagaaacaacgacagaagcagcagcagcuacugcagaaaccccaacaacgagaagggcacccacggcgugaagggcugggccuucgacgacggcaacgacguguggaugggcagaaccaucagcgaggacagcagaagcggcuacgagaccuucaaggugaucggcggcuggagcacccccaacagcaagcugcagaucaacagacaggugaucguggacagcgacaacagaagcggcuacagcggcaucuucagcguggagggcaagagcugcaucaacagaugcuucuacguggagcugaucagaggcagagagcaggagaccagagugugguggaccagcaacagcaucgugguguucugcggcaccagcggcaccuacggcaccggcagcuggcccgacggcgccgacaucaaccugaugcccaucuga

SEQ ID NO: 175874 - RNA, 1410 nt, Artificial Sequence; identical to SEQ ID NO: 174163
  derived and/or modified CDS sequence (opt4) from neuraminidase__InfluenzaA__ABP49506

SEQ ID NO: 175875 - RNA, 1410 nt, Artificial Sequence; identical to SEQ ID NO: 174155
  derived and/or modified CDS sequence (opt4) from neuraminidase__InfluenzaA__ABP49517

SEQ ID NO: 175876 - RNA, 1413 nt, Artificial Sequence
  derived and/or modified CDS sequence (opt4) from neuraminidase__InfluenzaA__ABQ01314
augaaccccaaccagaagaucaucaccaucggcagcaucugcauggccaucggcaccaucagccugauccugcagaucggcaacaucaucagcaucugggugagccacagcauccagaccggcagccagaaccacaccggcaucugcaaccagagaaucaucaccuacgagaacaacaccugggugaaccagaccuacgugaacaucagcaacaccaacgugguggccggcaaggacaccaccagcaugauccuggccggcaacagcagccugugccccaucagaggcugggccaucuacagcaaggacaacagcaucagaaucggcagcaagggcgacguguucgugaucagagagcccuucaucagcugcagccaccuggagugcagaaccuucuuccugacccagggcgcccugcugaacgacaagcacagcaacggcaccgugaaggacagaagccccuacagagcccugaugagcugccccaucggcgaggcccccagccccuacaacagcagauucgagagcguggccuggagcgccagcgccugccacgacggcaugggcuggcugaccaucggcaucagcggccccgacgacggcgccguggccgugcugaaguacaacggcaucaucaccgagaucaucaagagcuggagaaagcagauccugagaacccaggagagcgagugcgugugcgugaacggcagcugcuucaccaucaugaccgacggccccagcgacggccccgccagcuacagaaucuucaagaucgagaagggcaagaucaccaagagcaucgagcuggacgcccccaacagccacuacgaggagugcagcugcuaccccgacaccggcaaggugaugugcgugugcagagacaacuggcacggcagcaacagacccugggugagcuucaaccagaaccuggacuaccagaucggcuacaucugcagcggcguguucggcgacaaccccagacccaaggacggcaagggcagcugcgaccccgugaacguggacggcgccgacggcgugaagggcuucagcuacagauacggcaacggcguguggaucggcagaaccaagagcaacagcagcagaaagggcuucgagaugaucugggaccccaacggcuggaccgacaccgacggcaacuuccuggugaagcaggacgugguggccaugaccgacuggagcggcuacagcggcagcuucgugcagcaccccgagcugaccggccuggacugcaugagacccugcuucuggguggagcugaucagaggcagacccagagagaagaccaccaucuggaccagcggcagcagcaucagcuucugcggcgugaacagcgacaccgugaacuggagcuggcccgacggcgccgagcugcccuucaccaucgacaaguga

SEQ ID NO: 175877 - RNA, 1413 nt, Artificial Sequence
  derived and/or modified CDS sequence (opt4) from neuraminidase__InfluenzaA__ABQ01325
augaaccccaaccagaagaucaucaccaucggcagcaucugcauggccaucggcaucaucagccugauccugcagaucggcaacaucaucagcaucugggugagccacagcauccagaccggcagccagaaccacaccggcaucugcaaccagagaaucaucaccuacgagaacagcaccugggugaaccagaccuacgugaacaucagcaacaccaacgugguggccggcaaggacaccaccagcaugacccuggccggcaacagcagccugugccccaucagaggcugggccaucuacagcaaggacaacagcaucagaaucggcagcaagggcgacguguucgugaucagagagcccuucaucagcugcagccaccuggagugcagaaccuucuuccugacccagggcgcccugcugaacgacaagcacagcaacggcaccgugaaggacagaagccccuacagagcccugaugagcugccccaucggcgaggcccccagccccuacaacagcagauucgagagcguggccuggagcgccagcgccugccacgacggcaugggcuggcugaccaucggcaucagcggccccgacgacggcgccguggccgugcugaaguacaacggcaucaucaccgagaccaucaagagcuggagaaagcagauccugagaacccaggagagcgagugcgugugcgugaacggcagcugcuucaccaucaugaccgacggccccagcgacggccaggccagcuacagaaucuucaagaucgagaagggcaagaucaccaagagcaucgagcuggacgcccccaacagccacuacgaggagugcagcugcuaccccgacaccggcaccgugaugugcgugugcagagacaacuggcacggcagcaacagacccugggugagcuucaaccagaaccuggacuaccagaucggcuacaucugcagcggcguguucggcgacaaccccagacccaaggacggcaagggcagcugcgaccccgugaacguggacggcgccgacggcgugaagggcuucagcuacagauacggcaacggcguguggaucggcagaaccaagagcaacagcagcagaaagggcuucgagaugaucugggaccccaacggcuggaccgacaccgacagcaacuuccuggugaagcaggacgugguggccaugaccgacuggagcggcuacagcggcagcuucgugcagcaccccgagcugaccggccuggacugcaugagacccugcuucuggguggagcugaucagaggcagacccagagagaagaccaccaucuggaccagcggcagcagcaucagcuucugcggcgugaacagcgacaccgugaacuggagcuggcccgacggcgccgagcugcccuucaccaucgacaaguga

SEQ ID NO: 175878 - RNA, 1410 nt, Artificial Sequence; identical to SEQ ID NO: 174790
  derived and/or modified CDS sequence (opt4) from neuraminidase__InfluenzaA__ABQ01336

SEQ ID NO: 175879 - RNA, 1410 nt, Artificial Sequence; identical to SEQ ID NO: 174790
  derived and/or modified CDS sequence (opt4) from neuraminidase__InfluenzaA__ABQ01347

SEQ ID NO: 175880 - RNA, 1410 nt, Artificial Sequence
  derived and/or modified CDS sequence (opt4) from neuraminidase__InfluenzaA__ABQ01358
augaaccccaaccagaagaucaucaccaucggcagcgugagccugaccaucgccaccgugugcuuccugaugcagaucgccauccuggccaccaccgugacccugcacuucaagcagcacgagugcaacagccccgccagcaaccaggugaugcccugcgagcccaucaucaucgagagaaacaucaccgagaucguguaccugaacaacaccaccaucgagaaggagaucugccccgaggugguggaguacagaaacuggagcaagccccagugccagaucaccggcuucgcccccuucagcaaggacaacagcaucagacugagcgccggcggcgacaucugggugaccagagagcccuacgugagcugcgaccccggcaagugcuaccaguucgcccugggccagggcaccacccuggacaacaagcacagcaacggcaccauccacgacagaaucccccacagaacccugcugaugaacgagcugggcgugcccuuccaccugggcaccaagcaggugugcguggccuggagcagcagcagcugccacgacggcaaggccuggcugcacgugugcgugaccggcgacgacagaaacgccaccgccagcuucaucuacgacggcagacuggaggacagcaucggcagcuggagccagaacauccugagaacccaggagagcgagugcgugugcaucaacggcaccugcaccguggugaugaccgacggcaacgccagcggcagagccgacaccagaauccuguucaucaaggagggcaagaucgugcacaucagcccccugagcggcagcgcccagcacaucgaggagugcagcugcuaccccagauaccccgacgugagaugcaucugcagagacaacuggaagggcagcaacagacccgugcuggacaucagcauggaggacuacagcaucgacagcagcuacgugugcagcggccuggugggcgacacccccagaaacgacgacagcagcagcaacagcaacugcagagaccccaacaacgagagaggcaaccccggcgugaagggcugggccuucgacaacggcgacgacguguggaugggcagaaccaucagcaaggaccugagaagcggcuacgagaccuucaaggugaucggcggcuggagcacccccaacagcaagagccaggugaacagacaggugaucguggacaacaacaacuggagcggcuacagcggcaucuucagcguggagggcaagagcugcaucaacagaugcuucuacguggagcugaucagaggcagaagccaggagaccagagugugguggaccagcaacagcaucgugguguucugcggcaccagcggcaccuacggcaccggcagcuggcccgacggcgccaacaucaacuucaugcccaucuga

SEQ ID NO: 175881 - RNA, 1410 nt, Artificial Sequence
  derived and/or modified CDS sequence (opt4) from neuraminidase__InfluenzaA__ABQ01369
augaaccccaaccagaagaucaucaccaucggcagcgugagccugaccaucgccaccaucugcuucgugaugcagaucgccauccuggugaccaccgugacccugcacuucaagcaguacgagugcgacagccccgccaacaaccaggugaugcccugcgagcccaucaucaucgagagaaacaucaccgagaucguguaccugaccaacaccaccaucgagaaggagaucugccccaagcugguggaguacagaaacuggagcaagccccagugcaagaucaccggcuucgcccccuucagcaaggacaacagcaucagacugagcgccggcggcgacaucugggugaccagagagcccuacgugagcugcgaccccggcaagugcuaccaguucgcccugggccagggcaccacccuggacaacaagcacagcaacgacaccauccacgacagaaccccccacagaacccugcugaugaacgagcugggcgugcccuuccaccugggcaccagacaggugugcaucgccuggagcagcagcagcugccacgacggcaaggccuggcugcacgugugcgugaccggcuacgacaagaacgccaccgccagcuucaucuacgacggcagacugguggacagcaucggcagcuggagccagaacauccugagaacccaggagagcgagugcgugugcaucaacggcaccugcaccguggugaugaccgacggcagcgccagcggcagagccgacaccaagauccuguucaucgaggagggcaagaucgugcacaccagcccccugagcggcagcgcccagcacguggaggagugcagcugcuaccccagauaccccggcgugagaugcaucugcagagacaacuggaagggcagcaacagacccgugguggacaucaacgugaaggacuacagcaucgacagcagcuacgugugcagcggccuggugggcgacacccccagaaagaacgacagaagcagcagcagcuacugcagaaaccccaacaacgagaagggcacccacggcgugaagggcugggccuucgacgacggcaacgacguguggaugggcagaaccaucagcgaggacagcagaagcggcuacgagaccuucaaggugaucggcggcuggagcacccccaacagcaagcugcagaucaacagacaggugaucguggacagcgacaacagaagcggcuacagcggcaucuucagcguggagggcaagagcugcaucaacagaugcuucuacguggagcugaucagaggcagagagcaggagaccagagugugguggaccagcaacagcaucgugguguucugcggcaccagcggcaccuacggcaccggcagcuggcccgacggcgccgacaucaaccugaugcccaucuga

SEQ ID NO: 175882 - RNA, 1410 nt, Artificial Sequence
  derived and/or modified CDS sequence (opt4) from neuraminidase__InfluenzaA__ABQ44386
augaaccccaaccagaagaucaucaccaucggcagcgugagccugaccaucgccaccaucugcuuccugaugcagaucgccauccuggugaccaccgugacccugcacuucaagcaguacgagugcaacagcccccccaacaaccaggugaugcugugcgagcccaccaucaucgagagaaacaucaccgagaucguguaccugaccaacaccaccaucgagaaggagaucugccccaagcuggccgaguacagaaacuggagcaagccccagugcaacaucaccggcuucgcccccuucagcaaggacaacagcaucagacugagcgccggcggcgacaucugggugaccagagagcccuacgugagcugcgaccccgacaagugcuaccaguucgcccugggccagggcaccacccugaacaacggccacagcaacgacaccgugcacgacagaacccccuacagaacccugcugaugaacgagcugggcgugcccuuccaccugggcaccaagcaggugugcaucgccuggagcagcagcagcugccacgacggcaaggccuggcugcacgugugcgugaccggcgacgacgagaacgccaccgccagcuucaucuacaacggcagacugguggacagcaucggcagcuggagcaagaagauccugagaacccaggagagcgagugcgugugcaucaacggcaccugcaccguggugaugaccgacggcagcgccagcggcaaggccgacaccaagauccuguucaucgaggagggcaagaucgugcacaccagcagccugagcggcagcgcccagcacguggaggagugcagcugcuaccccagauaccccggcgugagaugcgugugcagagacaacuggaagggcagcaacagacccaucguggacaucaacgugaaggacuacagcaucgugagcagcuacgugugcagcggccuggugggcgacacccccagaaagaacgacagcagcagcagcagccacugccuggaccccaacaacgaggagggcggccacggcgugaagggcugggccuucgacgacggcaacgacguguggaugggcagaaccaucagcgagaagcugagaagcggcuacgagaccuucaaggugaucgagggcuggagcaagcccaacagcaagcugcagaucaacagacaggugaucguggacagaggcaacagaagcggcuacagcggcaucuucagcguggagagcaagagcugcaucaacagaugcuucuacguggagcugaucagaggcagaaagcaggagaacgaggugcuguggaccagcaacagcaucgugguguucugcggcaccagcggcaccuacggcaccggcagcuggcccgacggcgccgacaucaaccugaugcccaucuga

SEQ ID NO: 175883 - RNA, 1410 nt, Artificial Sequence; identical to SEQ ID NO: 174774
  derived and/or modified CDS sequence (opt4) from neuraminidase__InfluenzaA__ABQ44408

SEQ ID NO: 175884 - RNA, 1413 nt, Artificial Sequence
  derived and/or modified CDS sequence (opt4) from neuraminidase__InfluenzaA__ABQ44419
augaaccccaaccagaagaucaucaccaucggcagcaucugcauggccaucggcaucaucagccugauccugcagaucggcaacaucgugagcaucuggaucagccacagcauccagaacggcagccagaacuacaccggcaucugcaaccagagaaucaucaccuacgagaacagcaccugggugaaccagaccuacgugaacaucaacaacaccaacgugguggccggccaggacaccaccagcguggcccuggccggcaacagcagccugugccccaucagcggcugggccaucuacagcaaggacaacagcaucagaaucggcagcaagggcgacguguucgugaucagagagcccuucaucagcugcagccaccuggagugcagaaccuucuuccugacccagggcgcccugcugaacgacaagcacagcaacggcaccgugaaggacagaagccccuacagagcccugaugagcugccccaucggcgaggcccccagccccuacaacagcagauucgagagcguggccuggagcgccagcgccugccacgacggcaugggcuggcugaccaucggcaucagcggccccgacgacggcgccguggccgugcugaaguacaacggcaucaucaccgagaccaucaagagcuggagaaagagaauccugagaacccaggagagcgagugcgugugcgugaacggcagcugcuucaccaucaugaccgacggccccaacaacggccccgccagcuacaagaucuucaagaucgagaagggcaagaucaccaagagcaucgagcuggacgcccccaacagccacuacgaggagugcagcugcuaccccgacgccggcaccgugaugugcgugugcagagacaacuggcacggcagcaacagacccugggugagcuucaaccagaaccuggacuaccagaucggcuacaucugcagcggcguguucggcgacaaccccagacccaaggacggcaagggcagcugcggccccgugaccguggacggcgccgacggcgugaagggcuucagcuacagauacggcaacggcguguggaucggcagaaccaagagcaacagcagcagaagaggcuucgagaugaucugggaccccaacggcuggaccgacaccgacagcaaguuccuggugaagcaggacgugguggccaugaccgacuggagcggcuacagcggcagcuucgugcagcaccccgagcugaccggccuggacugcaugagacccugcuucuggguggagcugaucagaggcagacccagagagaacaccaccaucuggaccagcggcagcagcaucagcuucugcggcgugaacggcgacaccgccaacuggagcuggcccgacggcgccgagcugcccuucaccaucgacaaguga

SEQ ID NO: 175885 - RNA, 1410 nt, Artificial Sequence; identical to SEQ ID NO: 174406
  derived and/or modified CDS sequence (opt4) from neuraminidase__InfluenzaA__ABQ44430

SEQ ID NO: 175886 - RNA, 1410 nt, Artificial Sequence; identical to SEQ ID NO: 175836
  derived and/or modified CDS sequence (opt4) from neuraminidase__InfluenzaA__ABQ44441

SEQ ID NO: 175887 - RNA, 1410 nt, Artificial Sequence; identical to SEQ ID NO: 175820
  derived and/or modified CDS sequence (opt4) from neuraminidase__InfluenzaA__ABQ44463

SEQ ID NO: 175888 - RNA, 1413 nt, Artificial Sequence
  derived and/or modified CDS sequence (opt4) from neuraminidase__InfluenzaA__ABQ44474
augaaccccaaccagaagaucaucaccaucggcagcaucugcaugaccaucggcaccaucagccugauccugcagaucggcaacaucaucagcaucugggugagccacagcauccagaccggcagccagaaccacaccggcaucugcaaccagagaaucaucaccuacgagaacaacaccugggugaaccagaccuacgugaacaucagcaacaccaacgugguggccggcaaggacaccaccagcaugauccuggccggcaacagcagccugugccccaucagaggcugggccaucuacagcaaggacaacagcaucagaaucggcagcaagggcgacguguucgugaucagagagcccuucaucagcugcagccaccuggagugcagaaccuucuuccugacccagggcgcccugcugaacgacaagcacagcaacggcaccgugaaggacagaagccccuacagagcccugaugagcugccccaucggcgaggcccccagccccuacaacagcagauucgagagcguggccuggagcgccagcgccugccacgacggcaugggcuggcugaccaucggcaucagcggccccgacgacggcgccguggccgugcugaaguacaacggcaucaucaccgagaucaucaagagcuggagaaagcagauccugagaacccaggagagcgagugcgugugcgugaacggcagcugcuucaccaucaugaccgacggccccagcgacggccccgccagcuacagaaucuucaagaucgagaagggcaagaucaccaagagcaucgagcuggacgcccccaacagccacuacgaggagugcagcugcuaccccgacaccggcaaggugaugugcgugugcagagacaacuggcacggcagcaacagacccugggugagcuucaaccagaaccuggacuaccagaucggcuacaucugcagcggcguguucggcgacaaccccagacccaaggacggcaagggcagcugcgaccccgugaacguggacggcgccgacggcgugaagggcuucagcuacagauacggcaacggcguguggaucggcagaaccaagagcaacagcagcagaaagggcuucgagaugaucugggaccccaacggcuggaccgacaccgacggcaacuuccuggugaagcaggacgugguggccaugaccgacuggagcggcuacagcggcagcuucgugcagcaccccgagcugaccggccuggacugcaugagacccugcuucuggguggagcugaucagaggcagacccagagagaagaccaccaucuggaccagcggcagcagcaucagcuucugcggcgugaacagcgacaccgugaacuggagcuggcccgacggcgccgagcugcccuucaccaucgacaaguga

SEQ ID NO: 175889 - RNA, 1410 nt, Artificial Sequence; identical to SEQ ID NO: 174155
  derived and/or modified CDS sequence (opt4) from neuraminidase__InfluenzaA__ABR15800

SEQ ID NO: 175890 - RNA, 1413 nt, Artificial Sequence; identical to SEQ ID NO: 175876
  derived and/or modified CDS sequence (opt4) from neuraminidase__InfluenzaA__ABR15811

SEQ ID NO: 175891 - RNA, 1413 nt, Artificial Sequence; identical to SEQ ID NO: 174888
  derived and/or modified CDS sequence (opt4) from neuraminidase__InfluenzaA__ABR15910

SEQ ID NO: 175892 - RNA, 1410 nt, Artificial Sequence; identical to SEQ ID NO: 174214
  derived and/or modified CDS sequence (opt4) from neuraminidase__InfluenzaA__ABR15932

SEQ ID NO: 175893 - RNA, 1410 nt, Artificial Sequence
  derived and/or modified CDS sequence (opt4) from neuraminidase__InfluenzaA__ABR15943
augaaccccaaccagaagaucaucaccaucggcagcgugagccugaccaucgccaccaucugcuuccugaugcagaucgccauccuggugaccaccgugacccugcacuucagacaguacgagugcaacagcccccccaacaaccaggugaugcugugcgagcccaccaucaucgagagaaacaucaccgagaucguguaccugaccaacaccaccaucgagaaggagaucugccccaagcuggccgaguacagaaacuggagcaagccccagugcaacaucaccggcuucgcccccuucagcaaggacaacagcaucagacugagcgccggcggcgacaucugggugaccagagagcccuacgugagcugcgaccccgacaagugcuaccaguucgcccugggccagggcaccacccugaacaacggccacagcaacgacaccgugcacgacagaacccccuacagaacccugcugaugaacgagcugggcgugcccuuccaccugggcaccagacaggugugcaucgccuggagcagcagcagcugccacgacggcaaggccuggcugcacgugugcgugaccggcgacgacgagaacgccaccgccagcuucaucuacaacggcagacugguggacagcaucggcagcuggagcaagaagauccugagaacccaggagagcgagugcgugugcaucaacggcaccugcaccguggugaugaccgacggcagcgccagcggcaaggccgacaccaagauccuguucaucgaggagggcaagaucgugcacaucagcacccugagcggcagcgcccagcacguggaggagugcagcugcuaccccagauaccccggcgugagaugcgugugcagagacaacuggaagggcagcaacagacccaucguggacaucaacgugaaggacuacagcaucgugagcagcuacgugugcagcggccuggugggcgacacccccagaaagaacgacagcuucagcagcagccacugccuggaccccaacaacgaggagggcggccacggcgugaagggcugggccuucgacgacggcaacgacguguggaugggcagaaccaucagcgagaagcugagaagcggcuacgagaccuucaaggugaucgagggcuggagcaagcccaacagcaagcugcagaccaacagacaggugaucguggagagaggcaacagaagcggcuacagcggcaucuucagcguggagggcaagagcugcaucaacagaugcuucuacguggagcugaucagaggcagaaaggaggagaccgaggugugguggaccagcaacagcaucgugguguucugcggcaccagcggcaccuacggcaccggcagcuggcccgacggcgccgacaucaaccugaugcccaucuga

SEQ ID NO: 175894 - RNA, 1410 nt, Artificial Sequence
  derived and/or modified CDS sequence (opt4) from neuraminidase__InfluenzaA__ABR15954
augaaccccaaccagaagaucaucaccaucggcagcgugagccugaccaucgccaccaucugcuuccugaugcagaucgccauccuggugaccaccgugacccugcacuucaagcaguacgagugcaacagcccccccaacaaccaggugaugcugugcgagcccaccaucaucgagagaaacaucaccgagaucguguaccugaccaacaccaccaucgagaaggagaucugccccaagcuggccgaguacagaaacuggagcaagccccagugcaacaucaccggcuucgcccccuucagcaaggacaacagcaucagacugagcgccggcggcgacaucugggugaccagagagcccuacgugagcugcgaccccgacaagugcuaccaguucgcccugggccagggcaccacccugaacaacggccacagcaacgacaccgugcacgacagaacccccuacagaacccugcugaugaacgagcugggcgugcccuuccaccugggcaccagacaggugugcaucgccuggagcagcagcagcugccacgacggcaaggccuggcugcacgugugcgugaccggcgacgacgagaacgccaccgccagcuucaucuacaacggcagacugguggacagcaucggcagcuggagcaagaagauccugagaacccaggagagcgagugcgugugcaucaacggcaccugcaccguggugaugaccgacggcagcgccagcggcaaggccgacaccaagauccuguucaucgaggagggcaagaucgugcacaucagcacccugagcggcagcgcccagcacguggaggagugcagcugcuaccccagauaccccggcgugagaugcgugugcagagacaacuggaagggcagcaacagacccaucguggacaucaacgugaaggacuacagcaucgugagcagcuacgugugcagcggccuggugggcgacacccccagaaagaacaacagcuucagcagcagccacugccuggaccccaacaacgaggagggcggccacggcgugaagggcugggccuucgacgacggcaacgacguguggaugggcagaaccaucagcgagaagcugagaagcggcuacgagaccuucaaggugaucgagggcuggagcaagcccaacagcaagcugcagaccaacagacaggugaucguggagagaggcaacagaagcggcuacagcggcaucuucagcguggagggcaagagcugcaucaacagaugcuucuacguggagcugaucagaggcagaaaggaggagaccgaggugugguggaccagcaacagcaucgugguguucugcggcaccagcggcaccuacggcaccggcagcuggcccgacggcgccgacaucaaccugaugcccaucuga

SEQ ID NO: 175895 - RNA, 1410 nt, Artificial Sequence; identical to SEQ ID NO: 174214
  derived and/or modified CDS sequence (opt4) from neuraminidase__InfluenzaA__ABR15965

SEQ ID NO: 175896 - RNA, 1410 nt, Artificial Sequence
  derived and/or modified CDS sequence (opt4) from neuraminidase__InfluenzaA__ABR22243
augaaccccaaccagaagaucaucaccaucggcagcgugagccugaccaucgccaccaucugcuuccugaugcagaucgccauccuggugaccaccgugacccugcacuucaagcaguacgagugcaacagcccccccaacaaccaggugaugcugugcgagcccaccaucaucgagagaaacaucaccgagaucguguaccugaccaacaccaccaucgagaaggagaucugccccaagcuggccgaguacagaaacuggagcaagccccagugcaacaucaccggcuucgcccccuucagcaaggacaacagcaucagacugagcgccggcggcgacaucugggugaccagagagcccuacgugagcugcgaccccgacaagugcuaccaguucgcccugggccagggcaccacccugaacaacggccacagcaacgacaccgugcacgacagaacccccuacagaacccugcugaugaacgagcugggcgugcccuuccaccugggcaccaagcaggugugcaucgccuggagcagcagcagcugccacgacggcaaggccuggcugcacgugugcgugaccggcgacgacgagaacgccaccgccagcuucaucuacaacggcagacugguggacagcaucggcagcuggagcaagaagauccugagaacccaggagagcgagugcgugugcaucaacggcaccugcaccguggugaugaccgacggcagcgccagcggcaaggccgacaccaagauccuguucaucgaggagggcaagaucgugcacaccagcccccugagcggcagcgcccagcacguggaggagugcagcugcuaccccagauaccccggcgugagaugcgugugcagagacaacuggaagggcagcaacagacccaucguggacaucaacgugaaggacuacagcaucgugagcagcuacgugugcagcggccuggugggcgacacccccagaaagaccgacagcagcagcagcagccacugccuggaccccaacaacgaggagggcggccacggcgugaagggcugggccuucgacgacggcaacgacguguggaugggcagaaccaucagcgagaagagcagaagcggcuacgagaccuucaaggugaucgagggcuggagcaagcccaacagcaagcugcagaucaacagacaggugaucguggacagaggcaacagaagcggcuacagcggcaucuucagcguggagggcaagagcugcaucaacagaugcuucuacguggagcugaucagaggcagaaagcaggagaccgaggugcuguggaccagcaacagcaucgugguguucugcggcaccagcggcaccuacggcaccggcagcuggcccgacggcgccgaccugaaccugaugcccaucuga

SEQ ID NO: 175897 - RNA, 1410 nt, Artificial Sequence; identical to SEQ ID NO: 174790
  derived and/or modified CDS sequence (opt4) from neuraminidase__InfluenzaA__ABR28518

SEQ ID NO: 175898 - RNA, 1410 nt, Artificial Sequence; identical to SEQ ID NO: 174636
  derived and/or modified CDS sequence (opt4) from neuraminidase__InfluenzaA__ABR28595

SEQ ID NO: 175899 - RNA, 1413 nt, Artificial Sequence
  derived and/or modified CDS sequence (opt4) from neuraminidase__InfluenzaA__ABR28771
augaaccccaaccagaagaucaucaccaucggcagcaucagcaucgccaucggcaucaucagccugaugcugcagaucggcaacaucaucagcaucugggccagccacagcauccagaccggcagccagaaccacaccggcaucugcaaccagagaaucaucaccuacgagaacagcaccugggugaaccacaccuacgugaacaucaacaacaccaacgugguggccggcaaggacaagaccagcgugacccuggccggcaacagcagccugugcagcaucagcggcugggccaucuacaccaaggacaacagcaucagaaucggcagcaagggcgacguguucgugaucagagagcccuucaucagcugcagccaccuggagugcagaaccuucuuccugacccagggcgcccugcugaacgacaagcacagcaacggcaccgugaaggacagaagccccuacagagcccugaugagcugcccccugggcgaggcccccagccccuacaacagcaaguucgagagcguggccuggagcgccagcgccugccacgacggcaugggcuggcugaccaucggcaucagcggccccgacaacggcgccguggccgugcugaaguacaacggcaucaucaccgagaccaucaagagcuggaagaagagaauccugagaacccaggagagcgagugcgugugcgugaacggcagcugcuucaccaucaugaccgacggccccagcaacggcgccgccagcuacaagaucuucaagaucgagaagggcaaggugaccaagagcagagagcugaacgcccccaacuuccacuacgaggagugcagcugcuaccccgacaccggcaccgugaugugcgugugcagagacaacuggcacggcagcaacagacccugggugagcuucaaccagaaccuggacuaccagaucggcuacaucugcagcggcguguucggcgacaaccccagacccaaggacggcgagggcagcugcaaccccgugaccguggacggcgccgacggcgugaagggcuucagcuacaaguacggcaacggcguguggaucggcagaaccaagagcaacagacugagaaagggcuucgagaugaucugggaccccaacggcuggaccgacaccgacagcaacuucagcgugaagcaggacgugguggccaucaccgacuggagcggcuacagcggcagcuucgugcagcaccccgagcugaccggccuggacugcaucagacccugcuucuggguggagcuggugagaggccugcccagagagaacaccaccaucuggaccagcggcagcagcaucagcuucugcggcgugaacagcgacaccgccaacuggagcuggcccgacggcgccgagcugcccuucaccaucgacaaguga

SEQ ID NO: 175900 - RNA, 1413 nt, Artificial Sequence
  derived and/or modified CDS sequence (opt4) from neuraminidase__InfluenzaA__ABR28782
augaaccccaaccagaagaucaucaccaucggcagcaucagcaucgccaucggcauccugagccugaugcugcagaucggcaacaucaucagcaucugggccagccacagcauccagaccggcagccagaaccacaccggcaucugcaaccagagaaucaucaccuacgagaacagcaccugggugaaccacaccuacgugaacaucaacaacaccaacgugguggccggcaaggacaagaccagcgugacccuggccggcaacagcagccugugcagcaucagcggcugggccaucuacaccaaggacaacagcaucagaaucggcagcaagggcgacguguucgugaucagagagcccuucaucagcugcagccaccuggagugcagaaccuucuuccugacccagggcgcccugcugaacgacaagcacagcaacggcaccgugaaggacagaagccccuacagagcccugaugagcugcccccugggcgaggcccccagccccuacaacagcaaguucgagagcguggccuggagcgccagcgccugccacgacggcaugggcuggcugaccaucggcaucagcggccccgacaacggcgccguggccgugcugaaguacaacggcaucaucaccgagaccaucaagagcuggaagaagagaauccugagaacccaggagagcgagugcgugugcgugaacggcagcugcuucaccaucaugaccgacggccccagcaacggcgccgccagcuacaagaucuucaagaucgagaagggcaaggugaccaagagcaucgagcugaacgcccccaacuuccacuacgaggagugcagcugcuaccccgacaccggcaccgugaugugcgugugcagagacaacuggcacggcagcaacagacccugggugagcuucaaccagaaccuggacuaccagaucggcuacaucugcagcggcguguucggcgacaaccccagacccaaggacggcgagggcagcugcaaccccgugaccguggacggcgccgacggcgugaagggcuucagcuacaaguacggcaacggcguguggaucggcagaaccaagagcaacagacugagaaagggcuucgagaugaucugggaccccaacggcuggaccgacaccgacagcaacuucagcgugaagcaggacgugguggccaucaccgacuggagcggcuacagcggcagcuucgugcagcaccccgagcugaccggccuggacugcaucagacccugcuucuggguggagcuggugagaggccugcccagagagaacaccaccaucuggaccagcggcagcagcaucagcuucugcggcgugaacagcgacaccgccaacuggagcuggcccgacggcgccgagcugcccuucaccaucgacaaguga

SEQ ID NO: 175901 - RNA, 1410 nt, Artificial Sequence; identical to SEQ ID NO: 174904
  derived and/or modified CDS sequence (opt4) from neuraminidase__InfluenzaA__ABR28793

SEQ ID NO: 175902 - RNA, 1413 nt, Artificial Sequence; identical to SEQ ID NO: 174888
  derived and/or modified CDS sequence (opt4) from neuraminidase__InfluenzaA__ABR28804

SEQ ID NO: 175903 - RNA, 1410 nt, Artificial Sequence; identical to SEQ ID NO: 174790
  derived and/or modified CDS sequence (opt4) from neuraminidase__InfluenzaA__ABR28815

SEQ ID NO: 175904 - RNA, 1410 nt, Artificial Sequence; identical to SEQ ID NO: 174214
  derived and/or modified CDS sequence (opt4) from neuraminidase__InfluenzaA__ABR28826

SEQ ID NO: 175905 - RNA, 1413 nt, Artificial Sequence; identical to SEQ ID NO: 174456
  derived and/or modified CDS sequence (opt4) from neuraminidase__InfluenzaA__ABR28837

SEQ ID NO: 175906 - RNA, 1413 nt, Artificial Sequence
  derived and/or modified CDS sequence (opt4) from neuraminidase__InfluenzaA__ABR28848
augaaccccaaccagaagaucaucaccaucggcagcaucagcaucgccaucggcaucaucagccugaugcugcagaucggcaacaucaucagcaucugggccagccacagcauccagaccggcagccagaaccacaccggcgugugcaaccagagaaucaucaccuacgagaacagcaccugggugaaccacaccuacgugaacaucaacaacaccaacgugaucgugggcaaggacaagaccagcgugacccuggccggcaacagcagccugugcagcaucagcggcugggccaucuacaccaaggacaacagcaucagaaucggcagcaagggcgacguguucgugaucagagagcccuucaucagcugcagccaccuggagugcagaaccuucuuccugacccagggcgcccugcugaacgacaagcacagcaacggcaccgugaaggacagaagccccuacagagcccugaugagcugcccccugggcgaggcccccagccccuacaacagcaaguucgagagcguggccuggagcgccagcgccugccacgacggcaugggcuggcugaccaucggcaucagcggccccgacaacggcgccguggccgugcugaaguacaacggcaucaucaccgagaccaucaagagcuggaagaagcagauccugagaacccaggagagcgagugcgugugcgugaacggcagcugcuucaccaucaugaccgacggccccagcaacggcgccgccagcuacaagaucuucaagaucgagaagggcaagaucaccaagagcaucgagcugaacgcccccaacuuccacuacgaggagugcagcugcuaccccgacaccggcaccgugaugugcgugugcagagacaacuggcacggcagcaacagacccugggugagcuucaaccagaaccuggacuaccagaucggcuacaucugcagcggcguguucggcgacaaccccagacccaaggacggcgagggcagcugcaaccccgugaccguggacggcgccaacggcgugaagggcuucagcuacaaguacggcaacggcguguggaucggcagaaccaagagcaacagacugagaaagggcuucgagauggugugggaccccaacggcuggaccgacaccgacagcgacuucagcgugaagcaggacgugguggccaucaccgacuggagcggcuacagcggcagcuucgugcagcaccccgagcugaccggccugaacugcaucagacccugcuucuggguggagcuggugagaggccugcccaaggagaacaccaccaucuggaccagcggcagcagcaucagcuucugcggcgugaacagcgacaccgccaacuggagcuggcccgacggcgccgagcugcccuucaccaucgacaaguga

SEQ ID NO: 175907 - RNA, 1410 nt, Artificial Sequence
  derived and/or modified CDS sequence (opt4) from neuraminidase__InfluenzaA__ABR28859
augaaccccaaccagaagaucaucaccaucggcagcgugagccugaccaucgccaccaucugcuuccugaugcagaucgccauccuggugaccaccgugacccugcacuucaagcaguacgagugcaacagcccccccaacaaccaggugaugcugugcgagcccaccaucaucgagagaaacaucaccgagaucguguaccugaccaacaccaccaucgagaaggagaucugccccaagcuggccgaguacagaaacuggagcaagccccagugcaacaucaccggcuucgcccccuucagcaaggacaacagcaucagacugagcgccggcggcgacaucugggugaccagagagcccuacgugagcugcgaccccgacaagugcuaccaguucgcccugggccagggcaccacccugaacaacggccacagcaacgacaccgugcacggcagaacccccuacagaacccugcugaugaacgagcugggcgugcccuuccaccugggcaccagacaggugugcaucgccuggagcagcagcagcugccacgacggcaaggccuggcugcacgugugcgugaccggcgacgacgagaacgccaccgccagcuucaucuacaacggcagacugguggacagcaucggcagcuggagcaagaagauccugagaacccaggagagcgagugcgugugcaucaacggcaccugcaccguggugaugaccgacggcagcgccagcggcaaggccgacaccaagauccuguucaucgaggagggcaagaucgugcacaucagcacccugagcggcagcgcccagcacguggaggagugcagcugcuaccccagauaccccggcgugagaugcgugugcagagacaacuggaagggcagcaacagacccaucguggacaucaacgugaaggacuacagcaucgugagcagcuacgugugcagcggccuggugggcgacacccccagaaagaacgacagcuucagcagcagccacugccuggaccccaacaacgaggagggcggccacggcgugaagggcugggccuucgacgacggcaacgacguguggaugggcagaaccaucagcgagaagcugagaagcggcuacgagaccuucaaggugaucgagggcuggagcaagcccaacagcaagcugcagaucaacagacaggugaucguggagagaggcaacagaagcggcuacagcggcaucuucagcguggagggcaagagcugcaucaacagaugcuucuacguggagcugaucagaggcagaaaggaggagaccgaggugugguggaccagcaacagcaucgugguguucugcggcaccagcggcaccuacggcaccggcagcuggcccgacggcgccgacaucaaccugaugcccaucuga

SEQ ID NO: 175908 - RNA, 1410 nt, Artificial Sequence
  derived and/or modified CDS sequence (opt4) from neuraminidase__InfluenzaA__ABR28870
augaaccccaaccagaagaucaucaccaucggcagcgugagccugaccaucgccaccaucugcuuccugaugcagaucgccauccuggugaccaccgugacccugcacuucaagcaguacgagugcaacagcccccccaacaaccaggugaugcugugcgagcccaccaucaucgagagaaacaucaccgagaccguguaccugaccaacaccaccaucgagaaggagaucugccccaagcuggccgaguacagaaacuggagcaagccccagugcaacaucaccggcuucgcccccuucagcaaggacaacagcaucagacugagcgccggcggcgacaucugggugaccagagagcccuacgugagcugcgaccccgacaagugcuaccaguucgcccugggccagggcaccacccugaacaacggccacagcaacgacaccgugcacgacagaacccccuacagaacccugcugaugaacgagcugggcgugcccuuccaccugggcaccagacaggugugcaucgccuggagcagcagcagcugccacgacggcaaggccuggcugcacgugugcgugaccggcgacgacgagaacgccaccgccagcuucaucuacaacggcagacugguggacagcaucggcagcuggagcaagaagauccugagaacccaggagagcgagugcgugugcaucaacggcaccugcaccguggugaugaccgacggcagcgccagcggcaaggccgacaccaagauccuguucaucgaggagggcaagaucgugcacaucagcacccugagcggcagcgcccagcacguggaggagugcagcugcuaccccagauaccccggcgugagaugcgugugcagagacaacuggaagggcagcaacagacccaucguggacaucaacgugaaggacuacagcaucgugagcagcuacgugugcagcggccuggugggcgacacccccagaaagaacgacagcuucagcagcagccacugccuggaccccaacaacgaggagggcggccacggcgugaagggcugggccuucgacgacggcaacgacguguggaugggcagaaccaucagcgagaagcugagaagcggcuacgagaccuucaaggugaucgagggcuggagcaagcccaacagcaagcugcagaucaacagacaggugaucguggagagaggcaacagaagcggcuacagcggcaucuucagcguggagggcaagagcugcaucaacagaugcuucuacguggagcugaucagaggcagaaaggaggagaccgaggugugguggaccagcaacagcaucgugguguucugcggcaccagcggcaccuacggcaccggcagcuggcccgacggcgccgacaucaaccugaugcccaucuga

SEQ ID NO: 175909 - RNA, 1410 nt, Artificial Sequence
  derived and/or modified CDS sequence (opt4) from neuraminidase__InfluenzaA__ABR28881
augaaccccaaccagaagaucaucaccaucggcagcgugagccugaccaucgccaccgugugcuuccugaugcagaucgccauccuggugaccaccgugacccugcacuucaagcaguacgagugcaacagcccccccaacaaccaggugaugcugugcgagcccaccaucaucgagagaaacaucaccgagaucguguaccugaccaacaccaccaucgagaaggagaucugccccaagcuggccgaguacagaaacuggagcaagccccagugcaacaucaccggcuucgcccccuucagcaaggacaacagcaucagacugagcgccggcggcgacaucugggugaccagagagcccuacgugagcugcgaccccgacaagugcuaccaguucgcccugggccagggcaccacccugaacaacggccacagcaacgacaccgugcacgacagaacccccuacagaacccugcugaugaacgagcugggcgugcccuuccaccugggcaccagacaggugugcaucgccuggagcagcagcagcugccacgacggcaaggccuggcugcacgugugcgugaccggcgacgacgagaacgccaccgccagcuucaucuacaacggcagacugguggacagcaucggcagcuggagcaagaagauccugagaacccaggagagcgagugcgugugcaucaacggcaccugcaccguggugaugaccgacggcagcgccagcggcaaggccgacaccaagauccuguucaucgaggagggcaagaucgugcacaucagcacccugagcggcagcgcccagcacguggaggagugcagcugcuaccccagauaccccggcgugagaugcgugugcagagacaacuggaagggcagcaacagacccaucguggacaucaacgugaaggacuacagcaucgugagcagcuacgugugcagcggccuggugggcgacacccccagaaagaacgacagcuucagcagcagccacugccuggaccccaacaacgaggagggcggccacggcgugaagggcugggccuucgacgacggcaacgacguguggaugggcagaaccaucagcgagaagcugagaagcggcuacgagaccuucaaggugaucgagggcuggagcaagcccaacagcaagcugcagaccaacagacaggugaucguggagagaggcaacagaagcggcuacagcggcaucuucagcguggagggcaagagcugcaucaacagaugcuucuacguggagcugaucagaggcagaaaggaggagaccgaggugugguggaccagcaacagcaucgugguguucugcggcaccagcggcaccuacggcaccggcagcuggcccgacggcgccgacaucaaccugaugcccaucuga

SEQ ID NO: 175910 - RNA, 1410 nt, Artificial Sequence; identical to SEQ ID NO: 174774
  derived and/or modified CDS sequence (opt4) from neuraminidase__InfluenzaA__ABR28892

SEQ ID NO: 175911 - RNA, 1413 nt, Artificial Sequence; identical to SEQ ID NO: 174446
  derived and/or modified CDS sequence (opt4) from neuraminidase__InfluenzaA__ABR28903

SEQ ID NO: 175912 - RNA, 1410 nt, Artificial Sequence
  derived and/or modified CDS sequence (opt4) from neuraminidase__InfluenzaA__ABR28925
augaaccccaaccagaagaucaucaccaucggcagcgugagccugaccaucagcaccaucugcuucuucaugcagaucgccauccugaucaccaccgugacccugcacuucaagcaguacgaguucaacagcccccccaacaaccaggugaugcugugcgagcccaccaucaucgagagaaacaucaccgagaucguguaccugaccaacaccaccaucgagaaggagaucugccccaagcuggccgaguacagaaacuggagcaagccccagugcgacaucaccggcuucgcccccuucagcaaggacaacagcaucagacugagcgccggcggcgacaucugggugaccagagagcccuacgugagcugcgaccccgacaagugcuaccaguucgcccugggccagggcaccacccugaacaacgugcacagcaacgacaccgugcacgacagaacccccuacagaacccugcugaugaacgagcugggcgugcccuuccaccugggcaccaagcaggugugcaucgccuggagcagcagcagcugccacgacggcaaggccuggcugcacgugugcgugaccggcgacgacaagaacgccaccgccagcuucaucuacaacggcagacugguggacagcaucgugagcuggagcaaggaggugcugagaacccaggagagcgagugcgugugcaucaacggcaccugcaccguggugaugaccgacggcagcgccagcggcaaggccgacaccaagauccuguucaucgaggagggcaagaucgugcacaccagcacccugagcggcagcgcccagcacguggaggagugcagcugcuaccccagauaccccggcgugagaugcgugugcagagacaacuggaagggcagcaacagacccaucguggacaucaacaucaaggacuacagcaucgugagcagcuacgugugcagcggccuggugggcgacacccccagaaagaacgacagcagcagcagcagccacugccuggaccccaacaacgaggagggcggccacggcgugaagggcugggccuucgacgacggcaacgacguguggaugggcagaaccaucagcgagaagcugagaagcggcuacgagaccuucaaggugaucgagggcuggagcaaccccaacagcaagcugcagaucaacagacaggugaucguggacagaggcaacagaagcggcuacagcggcaucuucagcguggagggcaagagcugcaucaacagaugcuucuacguggagcugaucagaggcagaaaggaggagaccgaggugcuguggaccagcaacagcaucgugguguucugcggcaccagcggcaccuacggcaccggcagcuggcccgacggcgccgacaucaaccugaugcccaucuga

SEQ ID NO: 175913 - RNA, 1410 nt, Artificial Sequence
  derived and/or modified CDS sequence (opt4) from neuraminidase__InfluenzaA__ABR88082
auggaccccaaccagaagaucaucaccaucggcagcgugagccugaccaucagcaccaucugcuucuucaugcagaccgccauccugaucaccaccgugacccugcacuucaagcaguacgaguucaacagcccccccaacaaccaggugaugcugugcgagcccaccaucaucgagagaaacaucaccgagaucguguaccugaccaacaccaucaucgagaaggagaucugccccaagcuggccgaguacagaaacuggagcaagccccagugcgacaucaccggcuucgcccccuucagcaaggacaacagcaucagacugagcgccggcggcgacaucugggugaccagagagcccuacgugagcugcgaccccgacaagugcuaccaguucgcccugggccagggcaccacccugaacaacgugcacagcaacgacaccgugcacgacagaacccccuacagaacccugcugaugaacgagcugggcgugcccuuccaccugggcaccaagcaggugugcaucgccuggagcagcagcagcugccacgacggcaaggccuggcugcacgugugcgugaccggcgacgacaagaacgccaccgccagcuucaucuacaacggcagacugguggacagcguggugagcuggagcaaggacauccugagaacccaggagagcgagugcgugugcaucaacggcaccugcaccguggugaugaccgacggcagcgccagcggcaaggccgacaccaagauccuguucaucgaggagggcaagaucgugcacaccagcacccugagcggcagcgcccagcacguggaggagugcagcugcuaccccagauaccccggcgugagaugcgugugcagagacaacuggaagggcagcaacagacccaucguggacaucaacaucaagaacuacagcaucgugagcagcuacgugugcagcggccuggugggcgacacccccagaaagaccgacagcagcagcagcagccacugccuggaccccaacaacgaggagggcggccacggcgugaagggcugggccuucgacgacggcaacgacguguggaugggcagaaccaucagcgagaagcugagacugggcuacgagaccuucaaggugaucgagggcuggagcaaccccaacagcaagcugcagaucaacagacaggugaucguggacagaggcaacagaagcggcuacagcggcaucuucagcguggagggcaagagcugcaucaacagaugcuucuacguggagcugaucagaggcagaaaggaggagaccgaggugcuguggaccagcaacagcaucgugguguucugcggcaccagcggcaccuacggcaccggcagcuggcccgacggcgccgacaucaaccugaugcccaucuga

SEQ ID NO: 175914 - RNA, 1413 nt, Artificial Sequence
  derived and/or modified CDS sequence (opt4) from neuraminidase__InfluenzaA__ABS00324
augaaccccaaccagaagaucaucaccaucggcagcaucugcauggccaucggcaucaucagccugauccugcagaucggcaacaucgugagcaucuggaucagccacagcauccagaccggcagccagaacuacaccggcaucugcaaccagagaaucaucaccuacgagaacagcaccugggugaaccagaccuacgugaacaucaacaacaccaacgugguggccggccaggacaccaccagcguggcccuggccggcaacagcagccugugccccaucagcggcugggccaucuacagcaaggacaacagcaucagaaucggcagcaagggcgacguguucgugaucagagagcccuucaucagcugcagccaccuggagugcagaaccuucuuccugacccagggcgcccugcugaacgacaagcacagcaacggcaccgugaaggacagaagccccuacagagcccugaugagcugccccaucggcgaggcccccagccccuacaacagcagauucgagagcguggccuggagcgccagcgccugccacgacggcaugggcuggcugaccaucggcaucagcggccccgacgacggcgccguggccgugcugaaguacaacggcaucaucaccgagaccaucaagagcuggagaaagagaauccugagaacccaggagagcgagugcgugugcgugaacggcagcugcuucaccaucaugaccgacggccccaacaacggccccgccagcuacaagaucuucaagaucgagaagggcaagaucaccaagagcaucgagcuggacgcccccaacagccacuacgaggagugcagcugcuaccccgacgccggcaccgugaugugcgugugcagagacaacuggagaggcagcaacagacccugggugagcuucaaccagagccuggacuaccagaucggcuacaucugcagcggcguguucggcgacaaccccagacccaaggacggcaagggcagcugcgaccccgugaccguggacggcgccgacggcgugaagggcuucagcuacagauacggcaacggcguguggaucggcagaaccaagagcaacagcagcagaagaggcuucgagaugaucugggaccccaacggcuggaccgacaccgacagcaaguuccuggugaagcaggacgugguggccaugaccgacuggagcggcuacagcggcagcuucgugcagcaccccgagcugaccggccuggacugcaugagacccugcuucuggguggagcugaucagaggcagacccagagagaacaccaccaucuggaccagcggcagcagcaucagcuucugcggcgugaacggcgacaccgccaacuggagcuggcccgacggcagcgagcugcccuucaccaucgacaaguga

SEQ ID NO: 175915 - RNA, 1410 nt, Artificial Sequence; identical to SEQ ID NO: 174174
  derived and/or modified CDS sequence (opt4) from neuraminidase__InfluenzaA__ABS49902

SEQ ID NO: 175916 - RNA, 1410 nt, Artificial Sequence
  derived and/or modified CDS sequence (opt4) from neuraminidase__InfluenzaA__ABS49913
augaaccccaaccagaagaucaucaccaucggcagcgugagccugaccaucgccaccgugugcuuccugaugcagaucgccauccuggugaccaccgugacccugcacuucagacaguacgagugcgacagccccaccaacaaccaggugaugcccugcgagcccaucaucaucgagagaaacaucaccgagaucguguaccugaacaacaccaccaucgagaaggagaucugccccaagcugguggaguacagaaacuggagcaagccccagugcaagaucaccggcuucgcccccuucagcaaggacaacagcaucagacugagcgccggcggcgacaucugggugaccagagagcccuacgugagcugcgaccccggcaagugcuaccaguucgcccugggccagggcaccacccuggacaacaagcacagcaacgacaccauccacgacagaaucccccacagaacccugcugaugaacgagcugggcgugcccuuccaccugggcaccagacaggugugcaucgccuggagcagcagcagcugccacgacggcaaggccuggcugcacgugugcgugaccggcgacgacaagaacgccaccgccagcuucaucuacgacggcagacugguggacagcaucggcagcuggagccagaacauccugagaacccaggagagcgagugcgugugcaucaacggcaccugcaccguggugaugaccgacggcagcgccagcggcagagccgacaccagaauccuguucaucgaggagggcaagaucgugcacaucagcccccugagcggcagcgcccagcacguggaggagugcagcugcuaccccagauaccccggcgugagaugcaucugcagagacaacuggaagggcagcaacagacccgugguggacaucaacguggaggacuacagcaucgacagcagcuacgugugcagcggccuggugggcgacacccccagaaacaacgacagaagcagcaacagcaacugcagaaaccccaacaacgagagaggcaaccacggcgugaagggcugggccuucgacgacggcaacgacguguggaugggcagaaccaucagcaaggaccugagaagcggcuacgagaccuucaaggugaucggcggcuggagcacccccaacagcaagagccagaucaacagacaggugaucguggacagcgacaacagaagcggcuacagcggcaucuucagcguggagggcaagagcugcaucaacagaugcuucuacguggagcugaucagaggcagagagcaggagaccagagugugguggaccagcaacagcaucgugguguucugcggcaccagcggcaccuacggcaccggcagcuggcccgacggcgccgacaucaaccugaugcccaucuga

SEQ ID NO: 175917 - RNA, 1410 nt, Artificial Sequence; identical to SEQ ID NO: 174904
  derived and/or modified CDS sequence (opt4) from neuraminidase__InfluenzaA__ABS49968

SEQ ID NO: 175918 - RNA, 1413 nt, Artificial Sequence; identical to SEQ ID NO: 175900
  derived and/or modified CDS sequence (opt4) from neuraminidase__InfluenzaA__ABS49979

SEQ ID NO: 175919 - RNA, 1413 nt, Artificial Sequence
  derived and/or modified CDS sequence (opt4) from neuraminidase__InfluenzaA__ABS49990
augaaccccaaccagaagaucaucaccaucggcagcaucagcaucgccaucggcaucaucagccugaugcugcagaucggcaacaucaucagcaucugggccagccacagcauccagaccggcagccagaaccacaccggcaucugcaaccagagaaucaucaccuacgagaacagcaccugggugaaccacaccuacgugaacaucaacaacaccaacgugguggccggcaaggacaagaccagcgugauccuggccggcaacagcagccugugcagcaucagcggcugggccaucuacaccaaggacaacagcaucagaaucggcagcaagggcgacguguucgugaucagagagcccuucaucagcugcagccaccuggagugcagaaccuucuuccugacccagggcgcccugcugaacgacaagcacagcaacggcaccgugaaggacagaagccccuacagagcccugaugagcugcccccugggcgaggcccccagccccuacaacagcaaguucgagagcguggccuggagcgccagcgccugccacgacggcaugggcuggcugaccaucggcaucagcggccccgacaacggcgccguggccgugcugaaguacaacggcaucaucaccgagaccaucaagagcuggaagaagagaauccugagaacccaggagagcgagugcgugugcgugaacggcagcugcuucaccaucaugaccgacggccccagcaacggcgccgccagcuacaagaucuucaagaucgagaagggcaaggugaccaagagcaucgagcugaacgcccccaacuuccacuacgaggagugcagcugcuaccccgacaccggcaccgugaugugcgugugcagagacaacuggcacggcagcaacagacccugggugagcuucaaccagaaccuggacuaccagaucggcuacaucugcagcggcguguucggcgacaaccccagacccaaggacggcgagggcagcugcaaccccgugaccguggacggcgccgacggcgugaagggcuucagcuacaaguacggcaacggcguguggaucggcagaaccaagagcaacagacugagaaagggcuucgagaugaucugggaccccaacggcuggaccgacaccgacagcaacuucagcgugaagcaggacgugguggccaucaccgacuggagcggcuacagcggcagcuucgugcagcaccccgagcugaccggccuggacugcaucagacccugcuucuggguggagcuggugagaggccugcccagagagaacaccaccaucuggaccagcggcagcagcaucagcuucugcggcgugaacagcgacaccgccaacuggagcuggcccgacggcgccgagcugcccuucaccaucgacaaguga

SEQ ID NO: 175920 - RNA, 1410 nt, Artificial Sequence; identical to SEQ ID NO: 174790
  derived and/or modified CDS sequence (opt4) from neuraminidase__InfluenzaA__ABS50001

SEQ ID NO: 175921 - RNA, 1410 nt, Artificial Sequence; identical to SEQ ID NO: 174790
  derived and/or modified CDS sequence (opt4) from neuraminidase__InfluenzaA__ABS50012

SEQ ID NO: 175922 - RNA, 1410 nt, Artificial Sequence
  derived and/or modified CDS sequence (opt4) from neuraminidase__InfluenzaA__ABS50023
augaaccccaaccagaagaucaucaccaucggcagcgugagccugaccaucgccaccaucugcuuccugaugcagaucgccgugcuggugaccaccgugacccugcacuucaagcaguacgagugcaaccccccccccaacaaccaggugaugcugugcgagcccaccaucaucgagagaaacaucaccgagaucguguaccugaccaacaccaccaucgagaaggagaucugccccaagcuggccgaguacagaaacuggagcaagccccagugcaacaucaccggcuucgcccccuucagcaaggacaacagcaucagacugagcgccggcggcgacaucugggugaccagagagcccuacgugagcugcgaccccgacaagugcuaccaguucgcccugggccagggcaccacccugaacaacggccacagcaacgacaucgugcacgacagaacccccuacagaacccugcugaugaacgagcugggcgugcccuuccaccugggcaccaagcaggugugcaucgccuggagcagcagcagcugccacgacggcaaggccuggcugcacgugugcgugaccggcgacgacgagaacgccaccgccagcuucaucuacaacggcagacugguggacagcaucggcagcuggagcaagaagauccugagaacccaggagagcgagugcgugugcaucaacggcaccugcaccguggugaugaccgacggcagcgccagcggcaaggccgacaccaagauccuguucaucgaggagggcaagaucgugcacaccagccugcugagcggcagcgcccagcacguggaggagugcagcugcuaccccagauaccccggcgugagaugcgugugcagagacaacuggaagggcagcaacagacccaucguggacaucaacgugaaggacuacagcaucgugagcagcuacgugugcagcggccuggugggcgacacccccagaaagaacgacagcagcagcagcagccacugccuggaccccaacaacgaggagggcggccacggcgugaagggcugggccuucgacgacggcaacgacguguggaugggcagaaccaucagcgagaagcugagaagcggcuacgagaccuucaaggugaucgagggcuggagcaagcccaacagcaagcugcagaucaacagacaggugaucguggacagaggcaacagaagcggcuacagcggcaucuucagcguggagggcaagagcugcaucaacagaugcuucuacguggagcugaucagaggcagaaagcaggagaccgaggugcuguggaccagcaacagcaucgugguguucugcggcaccagcggcaccuacggcaccggcagcuggcccgacggcgccgacaucaaccugaugcccaucuga

SEQ ID NO: 175923 - RNA, 1410 nt, Artificial Sequence; identical to SEQ ID NO: 174790
  derived and/or modified CDS sequence (opt4) from neuraminidase__InfluenzaA__ABS50034

SEQ ID NO: 175924 - RNA, 1410 nt, Artificial Sequence
  derived and/or modified CDS sequence (opt4) from neuraminidase__InfluenzaA__ABS50045
augaaccccaaccagaagaucaucaccaucggcagcgugagccugaccaucgccaccaucugcuuccugaugcagaccgccauccuggugaccaccgugacccugcacuucaagcaguacgagugcaacagcccccccaacaaccaggugaugcugugcgagcccaccaucaucgagagaaacaucaccgagaucguguaccugaccaacaccaccaucgagaaggagaucugccccaagcuggccgaguacagaaacuggagcaagccccagugcaacaucaccggcuucgcccccuucagcaaggacaacagcaucagacugagcgccggcggcgacaucugggugaccagagagcccuacgugagcugcgaccccgacaagugcuaccaguucgcccugggccagggcaccacccugaacaacggccacagcaacgacaccauccacgacagaacccccuacagaacccugcugaugaacgagcugggcgugcccuuccaccugggcaccagacaggugugcaucgccuggagcagcagcagcugccacgacggcaaggccuggcugcacgugugcgugaccggcgacgacgagaacgccaccgccagcuucaucuacaacggcagacugguggacagcaucggcagcuggagcaagaagauccugagaacccaggagagcgagugcgugugcaucaacggcaccugcaccguggugaugaccgacggcagcgccagcggcaaggccgacaccaagauccuguucaucgaggagggcaagaucgugcacaucagcacccugagcggcagcgcccagcacguggaggagugcagcugcuaccccagauaccccggcgugagaugcgugugcagagacaacuggaagggcagcaacagacccaucguggacaucaacgugaaggacuacagcaucgugagcagcuacgugugcagcggccuggugggcgacacccccagaaagaacgacagcuucagcagcagccacugccuggaccccaacaacgaggagggcggccacggcgugaagggcugggccuucgacgacggcaacgacguguggaugggcagaaccaucagcgagaagcugagaagcggcuacgagaccuucaaggugaucgagggcuggagcaagcccaacagcaagcugcagaucaacagacaggugaucguggagagaggcaacagaagcggcuacagcggcaucuucagcguggagggcaagagcugcaucaacagaugcuucuacguggagcugaucagaggcagaaaggaggagaccgaggugugguggaccagcaacagcaucgugguguucugcggcaccagcggcaccuacggcaccggcagcuggcccgacggcgccgacaucaaccugaugcccaucuga

SEQ ID NO: 175925 - RNA, 1410 nt, Artificial Sequence; identical to SEQ ID NO: 174214
  derived and/or modified CDS sequence (opt4) from neuraminidase__InfluenzaA__ABS50056

SEQ ID NO: 175926 - RNA, 1410 nt, Artificial Sequence; identical to SEQ ID NO: 174240
  derived and/or modified CDS sequence (opt4) from neuraminidase__InfluenzaA__ABS50067

SEQ ID NO: 175927 - RNA, 1410 nt, Artificial Sequence; identical to SEQ ID NO: 174774
  derived and/or modified CDS sequence (opt4) from neuraminidase__InfluenzaA__ABS50078

SEQ ID NO: 175928 - RNA, 1413 nt, Artificial Sequence
  derived and/or modified CDS sequence (opt4) from neuraminidase__InfluenzaA__ABS71644
augaagcccaaccagaagaucaucaccaucggcagcaucagcaucgccaucggcaucaucagccugauccugcagaucggcaacaucaucagcaucugggccagccacagcauccagaccgagagccagaaccacaccggcaucugcaaccagagaaucaucaccuacgagaacagcaccugggugaacaacaccuacgugaacaucaacaacaccaacgugguggccgagaaggacaagaccagcgugacccuggccggcaacagcagccugugcagcaucagcggcugggccaucuacaccaaggacaacagcaucagaaucggcagcaagggcgacguguucgugaucagagagcccuucaucagcugcagccaccuggagugcagaaccuucuuccugacccagggcgcccugcugaacgacaagcacagcaacggcaccgugaaggacagaagccccuacagagcccugaugagcugcccccugggcgaggcccccagccccuacaacagcagauucgagagcguggccuggagcgccagcgccugccacgacggcaugggcuggcugaccaucggcaucagcggccccgacaacggcgccguggccgugcugaaguacaacggcaucaucaccgagaccaucaagagcuggaagaagagaauccugagaacccaggagagcgagugcgugugcaugaacggcagcugcuucaccaucaugaccgacggccccagcaacggcgccgccagcuacaagaucuucaagaucgagaagggcaaggugaccaagaccauggagcugaacgcccccaacuuccacuacgaggagugcagcugcuaccccgacaccggcaccgugaugugcgugugcagagacaacuggcacggcagcaacagacccugggugagcuucaaccagaaccuggacuaccagaucggcuacaucugcagcggcguguucggcgacaaccccagacccaaggacggcgagggcagcugcaaccccgugaccguggacggcgccgacggcgugaagggcuucagcuacaaguacggcaacggcguguggaugggcagaaccaagagcaacagacugagaaagggcuucgagaugaucugggaccccaacggcuggaccaacaccgacagcgacuucagcgugaagcaggacgugguggccaucaccgacuggagcggcuacagcggcagcuucgugcagcaccccgagcugaccggccuggacugcaucagacccugcuucuggguggagcuggugagaggccugcccagagagaacaccaccaucuggaccagcggcagcagcaucagcuucugcggcgugaacagcggcaccgccaacuggagcuggcccgacggcgccgagcugcccuucaccaucgacaaguga

SEQ ID NO: 175929 - RNA, 1413 nt, Artificial Sequence
  derived and/or modified CDS sequence (opt4) from neuraminidase__InfluenzaA__ABS71646
augaaccccaaccagaagaucaucaccaucggcagcaucagcaucgccaucggcaucaucagccugauccugcagaucggcaacaucaucagcaucugggccagccacagcauccagaccgagagccagaaccacaccggcaucugcaaccagagaaucaucaccuacgagaacagcaccugggugaacaacaccuacgugaacaucaacaacaccaacgugguggccgagaaggacaagaccagcgugacccuggccggcaacagcagccugugcagcaucagcggcugggccaucuacaccaaggacaacagcaucagaaucggcagcaagggcgacguguucgugaucagagagcccuucaucagcugcagccaccuggagugcagaaccuucuuccugacccagggcgcccugcugaacgacaagcacagcaacggcaccgugaaggacagaagccccuacagagcccugaugagcugcccccugggcgaggcccccagccccuacaacagcagauucgagagcguggccuggagcgccagcgccugccacgacggcaugggcuggcugaccaucggcaucagcggccccgacaacggcgccguggccgugcugaaguacaacggcaucaucaccgagaccaucaagagcuggaagaagagaauccugagaacccaggagagcgagugcgugugcaugaacggcagcugcuucaccaucaugaccgacggccccagcaacggcgccgccagcuacaagaucuucaagaucgagaagggcaaggugaccaagaccauggagcugaacgcccccaacuuccacuacgaggagugcagcugcuaccccgacaccggcaccgugaugugcgugugcagagacaacuggcacggcagcaacagacccugggugagcuucaaccagaaccuggacuaccagaucggcuacaucugcagcggcguguucggcgacaaccccagacccaaggacggcgagggcagcugcaaccccgugaccguggacggcgccgacggcgugaagggcuucagcuacaaguacggcaacggcguguggaugggcagaaccaagagcaacagacugagaaagggcuucgagaugaucugggaccccaacggcuggaccaacaccgacagcgacuucagcgugaagcaggacgugguggccaucaccgacuggagcggcuacagcggcagcuucgugcagcaccccgagcugaccggccuggacugcaucagacccugcuucuggguggagcuggugagaggccugcccagagagaacaccaccaucuggaccagcggcagcagcaucagcuucugcggcgugaacagcggcaccgccaacuggagcuggcccgacggcgccgagcugcccuucaccaucgacaaguga

SEQ ID NO: 175930 - RNA, 1413 nt, Artificial Sequence
  derived and/or modified CDS sequence (opt4) from neuraminidase__InfluenzaA__ABS71647
augaaccccaaccagaagaucaucaccaucggcagcaucagcaucgccaucggcaucaucagccugauccugcagaucggcaacaucaucagcaucugggccagccacagcauccagaccgagagccagaaccacaccggcaucugcaaccagagaaucaucaccuacgagaacagcaccugggugaacaacaccuacgugaacaucaacaacaccaacgugguggccgagaaggacaagaccagcgugacccuggccggcaacagcagccugugcagcaucagcggcugggccaucuacaccaaggacaacagcaucagaaucggcagcaagggcgacguguucgugaucagagagcccuucaucagcugcagccaccuggagugcagaaccuucuuccugacccagggcgcccugcugaacgacaagcacagcaacggcaccgugaaggacagaagccccuacagagcccugaugagcugcccccugggcgaggcccccagccccuacaacagcagauucgagagcguggccuggagcgccagcgccugccacgacggcaugggcuggcugaccaucggcaucagcggccccgacaacggcgccguggccgugcugaaguacaacggcaucaucaccgagaccaucaagagcuggagaaagagaauccugagaacccaggagagcgagugcgugugcaugaacggcagcugcuucaccaucaugaccgacggccccagcaacggcgccgccagcuacaagaucuucaagaucgagaagggcaaggugaccaagaccauggagcugaacgcccccaacuuccacuacgaggagugcagcugcuaccccgacaccggcaccgugaugugcgugugcagagacaacuggcacggcagcaacagacccugggugagcuucaaccagaaccuggacuaccagaucggcuacaucugcagcggcguguucggcgacaaccccagacccaaggacggcgagggcagcugcaaccccgugaccguggacggcgccgacggcgugaagggcuucagcuacaaguacggcaacggcguguggaugggcagaaccaagagcaacagacugagaaagggcuucgagaugaucugggaccccaacggcuggaccaacaccgacagcgacuucagcgugaagcaggacgugguggccaucaccgacuggagcggcuacagcggcagcuucgugcagcaccccgagcugaccggccuggacugcaucagacccugcuucuggguggagcuggugagaggccugcccagagagaacaccaccaucuggaccagcggcagcagcaucagcuucugcggcgugaacagcggcgccgccaacuggagcuggcccgacggcgccgagcugcccuucaccaucgacaaguga

SEQ ID NO: 175931 - RNA, 1413 nt, Artificial Sequence
  derived and/or modified CDS sequence (opt4) from neuraminidase__InfluenzaA__ABS71648
augaaccccaaccagaagaucaucaccaucggcagcaucagcaucgccaucggcaucaucagccugauccugcagaucggcaacaucaucagcaucugggccagccacagcauccagaccggcaaccagaaccacaccggcaucugcaaccagagaaucaucaccuacgagaacagcaccugggugaacaacaccuacgugaacaucaacaacaccaacgugguggccgagaaggacaagaccagcgugacccuggccggcaacagcagccugugcagcaucagcggcugggccaucuacaccaaggacaacagcaucagaaucggcagcaagggcgacguguucgugaucagagagcccuucaucagcugcagccaccuggagugcagaaccuucuuccugacccagggcgcccugcugaacgacaagcacagcaacggcaccgugaaggacagaagccccuacagagcccugaugagcugcccccugggcgaggcccccagccccuacaacagcagauucgagagcguggccuggagcgccagcgccugccacgacggcaugggcuggcugaccaucggcaucagcggccccgacaacggcgccguggccgugcugaaguacaacggcaucaucaccgagaccaucaagagcuggaagaagagaauccugagaacccaggagagcgagugcgugugcaugaacggcagcugcuucaccaucaugaccgacggccccagcaacggcgccgccagcuacaagaucuucaagaucgagaagggcaaggugaccaagaccaucgagcugaacgcccccaacuuccacuacgaggagugcagcugcuaccccgacaccggcaccgugaugugcgugugcagagacaacuggcacggcagcaacagacccugggugagcuucaaccagaaccuggacuaccagaucggcuacaucugcagcggcguguucggcgacaaccccagacccaaggacggcgagggcagcugcaaccccgugaccguggacggcgccgacggcgugaagggcuucagcuacaaguacggcaacggcguguggaucggcagaaccaagagcaacagacugagaaagggcuucgagaugaucugggaccccaacggcuggaccaacaccgacagcgacuucagcgugaagcaggacgugguggccaucaccgacuggagcggcuacagcggcagcuucgugcagcaccccgagcugaccggccuggacugcaucagacccugcuucuggguggagcuggugagaggccugcccaaggagaacaccaccaucuggaccagcggcagcagcaucagcuucugcggcgugaacagcggcaccgccaacuggagcuggcccgacggcgccgagcugcccuucaccaucgacaaguga

SEQ ID NO: 175932 - RNA, 1413 nt, Artificial Sequence
  derived and/or modified CDS sequence (opt4) from neuraminidase__InfluenzaA__ABS71649
augaaccccaaccagaagaucaucaccaucggcagcaucagcaucgccaucggcaucaucagccugaugcugcagaucggcaacaucaucagcaucugggccagccacagcauccagaccggcagccagaaccacaccggcaucugcaaccagagaaucaucaccuacgagaacagcaccugggugaaccacaccuacgugaacaucaacaacaccaacgugguggccgagaaggacaagaccagcgugacccuggccggcaacagcagccugugcagcaucagcggcugggccaucuacaccaaggacaacagcaucagaaucggcagcaagggcgacguguucgugaucagagagcccuucaucagcugcagccaccuggagugcagaaccuucuuccugacccagggcgcccugcugaacgacaagcacagcaacggcaccgugaaggacagaagccccuacagagcccugaugagcugcccccugggcgaggcccccagccccuacaacagcaaguucgagagcguggccuggagcgccagcgccugccacgacggcaugggcuggcugaccaucggcaucagcggccccgacaacggcgccguggccgugcugaaguacaacggcaucaucaccggcaccaucaagagcuggaagaagcagauccugagaacccaggagagcgagugcgugugcaugaacggcagcugcuucaccaucaugaccgacggccccagcaacagagccgccagcuacaagaucuucaagaucgagaagggcaaggugaccaagagcaucgagcugaacgcccccaacuuccacuacgaggagugcagcugcuaccccgacaccggcaucgugaugugcgugugcagagacaacuggcacggcagcaacagacccugggugagcuucaaccagaaccuggacuaccagaucggcuacaucugcagcggcguguucggcgacaaccccagacccaaggacggcgagggcagcugcaaccccgugaccguggacggcgccgacggcgugaagggcuucagcuacaaguacgacaacggcguguggaucggcagaaccaagagcaacagacugagaaagggcuucgagaugaucugggaccccaacggcuggaccaacaccgacagcgacuucagcgugaagcaggacgugguggccaucaccgacuggagcggcuacagcggcagcuucgugcagcaccccgagcugaccggccuggacugcaucagacccugcuucuggguggagcuggugagaggccugcccagagagaacaccaccaucuggaccagcggcagcagcaucagcuucugcggcgugaacagcgacaccgccaacuggagcuggcccgacggcgccgagcugcccuucaccaucgacaaguga

SEQ ID NO: 175933 - RNA, 1413 nt, Artificial Sequence
  derived and/or modified CDS sequence (opt4) from neuraminidase__InfluenzaA__ABS71651
augaaccccaaccagaagaucaucaccaucggcagcaucagcaucgccaucggcaucaucagccugaugcugcagaucggcaacaucaucagcaucugggccagccacagcauccagaccggcagccagaaccacaccggcaucugcaaccagagaaucaucaccuacgagaacaacaccugggugaaccacaccuacgugaacaucaacaacaccaacgugguggccggcaaggacaagaccagcgugacccuggccggcaacagcagccugugcagcgugagcggcugggccaucuacaccaaggacaacagcaucagaaucggcagcaagggcgacguguucgugaucagagagcccuucaucagcugcagccaccuggagugcagaaccuucuuccugacccagggcgcccugcugaacgacaagcacagcaacggcaccgugaaggacagaagccccuacagagcccugaugagcugcccccugggcgaggcccccagccccuacaacagcaaguucgagagcguggccuggagcgccagcgccugccacgacggcaugggcuggcugaccaucggcaucagcggccccgacaacggcgccguggccgugcugaaguacaacggcaucaucaccggcaccaucaagagcuggaagaagagaauccugagaacccaggagagcgagugcgugugcaugaacggcagcugcuucaccaucaugaccgacggccccagcaacggcgccgccagcuacaagaucuucaagaucgagaagggcaaggugaccaagagcaucgagcugaacgcccccagcuuccacuacgaggagugcagcugcuaccccgacaccggcaccgugaugugcgugugcagagacaacuggcacggcagcaacagacccugggugagcuucaaccagaaccuggacuaccagaucggcuacaucugcagcggcguguucggcgacaaccccagacccaaggacggcgagggcagcugcaaccccgugaccguggacggcgccgacggcgugaagggcuucagcuacaaguacggcaacggcguguggcugggcagaaccaagagcaacagacugagaaagggcuucgagaugaucugggaccccaacggcuggaccaacaccgacagcgacuucagcgugaagcaggacgugguggccaucaccgacuggagcggcuacagcggcagcuucgugcagcaccccgagcugaccggccuggacugcaucagacccugcuucuggguggagcuggugagaggccugcccagagagaacaccaccaucuggaccagcggcagcagcaucagcuucugcggcgugaacagcaacaccgccaacuggagcuggcccgacggcgccgagcugcccuucaccaucgacaaguga

SEQ ID NO: 175934 - RNA, 1413 nt, Artificial Sequence
  derived and/or modified CDS sequence (opt4) from neuraminidase__InfluenzaA__ABS71652
augaaccccaaccagaagaucaucaccaucggcagcaucagcaucgccaucggcaucaucagccugaugcugcagaucggcaacaucaucagcaucugggccagccacagcauccagaccggcagccagaaccacaccggcaucugcaaccagagaaucaucaccuacgagaacaacaccugggugaaccacaccuacgugaacaucaacaacaccaacgugguggccggcaaggacaagaccagcgugacccuggccggcaacagcagccugugcagcgugagcggcugggccaucuacaccaaggacaacagcaucagaaucggcagcaagggcgacguguucgugaucagagagcccuucaucagcugcagccaccuggagugcagaaccuucuuccugacccagggcgcccugcugaacgacaagcacagcaacggcaccgugaaggacagaagccccuacagagcccugaugagcugcccccugggcgaggcccccagccccuacaacagcaaguucgagagcguggccuggagcgccagcgccugccacgacggcaugggcuggcugaccaucggcaucagcggccccgacaacggcgccguggccgugcugaaguacaacggcaucaucaccgagaccaucaagagcuggaagaagagaauccugagaacccaggagagcgagugcgugugcaugaacggcagcugcuucaccaucaugaccgacggccccagcaacggcgccgccagcuacaagaucuucaagaucgagaagggcaaggugaccaagagcaucgagcugaacgcccccagcuuccacuacgaggagugcagcugcuaccccgacaccggcaccgugaugugcgugugcagagacaacuggcacggcagcaacagacccugggugagcuucaaccagaaccuggacuaccagaucggcuacaucugcagcggcguguucggcgacaaccccagacccaaggacggcgagggcagcugcaaccccgugaccguggacggcgccgacggcgugaagggcuucagcuacaaguacggcaacggcguguggaucggcagaaccaagagcaacagacugagaaagggcuucgagaugaucugggaccccaacggcuggaccaacaccgacagcgacuucagcgugaagcaggacgugguggccaucaccgacuggagcggcuacagcggcagcuucgugcagcaccccgagcugaccggccuggacugcaucagacccugcuucuggguggagcuggugagaggccugcccagagagaacaccaccaucuggaccagcggcagcagcaucagcuucugcggcgugaacagcaacaccgccaacuggagcuggcccgacggcgccgagcugcccuucaccaucgacaaguga

SEQ ID NO: 175935 - RNA, 1413 nt, Artificial Sequence
  derived and/or modified CDS sequence (opt4) from neuraminidase__InfluenzaA__ABS71653
augaaccccaaccagaagaucaucaccaucggcagcaucagcaucgccaucggcaucaucagccugaugcugcagaucggcaacaucaucagcaucugggccagccacagcauccagaccggcagccagaaccacaccggcaucugcaaccagagaaucaucaccuacgagaacagcaccugggugaaccacaccuacgugaacaucaacaacaccaacgugguggccggcaaggacaagaccagcgugacccuggccggcaacagcagccugugcagcaucagcggcugggccaucuacaccaaggacaacagcaucagaaucggcagcaagggcgacguguucgugaucagagagcccuucaucagcugcagccaccuggagugcagaaccuucuuccugacccagggcgcccugcugaacgacaagcacagcaacggcaccgugaaggacagaagccccuacagagcccugaugaucugcccccugggcgaggcccccagccccuacaacagcaaguucgagagcguggccuggagcgccagcgccugccacgacggcaugggcuggcugaccaucggcaucagcggccccgacaacggcgccguggccgugcugaaguacaacggcaucaucaccgagaccaucaagagcuggaagaagagaauccugagaacccaggagagcgagugcgugugcgugaacggcagcugcuucaccaucaugaccgacggccccagcaacggcgccgccagcuacaagaucuucaagaucgagaagggcaaggugaccaagagcagagagcugaacgcccccaacuuccacuacgaggagugcagcugcuaccccgacaucggcaccgugaugugcgugugcagagacaacuggcacggcagcaacagacccugggugagcuucaaccagaaccuggacuaccagaucggcuacaucugcagcggcguguucggcgacaaccccagacccaaggacggcaagggcagcugcaaccccgugaccgccgacggcgccgacggcgugaagggcuucagcuacaaguacggcaacggcguguggaucggcagaaccaagagcaacagacugagaaagggcuucgagaugaucugggaccccaacggcuggaccgacaccgacagcgacuucagcgugaagcaggacgugguggccaucaccgacuggagcggcuacagcggcagcuucgugcagcaccccgagcugaccggccuggacugcaucagacccugcuucuggguggagcuggugagaggccugcccagagagaacaccaccaucuggaccagcggcagcagcaucagcuucugcggcguggacagcgacaccgccaacuggagcuggcccgacggcgccgagcugcccuucaccaucgacaaguga

SEQ ID NO: 175936 - RNA, 1410 nt, Artificial Sequence
  derived and/or modified CDS sequence (opt4) from neuraminidase__InfluenzaA__ABS71655
augaaccccaucaagaagaucaucaccaucggcagcgugagccugaccaucagcaccaucugcuucuucaugcagaucgccauccugaucaccaccgugacccugcacuucaagcaguacgaguucaacagcccccccaacaaccaggugaugcugugcgagcccaccaucaucgagagaaacaucaccgagaucguguaccugaccaacaccaccaucgagaaggagaucugccccaagcuggccgaguacagaaacuggagcaagccccagugcaacaucaccggcuucgcccccuucagcaaggacaacagcaucagacugagcgccggcggcgacaucugggugaccagagagcccuacgugagcugcgaccccgacaagugcuaccaguucgcccugggccagggcaccacccugaacaacgugcacagcaacgacaccgugcacgacagaacccccuacagaacccugcugaugaacgagcugggcgugcccuuccaccugggcaccaagcaggugugcaucgccuggagcagcagcagcugccacgacggcaaggccuggcugcacgugugcgugaccggcgacgacaagaacgccaccgccagcuucaucuacaacggcagacugguggacagcaucgugagcuggagcaaggagauccugagaacccaggagagcgagugcgugugcaucaacggcaccugcaccguggugaugaccgacggcagcgccagcggcaaggccgacaccaagauccuguucaucgaggagggcaagaucgugcacaccagcacccugagcggcagcgcccagcacguggaggagugcagcugcuaccccagauaccccggcgugagaugcgugugcagagacaacuggaagggcagcaacagacccaucguggacaucaacaucaaggacuacagcaucgugagcagcuacgugugcagcggccuggugggcgacacccccagaaagaacgacagcagcagcagcagccacugccuggaccccaacaacgaggagggcggccacggcgugaagggcugggccuucgacgacggcaacgacguguggaugggcagaaccaucagcgagaagcugagaagcggcuacgagaccuucaaggugaucgagggcuggagcaaccccaacagcaagcugcagaucaacagacaggugaucguggacagaggcaacagaagcggcuacagcggcaucuucagcguggagggcaagagcugcaucaacagaugcuucuacguggagcugaucagaggcagaaaggaggagaccgaggugcuguggaccagcaacagcaucgugguguucugcggcaccagcggcaccuacggcaccggcagcuggcccgacggcgccgacaucaaccugaugcccaucuga

SEQ ID NO: 175937 - RNA, 1410 nt, Artificial Sequence
  derived and/or modified CDS sequence (opt4) from neuraminidase__InfluenzaA__ABS71657
augaaccccaaccagaagaucaucaccaucggcagcgugagccugaccaucagcaccaucugcuucuucaugcagaucgccauccugaucaccaccgugacccugcacuucaagcaguacgaguucagcagcccccccaacaaccaggugaugcugugcgagcccaccaucaucgagagaaacaucaccgagaucguguaccugaccaacaccaccaucgagaaggagaucugccccaagcuggccgaguacagaaacuggagcaagccccagugcgacaucaccggcuucgcccccuucagcaaggacaacagcaucagacugagcgccggcggcgacaucugggugaccagagagcccuacgugagcugcgaccccgacaagugcuaccaguucgcccugggccagggcaccacccugaacaacgugcacagcaacgacaccgugcacgacagaacccccuacagaacccugcugaugaacgagcugggcgugcccuuccaccugggcaccaagcaggugugcaucgccuggagcagcagcagcugccacgacggcaaggccuggcugcacgugugcgugaccggcgacgacaagaacgccaccgccagcuucaucuacaacggcagacugguggacagcaucgugagcuggagcaaggagauccugagaacccaggagagcgagugcgugugcaucaacggcaccugcaccguggugaugaccgacggcagcgccagcggcaaggccgacaccaagauccuguucaucgaggagggcaagaucgugcacaccagcacccugagcggcagcgcccagcacguggaggagugcagcugcuaccccagauaccccggcgugagaugcgugugcagagacaacuggaagggcagcaacagacccaucguggacaucaacaucaaggacuacagcaucgugagcagauacgugugcagcggccuggugggcgacacccccagaaagaacgacagcagcagcagcagccacugccuggaccccaacaacgaggagggcggccacggcgugaagggcugggccuucgacgacggcaacgacgccuggaugggcagaaccaucagcgagaagagcagaagcggcuacgagaccuucaaggugaucgagggcuggagcaaccccaacagcaagcugcagaucaacagacaggugaucguggacagaggcaacagaagcggcuacagcggcaucuucagcguggagggcaagagcugcaucaacagaugcuucuacguggagcugaucagaggcagaaaggaggagaccgaggugcuguggaccagcaacagcaucgugguguucugcggcaccagcggcaccuacggcaccggcagcuggcccgacggcgccgacaucaaccugaugcccaucuga

SEQ ID NO: 175938 - RNA, 1410 nt, Artificial Sequence
  derived and/or modified CDS sequence (opt4) from neuraminidase__InfluenzaA__ABS71659
augaaccccaucaagaagaucaucaccaucggcagcgugagccugaccaucagcaccaucugcuucuucaugcagaucgccauccugaucaccaccgugacccugcacuucaagcaguacgaguucagcagcccccccaacaaccaggugaugcugugcgagcccaccaucaucgagagaaacaucaccgagaucguguaccugaccaacaccaccaucgagaaggagaucugccccaagcuggccgaguacagaaacuggagcaagccccagugcgacaucaccggcuucgcccccuucagcaaggacaacagcaucagacugagcgccggcggcgacaucugggugaccagagagcccuacgugagcugcgaccccgacaagugcuaccaguucgcccugggccagggcaccacccugaacaacgugcacagcaacgacaccgugcacgacagaacccccuacagaacccugcugaugaacgagcugggcgugcccuuccaccugggcaccaagcaggugugcaucgccuggagcagcagcagcugccacgacggcaaggccuggcugcacgugugcgugaccggcgacgacaagaacgccaccgccagcuucaucuacaacggcagacugguggacagcaucgugagcuggagcaaggagauccugagaacccaggagagcgagugcgugugcaucaacggcaccugcaccguggugaugaccgacggcagcgccagcggcaaggccgacaccaagauccuguucaucgaggagggcaagaucgugcacaccagcacccugagcggcagcgcccagcacguggaggagugcagcugcuaccccagauaccccggcgugagaugcgugugcagagacaacuggaagggcagcaacagacccaucguggacaucaacaucaaggacuacagcaucgugagcagauacgugugcagcggccuggugggcgacacccccagaaagaacgacagcagcagcagcagccacugccuggaccccaacaacgaggagggcggccacggcgugaagggcugggccuucgacgacggcaacgacguguggaugggcagaaccaucggcgagaagagcagaagcggcuacgagaccuucaaggugaucgagggcuggagcaaccccaacagcaagcugcagaucaacagacaggugaucguggacagaggcaacagaagcggcuacagcggcaucuucagcguggagggcaagagcugcaucaacagaugcuucuacguggagcugaucagaggcagaaaggaggagaccgaggugcuguggaccagcaacagcaucgugguguucugcggcaccagcggcaccuacggcaccggcagcuggcccgacggcgccgacaucaaccacaugcccaucuga

SEQ ID NO: 175939 - RNA, 1410 nt, Artificial Sequence
  derived and/or modified CDS sequence (opt4) from neuraminidase__InfluenzaA__ABS71660
augaaccccaucaagaagaucaucaccaucggcagcgugagccugaccaucagcaccaucugcuucuucaugcagaucgccauccugaucaccaccgugacccugcacuucaagcaguacgaguucagcagcccccccaacaaccaggugaugcugugcgagcccaccaucaucgagagaaacaucaccgagaucguguaccugaccaacaccaccaucgagaaggagaucugccccaagcuggccgaguacagaaacuggagcaagccccagugcgacaucaccggcuucgcccccuucagcaaggacaacagcaucagacugagcgccggcggcgacaucugggugaccagagagcccuacgugagcugcgaccccgacaagugcuaccaguucgcccugggccagggcaccacccugaacaacgugcacagcaacgacaccgugcacgacagaacccccuacagaacccugcugaugaacgagcugggcgugcccuuccaccugggcaccaagcaggugugcaucgccuggagcagcagcagcugccacgacggcaaggccuggcugcacgugugcgugaccggcgacgacaagaacgccaccgccagcuucaucuacaacggcagacugguggacagcaucgugagcuggagcaaggagauccugagaacccaggagagcgagugcgugugcaucaacggcaccugcaccguggugaugaccgacggcagcgccagcggcaaggccgacaccaagauccuguucaucgaggagggcaagaucgugcacaccagcacccugagcggcagcgcccagcacguggaggagugcagcugcuaccccagauaccccggcgugagaugcgugugcagagacaacuggaagggcagcaacagacccaucguggacaucaacaucaaggacuacagcaucgugagcagauacgugugcagcggccuggugggcgacacccccagaaagaacgacagcagcagcagcagccacugccuggaccccaacaacgaggagggcggccacggcgugaagggcugggccuucgacgacggcaacgacguguggaugggcagaaccaucagcgagaagagcagaagcggcuacgagaccuucaaggugaucgagggcuggagcaaccccaacagcaagcugcagaucaacagacaggugaucguggacagaggcaacagaagcggcuacagcggcaucuucagcguggagggcaagagcugcaucaacagaugcuucuacguggagcugaucagaggcagaaaggaggagaccgaggugcuguggaccagcaacagcaucgugguguucugcggcaccagcggcaccuacggcaccggcagcuggcccgacggcgccgacaucaaccugaugcccaucuga

SEQ ID NO: 175940 - RNA, 1410 nt, Artificial Sequence
  derived and/or modified CDS sequence (opt4) from neuraminidase__InfluenzaA__ABS71661
auguaccccaucaagaagaucaucaccaucggcagcgugagccugaccaucagcaccaucugcuucuucaugcagaucgccauccugaucaccaccgugacccugcacuucaagcaguacgaguucagcagcccccccaacaaccaggugaugcugugcgagcccaccaucaucgagagaaacaucaccgagaucguguaccugaccaacaccaccaucgagaaggagaucugccccaagcuggccgaguacagaaacuggagcaagccccagugcgacaucaccggcuucgcccccuucagcaaggacaacagcaucagacugagcgccggcggcgacaucugggugaccagagagcccuacgugagcugcgaccccgacaagugcuaccaguucgcccugggccagggcaccacccugaacaacgugcacagcaacgacaccgugcacgacagaacccccuacagaacccugcugaugaacgagcugggcgugcccuuccaccugggcaccaagcaggugugcaucgccuggagcagcagcagcugccacgacggcaaggccuggcugcacgugugcgugaccggcgacgacaagaacgccaccgccagcuucaucuacaacggcagacugguggacagcaucgugagcuggagcaaggagauccugagaacccaggagagcgagugcgugugcaucaacggcaccugcaccguggugaugaccgacggcagcgccagcggcaaggccgacaccaagauccuguucaucgaggagggcaagaucgugcacaccagcacccugagcggcagcgcccagcacguggaggagugcagcugcuaccccagauaccccggcgugagaugcgugugcagagacaacuggaagggcagcaacagacccaucguggacaucaacaucaaggacuacagcaucgugagcagauacgugugcagcggccuggugggcgacacccccagaaagaacgacagcagcagcagcagccacugccuggaccccaacaacgaggagggcggccacggcgugaagggcugggccuucgacgacggcaacgacguguggaugggcagaaccaucagcgagaagagcagaagcggcuacgagaccuucaaggugaucgagggcuggagcaaccccaacagcaagcugcagaucaacagacaggugaucguggacagaggcaacagaagcggcuacagcggcaucuucagcguggagggcaagagcugcaucaacagaugcuucuacguggagcugaucagaggcagaaaggaggagaccgaggugcuguggaccagcaacagcaucgugguguucugcggcaccagcggcaccuacggcaccggcagcuggcccgacggcgccgacaucaaccugaugcccaucuga
